United States Patent Application Publication US 2020/0377945 A1 - sequence listing, part 28

SEQ ID NO: 5025 - DNA, 127832 bp, Unknown
  gut microbiota DNA sequence
ataatggaacgtatttttcctaacgtcaccttgatatgtgccgattctccggagatagctgcataaatcttactaaattcatgccgcaaatatcgttcagcctcctccatattcataccactcaggtagataggaccgatattctccaccatgatactaccttccggagaaatagtctctcgtaccgtattttccgaagttccccatacattgataatcacttcatcccccggccccaacctataattttccggagtaggaatatttaaatttggctcaaatgacaaattccggctggcaaatatattgcgtccaaaaaattttctatacccaccacgatcaaaatcccccctttccctatattgctgtgccatcactcctcctgcagcaagcacaaatagaaagaacaacaattcttttttactcttccttccatttctggaattaattctctcaatacatacaaaaaaataaagaacaacaagtaacaacataaacatacaaagtttaaaatttaaaaaattaattactaatcaagcgaataacaatataaataaatacaaattacattaaaaacacactcaatgcgaaatcttaaaaaacaaacataaccttcagaaacctacatctttcgtagtaaaaacaataataaaagcaaaggaagtgaaaatatcttttgcgactattatcaagatacaaaaatgactaaataaaacctacagtggtataaaattgacatttaggttacaaaattcatattcttagataatttatcacaatcaccactcaaacacatcataactcactccaatcccaacatagtgacttgccttattcccagaaaagccgtatccgacctgtacacccagcccgaaccgtttccgctttgcccgctctctgatgaacatcgtgcgcgttttactgtacacctctatactatccaactttgcccggtagcctgacacataagccgtataaaggctgtctttgtagattttctgcgtaataggcaaatacactgtatcccgaactgtatcgcccggcactgggacgggaacaacgaacgggaacgaatctacaacgctttcataaaccggaacgggcactgtatcccagaccgtatcaatacgatttgtaatgatcgtatctctgaccacttcacccggtacgcgttccacccttgccgggcggaatacgataaacaggacaagaatgattatgataatgtaaggcaaagatttcatggccgtatgattacaggtttcataaaattagagaactccttccgtacatcgaaacatggacaagccttgatatattcaaacggttctacctccccattatcatttaagtcaggtgatgtatcccggtgtccaagtacctcgataatagggtagtctctacagagcttctctaccaaatcgcgcaaagctattcgttgcgcttctgtccgggtatcagcagctttcccattgacatccaggccgccgatatagcagataccaatcgaatgtttgttatacgaccgcccagtgtcccctttcgtattgcaatgtgccccgtccacagacaagggcctaccgttctccacagtcccatcaatatctattacgtaattatacccgatctgattaaagcctctctgtttatgcatccggtcaatgtcttttgcacgcaaatcctgtccgaagcgcgtggccgaacagtgaataatgattgaatcaattgttttcatattgtttattttttattagtttataaaacttttcaagagttaagttgttaagaagataaaacataacataaatcaataactttgttgccttaatagccgtttgtaacgcttttgcctgtgaaggtagaagcgttatttcttgttttcacatttttaaatacaaattcattacacaagctcaataattatccttatttattccctccatgaaaatatctccatgataaaaaatattattatcccacaggtttataagcatttttaatagatacacaatgaacttttataggaataaatatgttatataacatgcttaaactttaaaaacacggttatgcggtctgtgaagatagcacgccgtatcttattgtatgcaggtaaaaaccatatctttcaaaataacaaatacatttaaagttaatgctatgcgcatccattattaataagtcaaaaaccgactcaattaaaaaatagtccaataacaactcctgcttttttcttcatcgctaatgcaacatcagccattccgtaatgatagccaccgaatgttgcaacagtgtctcaagagatgatatttatcccaaattggtcaaaatattctaaaacaacctcgctaaacaatgaattactttaactatcagaacattacttgttccaagcactgtaaccacatcgctatgacttaattcttggagtaaaaatattgcatatattattcttttagcggttttattaacacttttattaaaaataaaaatcgacctttgtattccaatattttatattttgtaaacttggtctgggaagataaagttatacatttgtttgttttgtttgtgtaattccccgtcgctaagcgtagcgacgggagattttatctaaactactctttctttcccgaaacattatcgaaccccttcagcttatttatgatagccttcgggaaaaagcccgggcaaatctcttctacgttctcaataatacttaaggcctcacgtaccattaatgccgtacaagcgaaataccggaaccagacgaaactatcgaccacctgaccggcgatcgagaaattacccatcacatgcgacaggactaatacacaactgtaaatgataagcttacgcccgatcataccataagctttactactgatgtctttggatagccagtgcttgacaaagccgagcaccgtatcaacacatacaaggacaatcaaccatttgacaaactcccagtcaccaaagacatagcgctcaaagagttccagcaaaggagaaagaggcaaggcaatcaatgcaatcatcttcaaatttttcatattcttggatatataaatttaaatagtatatttattatttttttaaagaaactaattccctaaaagtagcaaaccatcatagctatgatgcaacctatgttgataagaagtattttactctatataatttttttattagaatgtacaacaattatacgaatttacgtgttattgagagaacatcttaaataagtattatcaaatgcggtatgaataaactacggttattattcatttcctttataccgcatctttccgccccatctgtgaagacagggcggattcttgttacttggatttagatgccagcttgggctctaaagtggcttttacctctctggtgatctgatcgaatacttcaaagtgcgctgcaacattctccgactctggaagggacatttgtttactgcctgattccaacagcaaatacccgatataccgcccggaggttacgggctgcttgcctgtaggggtgtcaatatcttccgtgaccgttttaatgatttcacaatgaagacggctgagattatcgttattgacactgtagtttacattgtactgataatctcctgaaacggctttaccgtttacttgaactgttcttgattcttcttgaaacataatttattgattttgggagttaataattactttatctaattcattataaatagcggtcttcaccactgcgagtatcggagccggatcaacgtaatttcgaatgatatttgcaccttgttcgtcaacttcaacttcaccttctttgtatatccgttgggcaaactccaattcacccaaatcgggtgtattacagtaaatagcgtttcctactgttttagccacgtcgaactcttcaacttctccgtcaatagctgtttttactttaattcttctaaaattgattttcatattttatttattttgaatttatcattgtaatctgcgctgacaatgctgtttaccaaacgttgcgccctacaacaaacacacggaatggacaatcacggggacccttgtttgcgtcaagcattaaaacctcaaaataagagttgttttgcgtctctacctgaccgaatacccaaccataaccacccaatccctgtactaagacagcgtactgcggatgacgtaagttgtggtatatcctgtattttcctgcatctattttttgcgcactggttaaggtgcacccgttgccccattcattagtgactgtacccgcttgatatacatatccgatacacagcattccgggagcgttccacttttcaccgcccctttgggcgaaaatatgacttccatacgattctatcgaatttgcagtgcctgcgttagctaaacatcttagagcaaaaccggaacttccgtatgattcaatacttagaccactgtaattgtcgtttcgtatggacatcaatgctgtgcgtgaagttgtaggactgtccccttcttcgttaatacgaaggaatttattaccggacatgtttaacaggatcttagcctgcgaattgcttgccgaaacaagagagcctcccgatatattccaggcaccgatctttgcaccatcagttaccgtaaggtttccggttgtgatcctctgtgctgaaaatgcctgtgccaccacttccgcagcttcaatcacattggcagacagtttgccgtttgcgttgatggcggctgtctgttgacctgtgttattttgaaagagaacgttgtctgacttcaaaacgatcttgcgggacgtgatgttgattccggtttcgactaagccgttttgggtggcggtgacacgaccgtctactgtgttggctttgctgttcgctgttcctgctaatgaattggcggaatttgccgtttgttctactacgcttaattttgcgtggtctgaactcaaagttaactcagccgcacttaatcgcctaccttgatcgtccactttgtttgcagttaaagctatgctttcctgcgtctgctttatttcggtatagtatccgtatgtgcggacgggttcagttccatcggtgcgaacggggaacgatgtattatacgaaccgtgataatcggtttgataaacgttgattacgtttgggtcaatagtatcatctacggttacgtcatacatagaaccgcccctaatacccattctacacgtagacgtttcagttatttgtcccaaatcaacaactatctttgcacccgcagaagtccatgctttagtatagtcaaagatattggttactgctggcaacgaaccccaacccgaaccggacatctcaaacgttaagttcatagaaaaaccgccatcatgtgtaccgtatgaaggttttccgtatcccgcattaagaggtctacttatttcaacccttgttttgtggtaaaccggaatacttataaccaacgggaaaaacttattattgtcccatcctcttaaatctattcgctttgatatatgcctattggtggtactattaataacactaatatcaccaacaacagacgtgatacttttttcggtctgttcgatgcgtgaagcaagtccggtaacacgtccatcaacggtatttatcttttcaacggtggatgttatcttaccttcgactacactaatttgactattggtatattcagcgcctttataaactgcatcctgaaaattgggactccatgcggttgcaatttcacctgcttctactttaaagtctttcacccatatataagcccaatcaattctttctatatcaacaaaattatatacatccttttgttcctctgtgtttttcgttacgttaaatgtatgcttgaaataactccattggttatctgctgttgatttaacaattacgttttcagaatcacacacatcaatagtaaaaccaactggggtattttgactacctttaatccatccggaaacggtatacttaccggggataggcgggataatatcaggtatccgcatagctcctccattaccttgtgaaccaaccaaatagaaaccatgcagagacatttgcctttcaatagtaggagatggatataaagtattaagcgttgaacttgtgtaactatacaaattgttagcacctataccccaattttctaccttagttttaacggatagttcaatttttcccggtatagccgctaactcggtagcaatattactaaactcctgttcgatgctctttccatttctcagaatgaaaatacctttcaggaaacagttcatcgcatacagaccgtatccggacggttggaggtcagccggaaagtctgtatccgtcatgccatcgagacaacccaaaatcactttgttctttccggccaaagacgtggagtttaccccgtccagtacagaaatgcgcggtttaccatcttccgaagctgtgagatacaaaatgccctgtctgttcggattcgtgaggttacccatctgaaccagatcatcaccaacggccggagttgtaccattgggaaatacggatttaagtataagaatcgaatcatcattcaccgaggcaaccggaacccagtagtatttaacgtgtccggatgtgtagacctgacaacgtaccaagtcatcagtgacaaacatcatgtcgccctctatacctaaaacatagtaagccggatcgccggacgtttccgaaatggacttaacacgcccgttggcggatgaaatcaccagaccgccgttaaccgcacgaactttcgaaatgataagttcaaaaatggtcatggccttacggactacggcattatctatttcaaggttccaatccccattgatagccttgtatagcttcatcccttcacccatcagtccggggatgaatctttctgaactgatatagtccttgactatggtttgaaacagggttgcgacgtgctcaacattcagatcgtatgtttttgcaagtgcctgaacgagtaaatttaaagtatgcgtgttacctttagcccaaatatccgcgcctgttgaaatattcccttccgaatgtagtgtgccaacattggccgaaccggttacttccaatgtagcggctttaactttcatccgggcaactaaagattgcaattccgtgtcgccactttcgttgataaatgtaagcccatcaccaacaaacagccctttcaggaaagtgataggctctttagctatatccgcttttaccttgcttaaataaagatcatctatcttcttcaaagcctctttaatcgctgcatctatctccttcaaaatgcggagcgaagaaagcgtattatcatcggttaactctgtggcggtatccgatgaagcaatgatacgcgaacgaatctctaacagcgttcggagcgatgacagtacgttgctatcggtaaacgactttgtatcggtagcctttacaatgtcaaccgaagcacctccaccacctccgccgttaacagtaacgccgccagccgtccgggtgataacagccccagccggatagttctttgaccggggtttcgcaggaatggatgtagttttaatctttacgtctttcatgtctctatcataatacaccggaactgctccatcttataatcgatacttcctccggcattaatgaatatcttattaaccagagatttgtccgacagtctggaaataggagttaaaccaatcgtttcttctatttcttgtgttagcttgatacgagtagtgctatatcgattgattatacgctggattaaatgctcctccggacgaatagccctgtcaaccagtaccgaatacaaattatcacgaagatagtcctctcctatcatcactttcgaatagcatgccccatcattgttgtaactggatattttaaactcgatttcgtctaattcgttaatgtagtcttcgttaacgacattttcataataacggtctgtattgtcggtagtcttttcggcctcggtgctctttccatatttaaaggaaaagtcttttaacaagaatccatttataaaaatagcattatgtattttagatgcgtaaagagtaaattcaagctcgccatataatagggtatcaatagggattattacgcctgaaacacctttatatggcatatatattgttttttggttctcaatggatacataatctaatcgggctttgttattctcttcggaggcgggaagtctaaaaaaataattgggatttgcagaccatgcgaatggggccaatccgttagtactgccataatatttattaccgatccgtaattggcaagcagccaacggcatgtacgtgccccggctattgtcccaaggaatcaaatccatatccgctatcgtcttatagcttccagatacagcaaaggcccctgattcgtacactgaggacgcacctttaaaatccattatctttgttaagagttccagcccgcctatcattgataagtcaccgacagcacccaaacacctggcttgtataacatttgtaaacgaatagtctgaaatatccggcttaccgtccactattttataattgcagtacctttcctgtattcctcctataagtttatgcgcatcataagcacgtaactctaaatcgtcattggtgataaccgtatcgccatcatacagatacatgttccagtttttcggataaagaaactgacggtaacattttctatctttattcgtatttaaacgtgacgaaagaacttttgcatcttcgtaactctcttccggaagtaaattcccaaccggataattactgtcttttactgttactttattataaccgcccaaaatatcgagcgtatgattatcgccgctaaagccaactttttggacgttgatagtaaatcctctcacggttgcatatgcggaaaagtccaacgcatacttatagtaatcgcctgcatgatccacatctacgaagtaaagctcacccctccaatccacacaagtccaattgaggaatttgcatatctcttcaagcacctcttttagtttcattggcttgtcatcttcatcaaagaaattctgttcacttatcatcatgtccttcagaacatttgtccaagccgtataattcgatttatcctttgcgtaaacatgtggaatatatacgtttgaataacagcctcgagattcagagacacaacgggttaataattcccataaagttacaaaccctctttctgtcccgtttttgggtttataatcgatatactccaaagcggacatggcgctgacacattcaagttccaattcgaatatagtactgctataatcttgtgtgtacaactccggcttgataaagccacaccacgttaccacgccatcacgcttaaatgttacacggtattgctgataagctgtggaaaacaaactttgcaaataatccgaacctactatccggatattggccgtactgaacctggacgggacgtataagaaatcatcatcatcgatatctacagtaaatggatttccagcccccactaattcagtaggagcccccacatacccttctttctctatttctataatgcaagatttattacggagacttgcaaaaggaatcgtataaatcaatccgtagctcataatggtttctttccttgtttttttaatgtgttatttatggagagcagaatatccggtccgagcaccttggctttcccaaattctatttggaccctatttgaactccccaaattaccagagttgatagcatcaaacaaattagattgctgggtcatattcaaaatcatttcccctttattcagacgcgccaatcctttatctccaaaagatgtgccccctaaatagatcccccctgaattaaatccgggagcgctaattctcgctgcttctatcatagccatcattgtcgctatttgtcccgccgccagagccgccccgacaaaaggtattcccgcataagccgctgtactcttcgatgccatttctgtaacagccgccgcacttttcttctgactattttctaattccatttttgtcgctacttcatctgcggctattttaacaactgttcctgcaaccgttcctgctgtacttttctcaagtccttgctgtgcctccttggcgccagccaactttttagccaaaactgatatattctcaatagtacgaactatagacgtaaaagaatcaaccgtatttatcattgcattccaaatggccatgattttctcccatcccgttgcatctacatcattcatcacatcacgaaggctcgtaaaggccgatacgacacgatcggagcttgtagcgatatccttgatccctgagtaaagcgattcatccagctccttagtgatttttttcacgtcttcttttactttagctaatttcaaagcctcctccaaagtagggacattggctatcgcatttgacagttcatccgaaagttccttacctactttctttgcctgttcctgtaattcttttgcgtattcctttgctttatcaagattctcagaggcaatatccacttttgattttttataatcaaaagtggtatcgcgtgatttcatcttcacggatgggatatgtgatatcgcctgatccagcatgtccttgataaaagcatcagccctctcaccgattcctttaatgcttgcggcaaacttagcggcctcaaccgatagccccgcaagattttcattgaaagccttttgagagataagtccttttgaaagcaaggttttattttctttaaccttatcattgtactccttctgcaccttctccatctctgcggccgcctcatcatataaaggatgatcaataacatcctgaagcattttgagatatttgctattaagtatctctttgtcacctgacgctttggcctctatcaacatcttcctcccgagttcatcgacagctttataatattccgactccgacatcttctcgacttcccggcgggcatccaattcccttaaggatttagcgtatttctcttcggccttttgaagttccgtctttttagaatcaggttcaggaggtgtagaatcagccgtagccacagaattagcaatctccttgcctaatcgacctttagcgtcttttagtatcttgacgtgttcgataaatgcattcaagtcatctttaagcccgttttcccagcctaaagcatcttgggtatgcacaccgtatttctttttaaatctttcctcttttactaaatccccgcgagccatcgcccagtccggagccatacttcgtatcgttttgccattatatgatttaccaccaatctttcctaattcattttcgctatcagccacctctttagcagccagttcggctcttgctgcactttctaataatgatatacgcttttcaataactttgttaacatcttgattaacactcaattcagtccctaaaatcccatttatctgggctaaaattcttttcttatctgataatgtgacattggtcttattgtattcctcttgcagagcgcgaatcttgattatttcaggagtttttgagggaacatcattcattcgtttctgatattcatcgaataacccttttatacgctttgactcccgataggcattatacaatttagcgactacagccccaatgaccgtcaatatagccgtaggagccatggatatcagggttgccctaatcgacatggcggccttagagaacgccattttaatggaggcagaagttctctgtgctttccacgctatttcatcgaatttttggccggcatctttagccgcccggcgtgcagcggatttagcagccaactcagcccgggatatcgacagaagtattttattcaccaaccggcttgttaccataaccatgatggcggcaaccgtataggtaattaccgatcttatattgtcagccgccacctttaccgcgttcgttagccaatcgatcaaggctttatatttgctctgtacttccgttccattcacgaattcagtgaatgcattcttaagccggttcacggaagtttccaaattatccgtatctacgttgggaatcatcttgtcaagagcctcagcaaacttaggaagaacatctttactcattaatttgccctgctttaacaacttgtcaagcccccctaccgatacccctgcggcttttgccatggcttgcagagcgataggtaggcgctctcccatttgtaaacgaagctcctctgaactaacctttcccttggacatcatttgagataatgccagaaagacgccgttgctatcttccgcactcatcccaaatgcggttactgcacgggacacagactcaaatattttccgctgatccatcatagacatgcccgatatggaagcggcaaccgtaaacttagcgtaattcccggtcaacgcgttgatctcaataccatatttcttcgccatgtccagcaaaaaacgctggttatcagcgaaccggaccatgctaccggatacattcttcaaagcagtggtaacccggctggtttccctggcaacatcgatcagacgggatacaaagttgctcaaccccaatccaccggcacccagtgccgccgcaaaagttaagacctgcatctgcatcactcttagaccgtttttaacggaattcgtacctctcttgaagttttcagtcaggaggtttatcgcaatcgaaaatgataatctacctgccatactatttatttattagtttcttaccctctttcataaactgttcgaagcggtctatatcttcatttattgctctttccgcttccctggccgcctctacttcctcccatgggaatgttatcaggtccatagccccgtttttcatcttcttggaatcaatatgcggcaacatggtaaagaatgtccataaccggctggcttccatctcttctttacgtttacgttcataggcttcaatatacatgggcaaatcacacaactccatttcctccaatgcatatgtagcatccagaccggacatgataagcgttgacacgatattgcctatcatccccggagtggtatcggaattgatcttatctgtaccagctcgtttattttgaaactgggccaatacagacatcctattttccaaagacaataccatctcacgaaccaatttccggttggatagtgtctttttaaaaacatcaaacgtatatacttctcctttagcaactattgtggaggtatataacaatgcgtttacatcctctttatctgaatagtccattaaagaaaatgatttacccctgagttgttcccagcggataacagcctttattgtcaatcttgcttccatccaatttattaattaaaaaggcggccatctacggaccgccttcgatattcatcattattgtatttcttatcctcccaccccgacaggctcaaccggggcaagggcgccaattcccttaaaagaagcactgcatgaaacaatctgtccattatctgatttaatggataaggacgtgataattactttacccgtatagttcttttgctttgtatccttagtgaaagttccaccgaaattatccttatcggcagacgcagggctccccaaaaagaagtcaagtacctcacctgttatctgcttactcaaaagagtgtcaaagctcattgcaccttcttttcgggttaacaatgattcacttgacagggtaaagctctttttcccaggaagcgaaccggcccagtcccccatcattttattagaaatatcaatctcttctgttgaaacatccaacccgcagctggaagcaaaagcaataggttcatcaccgatgaaaagcataagctccccccgataaatgtctttgctggaatctaattttgttgccattgtttttaaaattttagttttacgtttcatattaatcaattgaaaactgcaagacttggaaatattttccggattcataatcctctgtagaatcttccatcctgattttcattaccggatctacaaactccccctccaaagcatcatagataagacttgccaattcctgggagcgggtgtaattatcactcacggcagttacgaatatggtcggaacctgacgggcaactcccatcttggtgtactcctgcttgaatccatcccgttgatatataataaaatccccctcggttccattcggggcaaccaacggaaatattttatcacctaccattgtcttgatacccaaagaatcctgcaagatagcccgtacctctgttgttactttaaacttgttcatattagtatctattgttgccgcatcattatccgggtaaccgctcgctgaactgtagccatcatcatatccatacctttcttccaatcctgatcggcagtatcactccaaaagcgattagcaggcatgataccggaagttcccgtaatcgggtgagggcgcttcaccgtccctctgtctaccaaatgtgcgtgatgtcctctgtaattgaagccgaccacagcgccaagactacggcgtttcacccgcacggcaaaagcattgtataaattatgagccgccaacgctttgcgcccctctttggtcaaacgaccttttttatagctacgctctgataagcgtttcctacccctacgggcaaagaagccgccggcgcttctgagccctgcccttatcgctttatctttatcaatatcccccaattcagaaaccgccatctctatttgagacagggaggaaacagtcaactcaaaagctttgcctctacccgccattctggcatctacgtatttcccatatatgtaatcgtggatatgtctactaaaaagatcactcatatattcagtttttcaagtgtgattacaagcgtgttatctctttgtggatcaatcatctttatcgcatattccactccccgataaacaaccctctggttttctttaatcgccggataattccgaacctgaaatactataatactaccgataaattgctccatggcattcactccgctcttgtctgcaacagcagacatcttccggcgcgaagccttgcaagtcaacaccgtttcatatctattggatacaaaaccgttcaggtcctggcttttcacctcttccctgaattccagaatctcacgtaacagtcccgctttcatttggagtaatcaatgtatggttgtaataaatagtccagcaaaccgactttgtcccgcgcccgttccgcgacaaagttgacttcccgatcccgaaacaaacctccggcaacaagaaggatagctgagagaatagggtcgggcaacttcccttcactatcctccagcgtatctagctcccgacgtatgtgattagctacagccccctcagcggcggcaacatatacgccaatgatactatcatcatcggtgtattctgcctcgatgtaaaggtgcttcttcgccaaatctaacgatacgtacttcatggcttacttcattgaggcaatggagaatgactcagggcggatcatgcccatattccaataagaattaatcaccaagcgtacaactccctccaacatgcgggaatacggatccactttgatttccaacgctccccactgacctataaagtagtcgttccagttaccaaaaacaatgccgaattcatctttagcggtctgcaagcctttaggcaggttattggtgcgaagcgctttatatccgttaagagtaccttcacccttatcgccaaaaatgaagcctccggcaccggaagcatctttcactttagttttggccttacctaccaaagacgggtgcataatgtaagccaaattaccaaagagtgcattgttgatatccgcatcggtttccaactccacaattttagcccaatccatgacaccgttaatggccggcactgtctgaaacagcccgtcgggcgtattatcattgtgagcgtgcgtaccaaatgcggtttgctcaaccttctgcgcaatagcagcagccaacgtttgtcgaataattgcctcaaccgaagtattttcctggacaagcaactgctcggagatatcaacataagccgtcagtctcttaggtttataggcgtcacctttgctaaattgcccggcaccgtctttggctttagcgttttcaccctcccagaaaacattggaaccactatacttcggccaataaatatccccctgtaaaccggtcataaatctggctcccgcctgagccaagaccaaagaggattgaagcggcagcaacaattcctgctgctcctgatcaatgactactcccgtagccgattcggttgccgccgtaaacattgcccgcttctccaagctcatcgggattaccaatgaattttgagatgacctcgttacccctgcgctattatgcaggcgcgttgccgcctcaataacggaagcatccgcatcatgctgtccctgtccggaaatatagttggccaatgaacgacggagagaaaagcgttcctgaccgggttctacatggggagtccctttacctctgttctcggcctccttggttgcaatctccatattaatgtcagtcatccggcactggatctctccaagttccgtattttcgccctcgtttaacatgcgtttttcggctctcgcaccatcagttatcgctttagcacggatagaaagctgggttctttcgtcttttaaatctgtaattgatttttctcttggcataatcgttaaattaattattaaataatttttctatattctcgtaatattcatccaactctccggattttctctgttcttcctgtttacgaaaatcttcttcggcctgctccttgcctctcatataaaccgatgttttgctatatgcggcattatatacaggcgcgacatcatataaatgatctattttcaatattgtccgcttccatgttccatcacttttcttttcccaagtctcttcctctacatcaaagcaaaaagaactctcggcgatctcgcctctccggatattttccatcagctcatctccgagcccagtctttggagcctcaaaacggtatctcaatcccttgctatcaatagataatgtcaacgagccagtcccccgattgcatcgggcaagaatcccccgactttggtcatggtttagcaacgcaaatacatcacttttctcaataacaccatccagggctccatgctcaatcacctcttcaaaacttaaaccgtccgaagacacgccaaaaagcaaagcatacccttcaacggtgcgcttttcttcgtctgacaccacttgataggcagtatttcttatttctctcttttcatccataatcaatccttttcttcattaaccacagaactgtcggacaacttggaatttttatctatgacagggtcggctaccgcacgatctaatgtttgtgtattgacttgcacaaaggctttatctccattttctaatcggggcaaattattctcccggcgaatttcattgggtgtcatccctgcaacataaaacatatcctttgcatatgcggcctgcgcctttttgtctgtacgcaaaattgccgatgtatcaaattcagccaatatccggccacgttcggatttaagaaaaactttccgattgatctcctgctcaatcttggtaatgacagccagcaccgtatccgtcaggtattgaagctgcgtagcctcaacagtggagtagctcgatttagacaggtcaaaagccttaacaggagagacggagaaaaaacggcataaatccaccacattaaactccctggactccaatagttgcgaatccttgggactgatagtgatcggctggtacttcatattcccttcaagcacagcaatgccattgggtttcccccctacagaagaagtacgattttcccaagtttcatagatctggtctttttgttttttatccaagcggccctcaaatgccaagatacccgccacgttaccgccacccttaaagaatcctgcggcatgcgcctcactgtcagaggcgatacccagcgtttgccgggcatgggtcagcgtagacaccccaatgattccgtcataagaaaagttcaatacatgaatcatatccttaggctgtaccagatccttaaaccctgtaatcctgtaacgttttctacgaatgcctttcgcatctactatccattctatacctacttgggaagaaggaacatagattagttgtaaatccgtcccatccctttcgatataggcataaccgttacctgttaaaaggactgaggccatcaatgttttaaagaagacgtacctggtcatgtcttcattaggctctgtattcagaacatggtaagccggatgccatttacactccttcttaaaaccttcttcatccaattgataggtttttaatggcaagacagccacactgtcagaaatcaagtccacacaccgataaacagtagaaagcaacattggcttatcacggctcaacaacagcgatcttccaccggaactccaagcagctatattagatacctcctgtttggacgcttttctaatctcaatatttagaattggtattttcattgttttccttttaccatctaaccagaaaattgtccgacagttaatagaattccccgtaccgcggagacatcagataaatgccaagggcttccagcttggctattactccgtctattttcttctcttcaaactgcttcgacggtttggtatttccattccgatcccgtgccataatcacattgcggaaacaatgccggttaatgacattgttgtcaatcactgcccgtccggataatagcaagcgctccatttcctttgtgggacggttaaagtttcccaatgcttgggaaaactcctccatcggcaacccctgatctgtggcgttgataacaaactgtgttgcgttccatgcatcataagccactttttgaatgaaaacaatctcccggatacgcatcaggtcattgagtatataatcatagtccgttacattgcccggcgtaatggtaatcaatccctgcctacgccaatcgccatacaaatccttaaatcgtttttcttgtagcgccgcctctggaagataatacagggttttaaagtaatatttgtcctgagtcggaaacataaaactcatacaggtgagatcactcgtacttgataagtcaatacctgcatagcaatccatgtcccggaattgctcgaaatcaagattggcagaagcgttaaggatgtagtgatccggtatccaaacagtttccgcatcacaccacatattgatattcttcgttttgattccaacttcttctgaaggagaatttattgccttttgaacctgttccctcaaatatttaggctttactgtgacccctaaattaggattactcttgccccacactttttcatttttccaatcatccccttcatctaaagcataaatcaaagcaaaaagggtatcatcttctttcaagcccttcaacacttccgtacacatttcacgaaactggtagcatggacccaatttatcaaaaccggcggtagtgataatgatactcatcggatcatcacgcataccctgcccggattggagtacatctttcaaacctgaatttttagccgcatggtattcatcaagtaaaaacatagacggattagggccatctaatttgctggaatcagcggcaagcactttcaaaaacgacaatgttttatcgaagtttatttgatcgcggaaagacacaagataccgatgcttaggatcaagcccggatacaaagttacggcacattgtaaaactaacctttgcctgatctttactgttagccgccaagtagacttccgcagccgactcgccatcggcgataagatgatatagacaaagtgcagccgcaaaagccgacttgccatttttacgggccatctcaatgtatacagatgaaaccaacctgcaccaagagccatcctcatcttttttatagaatccgtagatacttgctactgcaaactcttgccaaggcagtaacgtaaacgattttccggcatgacgaccggtgtaatgcctcaacaaagaaataaattcaatagcataatccgcccgattctctctaaaatctatatcatcccgttcaaaaagaacataaaaccgttcgacggcctgcttaataaactctcccactacaatcttgccatctctaacatcagcggcatattgatagtatcctttcatcgtctctcacgggcccctttctttaaaaattggtctaaaggagaatcatttttatcttctgatttcatagccttaatatttccacggcttttaatagtcaaaccatactctgtcatgattttcattacctgagcatagtttttagtggcaatattttgagccggattagctgctttttcgtattttatctcaataacggggccttctttaagcaggatatcagttgcctgcatatacatctcgtagctggttgcaagcattctaatagctccgagatcaatattctgaatagcttttctagcatttagctcttttaccacatcctttataaacttctgtgtttcatcggataaattatcgggcattacaaatttcaccatattctgttttttataataaccacatgaatgtccgacaaataaaacgttaatgctttaacaaattcaaaatttgaaaaaattccgtgcgtgtgaagaagggttgggcgaggtatcggaagtcgatttgctcaaaattcaaccccatacccgtggaataatgttaattcgattttaacacattgtttcacgaaaacactgccgtggaacatagcagactgcgttttaacatatagttccacgaaaagtggaacaaaaaagccccacctttacagatggggccacaaactattgcttagttatcgtcaaaaaacaaaagcagcagcttgacttatcttcttacctatatcggtcaatgcaccggccaaggtttttaactcagcatcattaaaccgaatgggcttcccgttgacaatacttccatttaaacgttggtaaaaccactggggagacctcttaaaatatgttttggctaatgctgaaacagagataaacggcaacaccgattccaacttctctcttagtaatatttcatccgcttctttgttggtgtccttgatgcattctatcaaaccttccgcaaactgatccatatcttgatccgccaaagctttcatctctttgtctactgcctcaatctccgcttcggtattagcattggcaaagcgttcctttagtctttctatatctgtcttcataacttctttatttagcctccctgtctttcaagggaggcggttgacaacttacatttcctttaactttttcgttaataactcgatttgataatcaagctcttgtttataatgccctctgtcctgtagctctttgtagtagcgaaggtagaacagcaaatccttctctaactttatccgttctttacttaccggtttttctcccatatggcttttgttttttgacactacaaatataataacattattgttattaagcaaatattccaataacttttttgttattattttgagttatgtatattctgatggcattgcttacaaaggctcattaagttgtcataatcgtatgctaatgatttacgctgtaaaggatcattcgtagtcatgaatgatacgatatgatgaacatcctcagccggtgtagccaatcccttttgccagcatacctcacatagagggttattcaccatcttccatgctcgaagcttgcgccatcgctctgaattatatatcttacgacgggcatcatcatacatattattgctcttctgttccctctttttgggtttgtaaatagtcggcatatggtatttctcttaattgtttagaatcttgaattatctgaaatgctatcattttgtaacgatagcaaaagtgttttataatatcctcttccgattctaacaggctggcctcaacatcttgaatgacataaagcaccgtgtcctgaaagatgtcctcacgagatagtgagccatgaaacgtatcgaattcgacacaacaaagcgatcgaagcttaagataattctttccgattgcttcggccaccttaggataataactatttcgcttgtacctgtttctcatttagaatcagattaccggaatcatccgttatttccctcaaactgcgcgcaaccatgctcctgattacaactgacatattgactcccattttctcagatacctctttcaatagcatccacgtatgttcatcaaatcggactgaccttcttttgtttcccattccaatacgacttattaatcctctaaaacatatcaataattataattcgcccgcttaggctgatcaagccggcggctatccgtcagccgtgacaactcttcctccttccggtgtatagaaaccgtcaggttattacggatatccgaaagacgcagccactcttccaagggagtgtctttagctcccagcttttcattgatccggtctaactcttcactgctgcgattaatttgactacgaatacacagtatccgatcctgcctggtttgaaatccacccagaccattactatctatcgttgtttccattgctgtattgtcactaattaaactttgggatatacatccataagtcattatcggatacatcgcaacagtaatcatccgcatctgctgtgtcccacacatggtaatgtttgttgtaaaccaatatttcgggttcataatgtcctttggcggaagctatgactaacactggttcgctctgctctgatatatcatcctcgtccacaaatggaagccggtctttagcctttatccacggagattgctctgcctgccaatttgcgccttgcacaaaacctacttgaaaggtatctttaacgctgtaaccgtggttatcttccattccccacgcttcacacatttcttttgctctttcttgaaccgtctgtttcatattcatatcaattatagctattagttactgtccatattaataaaatcgatctcgtttacagcctttagaactcttagaatgtcttcttgaaaatctataacctgttgatcacgaattttcttctttatttcaatcaaggaaagttcctgtattcttatcagagccggaatatcgtataccaactcaatcattatttctttctttttcttcatatctttttatgttattggttaatattctccgtccgatgcactcttacttcattgtaccagttccctttatattcgcgggcttcaacggtaaagttaactctgatcttgtctcctactttgggagggttctcaacaggaccatcgaaactgcaaacggaaaagcgcatcttgctgtgataacgttcgctggtttccatgatgtactctctcttctcccagtctttaccatccctggtaactccaccggtggatggcagctccaccaaaattttgccttctgcttcacatttcatatattcagtttttaaattataatttatcagcccttataagtcggttcccgacaaccctgcgggctgtataggacaagttgccgaaaagtgttaaattttagattttaaaaacgtaatcacttaattttcaacattttaattgcgcaccataaggtgctttttgtatttacagataaaatactgattttcaatatgttatatttttctgcaaatgggcgtaaatatccctgtctggtagcctgataaaagtttgtccttaaattcacgctccatgtcaccgatttcctccacgtacttctcacgctcttccggccagctacgggcaaaattgcgtatagtctcccattgctttttagtcagcttacccgaaagataaagcttcttgtaacgctccttgtaccgggtaactcctatccggtatatctccctggccctttcaagctgggacacctttacgcccttggccgcagacagttctctggtaaagcatatttctgaccagtccttatagaatatacggccgatcctcgacaagaagaggttgtccgttagctccatcaatgaaacagactggtgcttgtatatcgtttcgatacgaagaatgttagccccgacattccgtcctttctccccggcctcaaagctcttatcatagaccttcaggatcttccggaaatacttgcttttctccgttgtctgttgcttgaacgccgaatagttggcatcgttccaaaggagctttcctgagacttcatacatctgttttatgtaagaatcggcaggaagggacatcttcattgtgatacctatctcgtaatacgttaccacggcattctcaatccggacacatagcctcaacagcagctctttgattgtccttacagccattgcgaaagttatcgggcggctgttatccagtttcccggtctttcccttggaatagagcttgcaaatggaacacgtacaccgtaacctgttaccgcgaatctcgatgaaacaaccgtcaaagttggcgtaagcggtagacttgtaatagacttcatcaccttccgtgcactcctccaaataatttcgcaagacaatcgtctcaatatccgccgtgtcaatcgttgcctttatggttatcttgtcgaacatctcttcttctctataaaatactcacacattctaaggccggttgatcggccacagtcatgtatcgggcaatacaccatgaaattctcaaccgggccggcgcgtctgcattgccggcaatcacactttaccttctgcctgatttcctcttcttttcccttattcttattcatcgccttgctttttgataggttgatgctttcaaagacttacaccttctgcattcagaactgaaggtggaatagaccttctctccccgatttaaagttctggggtaaaaacggtgaagatagtaccactcgccacagatggaacaccgtttcattaaacgaccgtcgggggaagtacggtaattgtttctttcccgtcgatggaccaaccggcaatttatacactcttcgtccgtaagtttataccgcctgcaatgggataaagacttctttccgcatttggcgaatgccttgcaatcaatacgcgggatggtttgggggatattcatagggcattatccaataagtcaaacaacgtcggcgcacccacttccatctccgcttcacacaagtacgaaagactgtccttccaatagtcgtaattcagttcagtggaaagacctctacgccctaatttgatggcacaataaggaacggtaccaatgccgccaaagggatcaaatatcaaatcattcttgtttgaataacgttcaatcaatctttcaacaatatccaattgaagaggacaaatatggttctgccgtttcttctgtgactgtttggtatttaatgtccgcattcgggtgacatcatcccatatccaaggcttcttgcttacagggtcaacggccataaaagttttaggtagtttattataggcttccaactcttcggcaaatgcaacatgttcctcatatctgtagatatgttcgcgttcgtagtttctgaacaaatgacgtatcttgtcaatgccgatacctttcatatcttcgtagctcaacaaggtgtcacccgatgatttccagcttgcatgggcatctatctgccaacgggcaagagaatattccttcttatccttagtgacgggcaaatcggcataggcccgggaagtatcagaaggcagctttctgaaaagaagaacatactccggacaaccaacacccatctttgaaccgtccttgcacatctcggtataaccgaggcgataggtctggttattttcccttaccacatctgtatcaaccgtaatacgccccatataacggaatccgtgtttcatgtaatgaaatacagtcatttcactgaacgggtcaatcgtcggcataccgtcacccgtagcgttaccgaacaatacacggtctttcacatggatacaggccaagcggccaggcttaaggatacgcatcagttccggcgtcaaataatccatctgctcaaagaacttatcgttgctttcattatgtccgaaatcgttgtaggtcggcgtgtattcgtaatgattggaaaaagggatgctggttacaaccaaatccaccgaattgctttccatcttccggcattccagaacattatcgttattgatcgctttccacagcttaccggacttatcttcccgactggcgaacatccagcgcatcatcttctcctctgcctgcaaaccgaacaaaccgttctcgcggacgatatcggtcatcttggctaccatctccttatgttgcatccatttccgcatgaagcttttgtatatctcgccctcgctttcggcatacactaaatacaagtcaacagggtatttctgcatgaaacggtatatacgggctatcgcctggaacttgtcattgaaacggtagtcgatgaacatgattgccttatggcagtggtactggaagttcaaaccctcaccaagcatttcaggtttagcagccaaatacttcaaccgaccatctttgaaatcggcaattacctcatccgcctcttcatcatcctgggaaccatagacagctttacatccaggaatagacttgcagagtgcctcacgttcactttcaaggtcatgccataaaagaaaatgttcatctttgttttcaggacgacctatgatttccaccacacgggcaatcttcgcagccatgttgtctcggcgctctcttgctgcatcagccaaacctaatgccgcttcacgaaacattttaacctgcccgtcacggtcggtgccggcagtggagttgtcaacgccaaccacttcttcatgcacccgcagttccggcaattcatagccgatatcgggatagcctaaatcagatggtttagtgaggaataatgcccatgtagacacccataaccaaaactctttctctttatgtgggtaaagggtaagattattcgctttggtactgtcacgctgaaagaatcttgtaagcgcctgcccggtatccatcacaccgagatagccggcatagtgtatcagttccttatatctgttgggcgatggtgtagccgtagcgacaaatcggtacgggacaccggaaaacaatggaaggaactcttgataagtcttcgtgccataaccacgtaatacgctggcttcatccaaagaggttacagtgaaataggaaggttctatccttaccccgtcctcaccgtcacggacacgctcataattggtaatcattatatcacacttgcaggctctgacttcactcatgttcttgacatacttaactgtcatgttcatgtgctccttagcttgggtaataaactctactactacacgcttaggacaaacgataagagctttaccgaaatactgattgattataactctacatatctccaactgggtaacggtcttctgcatgccgaagctggaaaatatggcacgacaaccaccggacaccgcccaacgaacggtatctttcacatgggggtataaggacgaagtcagttcttccgctttgacttcaaacccggtttgatggctaatggccatcttatcttttagaaaatctatatattctttcattactcaacctcctttttaggttcccaatcggccgacaccttggcccactccctgaatgacttgtcgaagccatccaaatcgccaaacatatccatcttggatttatccgtagttacaagcgtggcgaactctttgaaatagcggtcagcacatttcacaaagtcgttatgcagcttcttcaggtttccaagtaacagacccttggccaacataacatcggacgcttcctctatcaggctgtttgcctcgcaattcaacagatgcgcggctgagaggagcatgttcattctgtctatactgccatcttttacggctgtttcaattaattgtttctttggtttcataatcatattttctttgttgatttcctgcatctaagcagggttgattttatgatgatcgccctatctgtcaagatggtggattcattcgaacgatgcagcaatgtgcgcttcttaattcctatgtcgttttcatccagatgctcaaaaatggcactgagagaaccgaagtagtagttcttctttttgaagatcaaatacacatgtatcactttcatattttcaaaagttccatatatgtcatatttggcgtatctgcttctcttctttcagacgtttaacctcgccctgataatacttgatcatggcactgtactcaaaatcggagatcttatttgtctgattcttcatggattcaagcaacagaaccgcaggttcaccgtatttcaatatcagaccacggcgatacccctgcatgttgccttcatcgaaacgattgcacgatcggcattgggcattgcagttcttttcactgaatcgggtggacatgtgctgcctgtttatgtaatgcccgcaatccgcctgatccagaggcaaaatcctcccacaggagatgcactgaaatgtcccgtctttcctggcgtcacgtaaacggataaagcggctgaacacagtatccaacttgttcttcagattaggagacttcttctttaaatcagtcgttttctttttccacatcatgcctttgagttattaagcggtattgttcgtcacttcgaaagcggatggcgttttcgtaccagacatcattggcggcctgatacgcctgtacaccgtttatacggtcttcatctatcagtcgggcaataatggcggaacctctataggcggtatcccagaacaaagctaaatcaccgatcctgggagtctgctctatatggtccgtttcctgacagaagaaatctgaaagattctccggttcaaatgtgattattaacctattgtctacagcctcaacagaggcatgccgacattcggggggaatactaaagttttgtatcttcatcttattggtccagttttattctgttaagagtcatatggaatccatttagattccgtatgccagctcttttatttagctatcttcaaaaactcaggagcaattccataaagcggcgttttcccatcccaccggtcaatgaactgcttataaagaatctctttcgttaatccccttgaccggataatagcctgctcggttttcagttgttcgagttcattaagctttttctgctcctcaatctgctggtctaaaaccgaaatattagtgtttacctcatttcggctatcaatcttttccttaaccttatctgaaaattccaattgagcggaaaaggttaacaattgcagtccacgtttatcaaactctttctcaacgatttgctccagacgcttttcaaagacaagcgatccgccatctgccataagactgtcggttttgtacttccggctctcttcctttataagatcgtagatgcggggttctaatatgttatcttccaatgactgcataaaaccgtcttttccggtttccgtttcggctttatcaatatgtttgttatcaaatacgacatctatagcacgactctttattaccttgtaagagtatgaaggacgagcgctaaattcagtattatcagccgcctttaatgttaccggtgcactgaactctccccgctggtcaaacaacggaacctggaacaactctgtccccccatcccacgttgaaaccctgccggagaccaccttaaaatcttccttgccttgcttgccgtagttttccataaggacgccggcatagttaggggcaactctttcacatgaaaccaatacaaataataaggtcataaagaccaacattaaactaatcaactttttcatttttgataattttagtaagtttgtaaataaagaaaattattgtggctgtaattattgccacgcccagccatgcgtggagatgattaaacaccctattgccgatagcgatgcccactatcaggactgtaaatggcttgatatacttattcatatctgttctgttttagttttactctattctatttaaaatctctttccgtataacctcctttgcattaaagtaaaagagtcctttcttcaaccgtctaatgtcctgcataggcatttcattgatgtagaagtaaaaagcttcgtacgggtcgctgaaatttcttgcaagcgcattattaggcttgttgttcatatagcgttctatggagacaatcatgcgctttgcatatccaggaaacatcttaaactctttctgcatctgtttacatcctgcaaggggacaaccaacacatccatgacgagaaagattgtaaggcgcatcgtaatacttagaatacggaaggttgtattttcggatatagttccaaacatcagtttctgaccagtttagaatcggaaggatatgttttgcacctttcatccacttacgcgcatcgcattgttctggttcatataatgctctcaattggctttcttctgacctcattccctcgattatgcgctgaccgataccgtattgctccttcaacttctcacagcaaaaacgcctcattctgccgggtaaacctttagtttctatcaactgaaaaaaagattgcttcggttgaagtatccgaacctgtgaataattcttctttataaaactgattgttccgggcgggtcaacggtagtatttgcgtaagaagcattatactttatgccggaacgctctgcaaggtcaagaattacaacactatctttaccaccagaaaagcctaaacacatcggatcgtcacgttccatgctgcgaaggaagtcgattgcttgctgctcctttttattcatttctatttggatttgaattaaactatgctgccacttttcttaattctcgtagtttcctgccgacagcttcgcagagaactcttgccatcgtcacctctaccgcattcccaataaacttcttctgttcggcttgtgtaccgatcagtctatagtcttttggaaatcccatgatttgtttaagttcaggtatcttaagcatacgcatcaagatatcaactatgccatatagagccatgaactcctttatcttccgggtcatggggctatcgctttcatataccctaataagaaaatcaccttcttgcgtacatactaagtaaggtggcatcttatccatgcgtgcgatgagagtaaagcatggattttctatattgccgccggcagacataaactgtggattcatcaggtagtgccactttcggttggcggtgataactggtgcaggatcatctatctggctgccgatattcccgaagttagtattcattacccacggacgacaactaacaaggttatactttggattggaggttaaggctcccaatggtcggttaagtccagtaggcttactttgcccgaattgctgatccataaactggcaactaacaaggcgttgtttcgggtttgccagtatagccggagatggttgatttacatctgaatgttgccccccacctgaataataattcataaagaacggacttacaagcgacagcctatccttagtcagtagtgttgggcacggagcatctatatctttcccagcatcgttaaagttgtatgagcaaagaaatttcggattcacataattaaacctgtctttggttggtactgtcggacatggcttatctacctggctgacattatcgccattgccataatacgcagcgaggaacttcgcacctaccaaagcatgattatccttgcacttgacagtatgtgcgggtccatcaataggaatattcttactttccgggtgaccactgaaatactttgagaggaaatgacagtctacctttgcaaatcggttgttagtagtaagcactccacaaggtgcttctactgatttacaagtatcttgaggacgacatgtattgtatctggaaaggaactgggcatttactatacctaaacgtccttggcaactgatggttgggcatggttcgtctattccgggaggaatatgttttccagtctttccgttgattgagttatatttcagtagccatttatcttttccacctgctacaaacttaatgagaccagcatagatgcgttcaagtgttttctctgacaatggcttcttccgggtgaagatacttgttccttcgtcttcaaaatctaatacatcctttacaggtttccattttgcaaggctgccgaacatatcttgcttgccttctttgcagtgggtgggttctggaaacacaattggtagctcattcttggcaaagatgccaaaaaaacgcttccgactggtgtatgctccatagtcagcagcattcattatccggtgatcgaagttatatccataagatttcacgttatgcacccaacgggtgtagtcttctcctttgttcatggagattggcctaccattctcatccatcgggccccatgacatgaactcttctacattttcaatctggatataatctgggttaagggattcgatataacgaaaaagatgttcagccagtgtccggctgtctgcatcccgaggctggccacctttggcttttgagaagttcgtacactctaaagatgcccaaagtaccaagcgagcttccggatataattgcttcatccgttgtacgtgtgtaaccagtggagaaagctcaagtgttcgaatgtcttctgtgaagtgcatcgcctccggatggttagccgcatgactggcaatggcattggcgtcatgattgacacaggcaattacttttgcacattgttctccatttattcgggcagattcaacacctgtagaggttccaccagctccacagaataaatcaatgtatagcaggtctatagtattcatttctttattgttatttagttatcttccactgtaacagattctatcttttcgtgattggggttgctgcctttcaacaagtcattttttactctgtcggcaatcagatcattactaacggtatttttatcttcgtaatcgtaggatatgattacggttatttttttactcttcataaatattcctttctgttatgttttgagccttttcaggctacatcgttaatactaatttctcctttcaaaactcgttttacctgcctgtcgatgatctcttgaaattcaatttggcagataagcgagcaatccggtataatctcttccactggatcgccccgccatgtcggtagttcatccaagaagatacgcccatctttatctttcagacaggtagctccaacatcacgctcaatctgcgccatttgagtaaacacttccgggaaatccttccggattttattccagtatcccataccacctttcacgcaaccgatgcagttgttgttattgtagcccatcttgtacatagcagggatttcaatccctgctttccaaagtatccccatggcatccggcttcgtaatctgcttttcaataagcgggaacagtggctttgtgtttgggtactgctgctttaatcggatagctcggttaatctcttttggttcataatcgaatccccaaacttgaccgtcccaagaaccaagttccttttccaacttgtaccggactttctttttaagttcaagagtacaagcagcaccatgcgcaccattgataaaacctttccgtaggacatcagctacgcaagtgtatttatcgcttcggataatgtgaataggctgatcgtaccatctttcacaatcagatagaaaacgagcgttatccggatgcccggagccagtttcaatataatagaactgcacatcttcgtacaggctcaatgctatcttacaagcgactgaggatgttacgccgcatgaaaaccacgctattatcatttgattcctttctgtatagatttgaatttaataggcgattgaatcatagaactgccgattacgcaaatactcctttaccacatccgatgaagtggcacgatcaccgatacgatcatggatgtactggtacttctcaaaactcatacctgagaggatatcatcattcatctctacgttgccggcatagatgcaaccggcaaccgtaactatgcttatgatgaccgtaaacagatgcttggaaagactattcatgttcttcatcggttcgtttatttttaagaattgaatcaatatcacttattttatagcgacgcttcccgcctatctcaacaggacataagtatccctttttgttccaactccataaagtactacgattaacacaaagcatctttgcggtttcattgacggttaaatactcttcatccgacttcatattagaggccaaaacctctttgatcgtctgttttataatatgatccgcaaactctttcaaatcagtagattttattgttacacttaaatttgaatcactactcagtatttctttaatgctcatttgttacctcctttcctcgctgattaccattcaaaatgtagtcataaagcctctgagcatcttctatccggagatacacctgatctttattggtctgctctatgcagtatttacgaagttctatatcactaaaagatgaaggcggcgtaatggtaccattaggcgtggcgctttcgaggttgaggccggatttagatatactctctgatttgagattaagctctttttcgaacccatatagtaaggattttaccccatcaccatagccgctatcaatcgtatccctacatccttttacggatttgtcaatcgccttctttgcttcctcaaactctatacaacgattaatttcggattggtcgatcgagtactttatatcgcaacagtgccaaagaataaccgccccgaacaccagtacgagtgcggcgattaacactaaaaagataattgttcctgtagtcattgttagttctccttattgtttaattatctattatttatcacgtttcacaaataaactatcaccatctgttcgtgtagagaagttcattccttcatcatatgctagatttgaacatgtaggtcttactgaatttcttttggagcgagcaaattttaattcttcgcccactttcatgttttttaatagggctttcaattcccctcttttacgtttgttagtttccattttagcgtagaattatgcgcccaaaggggcgcgggttatacttatgattttatgtaattaaatttggccatgtacctttcagcacctttcatagacttgaatgtcttactcgaagaagctgttactgctatatagctaagattgccattgtattcatttaccgcgattgcaccggtttcttcaccatttgcttttttgtagtcgatgattgctttcataattctatcttttaaatttgttatttatttgttgattgattaactttgatgcgacaaagacaattgactatactctactatgcaaatatttagtagattatactctattaattaacctttattagtagacaatagtatgaccataaaagaaaaaattcaaaaatacattgattataaaggaattagtgtatatagattagaggcagacgccggactatctaagggctattggggtaaaacgaaaagtatatctgctgacatagcaatgaaaattagtagaatatacggagacatgtctactgagtggcttttacgagatgaaggcgaaatgctcaagaaaaacactattggggttaacattaatcaaggtgatggcaatatcattggacaaggtaaccataataacattaaaacaggtaatgtggttaatgttgccttacctgatgccggaacacaaaaaataataaaaccagatggagaaatagaggtaataacaaccgagtcaaacactcctatgcttgacactctaaaaagggaaaatgagagtttaaaagctgaagttatgtacctaaaaaacaccataacaacaaaaaatgatctaatagactctttaagagaaactatagacatactcaaaaatagataacagatttatattacaaaccaaaaaccaatcaacatgaaaaagttatttctattactaccctttttagcattgggggcttgctctccgaaatactctgaacatatttatgttgctgactatagtaaatatgtacaatccggattccgtatttacccaataggaactgacataaaggaaaaaagctatgtacctgtagcggatttacaacttgttttttatgctggaagaaaatcaaaggaagcaataaaatctgggctttctcccgccaaacaatatgatggaagctctatatatactcctactgaagaatacgtgataggaaaagctgtacgggaagcccagaaacacaatgccaacggaatagttaattatcaaatgattgcagttcgttcggctaaaggagatatcattagatgcgaagtgcaaggaacggccgtaaaaattgaataaataaactaatttcataattataatattctattgtcatggggataattacaaatattatcattaacctaactacactacaaatgaaaatgcacaagaacccttaaaaaatatttttaacccgcggtaatgtaatatggctcaattacaatcccgcataaacaatcaaaaactatgaataaaaatctgaagaacaaactgtatgtgataatcttcacatcactactattctactcctgtggagaaaataatgtaattgcttcttttgatcactcaactaaagcggagagttttaaagacatttcttataaaatccccgtctcggatgctgtcttcacagtcctcgatgtgattaactctacaaaaggaagtacccggaatgcttcttcggcggaaatcgaaaacatcgaggttgtaaaaacgacaccagcaataacccgttcattgaaagcaaattcattaagcagcgatacattgctatacattatcaattttaaagatggaggctttggagtagcagcggcagatagcagaaccgcacctatttatgcatactcagataaaggacactttaacttaaaagacacatgccaggttcttgctttaaagatgttcataaaaagtgctatacacactattttatatgatatcaataatcaaggaaataatccgagattcgctgaaacccccgaaaccagaaatgaattactagaacaagtaggtcctttcatggatatagagtggtcacaaaacaacccttataataaagaatgtgtcattggcacagaatatgccaaagccggatgtgtagccattgcaacagcacagatatgtgcatataataaatatccagacacattcgaaggatataattatgattggaataccatttataaaatcaaaagtagttcagaccaatacaagtaccccgatgcaacgaatcaattagcgcattttattagaagagtgggattaaatgtaggtatgaaatatggagtgaaagaaagcggcgctaaaagtgaaaaaatcccaggtctattaagaaaaatgggctatacatgtagtgatttaattagctatagcgacaaaggactagtcgagtctttaaaagccgggcacccagtatatcaatgtggatttgataaagaaagcgactatttcatctttcaaacacattcagatggccatgcatgggtagtggatggctatcgatatgaaatgttaaacattagaatatgcagaccaagaagaggcgagatggactgtgactctgaaaagagacgttttctatttgtacgcaacaactatggatggggagggttatataatggatggtaccagccatttgttacaatgcctgatactaacggaaagagaatcccaactttcgcatttaaacctagaatgataaccaatatacaccgatgaaaaaaatatatatattattattgtcacttttgaccctttgttcatgcgaagagcaaaaaataacaggagctttattttcaaaaagcttcctacaaggatttattgatattaaagaaattgtatccggaaacataagcaacaacgatgaattgtattttatgtttcaaggtgaaaatattgccaggggaaacccgctgtatgatgaactttgcactaaatatggtgatgtcagctataatcgctatatggttcctttctctaatccgtgcctagttgatactattacttcacttgatttaatatgcaataccgattttgacaataaccataaaaagggaagttcactaaatgatattgcaatactgtattattcctcaccattggaatttataaaaagcgggtataaagaatatcctaaaacagaagacacaacacctaccccgtatagaccctctaaggaatactatccttattctaagtcattttcagatttaaaaggtgaagaactgatccttttatatcagatgggttatattaaatttctggtacacccattacaaagtagacaaagtatcacttttagggtgcagacaaaatcaggaaaaacaatctcaactgattttgaacttaactttaccccaacaaggaaataactattcattcgaataccataaaatatcccgggtcctaattggcccgggatttatttatgcctctacttgatttaggcaatgttccattagctcatcaatcatctatacgatgcaaaatgttgtgcaaaagttgtgcacccccaataaaaacaaaacgctaattatcttatatttaagaaattagcgttttttaaatgtactcccgaagggaatcaaacccttatcttaggtaccggaaacctacattctattcgttgaactacaggagcattgtttttatgcgacgacaaaagtataaaaaatattcgcattttcctaatgattcacctttttttgtagtattcatctaccgaacgctatattatcaaatattattttgcaactcttatgctatataaaacgatcaatttgataacattttagcctattattcatacagatatagatattattcatatctttgccgacaaataacaatcaataaacctatgagttacctaataaaacctcagaattataaacctttgcttgacctgaaacagacagaactgggcatcaaacaaattaaagagttcttccagttgaatctttcttcggagctgcgtctgcgccgtgtcacagccccactcttcgtactcaaaggaatgggtatcaatgatgacctgaacggtatagaacgtcctgtctcatttcccatcaaggatctgggcgatgcacaagcggaagtagtacactcactcgctaaatggaagcgcctgaccttggcagattatcacattgaaccgggttatggtatttatacggacatgaatgccatccgctcggacgaagaactgggcaatctgcattcactttatgtagaccagtgggactgggaacgggtaattactgccgaagaccgtaatgccgacttcttaaaagagatcgtaaaccgcatttatgccgctatgatccgtacggaatatatggtgtacgaaatgtacccgcaaatcaaaccttgcctgccacagaagttgcactttatccattcggaagaattacgccagttgtatcccgatatggaacctaaatgccgcgaacatgccatctgtaaaaagtatggagccgtatttatcatcggcatcggttgcaagctgagtgatggcaaaaaacatgacggacgcgccccggactatgacgactataccagcaaagggttgaacgacctacccggactgaacggtgacctgttgctctgggacgatgtgctgcaacgctccattgagttgtcttcaatgggtatccgtgtagacaaagaggctcttttacgccaggtgaagcaagagaatcaggaacaaagactggaactctatttccataaaagattattgaatgatacgcttccactctctatcggcggcggtatcggacaatcgcgtttgtgcatgttctacttacgcaaagctcatatcggcgagattcaggcaagtatctggccggaagaaatgcgtcgtgaatgtacagcccttaatatacaccttatttaatagcctatgaacgtacaaatagaagagagctggaaaactcatttagaaccagaatttgagaaggattatttccgcacactgactgaatttgtcagaagtgaatatagccagtatcagatctttcccccgggaaagttgatattcaatgcattcaatttatgtccgtttgataaagtaaaagtagtcattatcggtcaggacccctaccatggtcccggtcaggcacacggcctttgtttctcggtgaatgacggagtagcctttccgccttctctggtgaacattttcaaagaaataaaagaagatatcggtacgccagccccgtccaccggtaacctgacaagatgggccgaacagggtgtcctgttgctgaacgccaccctgacagtacgcgcccaccaggccggttcacaccaacgtcgcggttgggaagagtttacagatgccgccatccgtgtcctggccgaagaaagagaaaatctggtattcatcctttggggaagttatgcacaaaagaaaggtgccttcattaaccgtaacaagcatttggtactcagttcggcacatccttctcccctctctgcctacaatggcttctttgggaataagcatttcagtaaaacaaacgaatacctgaaagcccatggaaaaacagaaataaactggtaaacagagcaaactatcaaacgatagtcgataaacgatcaacagccggcaatttatgcttaaaatttctatagcataaattgccggctgttgatcgttcgtccatcagatatttaataccactgaatattactttgagtctgacttctcttatcccacttcaagtcacgcaggatacttgccgtagcccgaatcgtaaaattataatagcgatagcggccgaaaggcgaaatactggcagacatattgaagcaatgcaaatcacgtgtaatcgtgcaagaagtctgagtgatctcctttgcctcgaaatcatatccggaattgaatgtaaacgaccaattattggaaatcttcaggttacccgacatgttgatattttgcgtatacttaaacggataacgcatcgtattacgattgatcggcttactgcgatcctcggaaatacggaacgaatagttcacattcagcgaccatggcatcttaaatacctgataaccgtcacgatccgcctgtgctttttctaccctcttctcagtaaccgcttcgtcaccggtagaatttcctttttcttcgtcgacaccgtcctttttcttcttttgatcgttatccttatctttcccgaacaacttcttccaggtatcattattgaatgtatagttgatggaagatccccatccctggaaacgcccgaagcggccataagaccattcggtgcggtcacccactattacattacccgacttatcgaatgtataggcataggttgcgaataccgcgttcatattcagcgtatagttattaaacttcttgaacttcatacgcaaacgcatattcaggttactccatggttgcttctttgcagccatattataagaaagattgaaaccgatttcatcaatcaaactgactttcacaagagagtctttcttgttacggtatttcatctccaagttgttcgacacatcaaaactaaccgttccggacttttcacgcggagctgtaccaaactgctgactggaataaggcgagtaatactgatcattaccgtctgcatcacgataatattcccagaattgcccgaaacttggagagccattcaatgaaatctgcggggtaaagacatggcgaatctgtatctcttttttcttcataaacagcggctggtacataccatacatcttggtacttaaagccaggctggccgaatagttgaacacccgatagaatccatgaatcgtatcgccggggtgtgtatcccatttccgggtagtttcgtcatagctcttcatcaccttacgggtataccaacgttcagtgtaattaaatgaaggtaccacctgcaaatacttgaaaagagtgaaagttgcctgtaccggaatgttatgctgcattgcattctcccattccctgaaaccggctttaaacaaacggtcgtcttttgtcttcaggctgttggtcaaacgtcccgaataacgcaatgagatcttttcgtaccaacgctcctcacctaccgcacgtttacgcttaaaagggaaaatagtactcagagtaatattcaagtcaggcagggtgacagcaatggaagagtcacgcatggtttgcgctatgttgaaagtacccgcgagtgtcagcttctgatccgggaaactacgagagtagcttacactcgaagtttttgtattctgggtcatcaactgagaattatagaggttgttgatattggtacgttcgtaactactggtagcgaagtttacacttgccgagaaagtgctgttgggactcgccttctggtcttgccggtgattccacacaatcttgaagtctttagcaaccgaatagtccggcatacctttatccccaagtttggttacctgatagccggcctgtaacgaaccggaatatttataacgcttgttataattggtttccatattggcggcccatgaacctttagtaaaaatatcggcagtcagcttgaggtccatcaggtcactgacagcaaaatagtagccaccaccggtcaaaccgaaaccacggctggagtcatccatataactcggcatgacaaagcccgaagaatagctactggaaaacggaaagaagaaaaacggtacggccaaaggcaacggtacatcttccactaccagataagcaggccccgttaccacatttttcttaggacggaccttggctttggtcaactgcatatagaagtgcggatgatcgtggtggtcgcaggtcgtatatcgtccattctccatgaacagttcatcatttgcgcctttcttcgcattgttacctaccacgtagccttccccctgctgggtaacgacgttattgataaatccttttttactcttgaagttataccggatagccttcgtttcataaggagtctctccatccttaaacaccggtttccccttctccactcccacagagtcgattactccacgggcatagaccgtactgctgtccatgttcatggtgataatttcggctcccaattcgatgttctcgtagttcacctttccatctccatacaaatgggcaaatcctccttgtgtaaagacaatagagtcattggcagaatatacaacgggagcgtccaggggttgtttctttttcttcaccgattccgccgacaatgtatcggccttcaatacattggctttcaatgtatcgtttttcagtgtgtcgactctcagtgaatcgttcttagggggtgaatagaccaccggccctttcaactccctgacacggcgacgctgagccatagcttcgtacggaagcatcaggaggatcaacagtagtatggatgatattatcgtatttgctttcaatggcgtcattaactaatagagtttacgcttgaaggggcaaaagtacacaatcttcaccaaatatacttgagaatcttcatttttaattcttttttaggcactaaagaaatagcttacaccaattgttaaaacgttgcaaaccttcatctccatacttggcgatgctcttacgagccccctccacagttttctcacggtcgagatgggttttcgaaaaaaacttgtcggcaaagcaaatcacttgttcttccatactcaccggcaacatttcgcgatgggggacaggaagtttttgatccataatatctttcagtgaaagtcccgccccggtatgccgttcacagactaatgcgtgtcgagggaaaccttccttacggacaagcccggctccgagatatccatgacaaatgtaaggttccgtcccaaaacattgaatacccggagcatgtgtcaggaagataccaatatcatgcagcatggcggcttcttccagaaagacagtatccagattcagttccggatgttttccggcgatccatagagctttatcagccaccgaccggctatgcacgttcaaaatatgtttcagttcattatcctgaggataatatttgtctatcaaatcaagcactttcatattctattattcattaattcaaaaaccacttgccattggtttccggaatggaaccccttcataagccaagtgtgttcgattggtttcttaagcacatttctttccttctttacccctctttcccggccttgtttagtgggcccgggttcatgtacccatcagctcggatacccgaacccgctgatgaacaagtcaaaagtcgttaatactcccattcaggcttatccaagagggcaaaccggctaaacaaattaacttctcccacatagaaaacaagtcatgaatgaggaaggttcctgccaaaggcaaagataacaactgttttttaatatggaatgaagataatcaaaagaattgattgtatatttgtgcatttcatagtaacccggaaaacggatctgatatcatattaaaaacaatccaatatttattcctatgacaaaaccttcttacaaacagtggatagcagcctgtactctcacgagtacattgctattgggagcttgcggttccgctcccgttaccagagacgcatcaatcgtaccgttgcctaaccaaattcaacaatccggcaacgcttttgtactaaccccgaacactacaatcggtaccaccgacccggaattacagccagccgcccaatacctgaaagaaattctttcggccgccacgggctacgaccttcaggttaaagagggcaaggggacaatcactcttgcgaaagccaacatcgaaggaaaagaaggtgcctatacactttcggcaaaatcagaccggatagacatcacaggcaactcttatggaggggtgatagccggtatcgaatcgcttcgccagttattcccaccgcaaatcgaatccaaacaaatcgtagacagtgtggcatgggccattcccacggcagagattcaagacgccccccgattcgagtggcgcgggattatgctcgatgtatcccgtcacttctacaccaaagaggaggtaaaagaattactcgacctgatggcactctacaaaatgaataagttccactggcatctgacagacgatcaaggttggcgcatcgaaataaaaaaatatccgttactgacggagaaaggcgcatggcgtacctttaattcacacgacagatcgtgtatgaagtccgctaaatcagaagacaatccggattttctgattccggaaaataaactccgcatcgtcgaaggcgacacgttatatggcggatactatacgcaggaggatatcaaagaagtgattgaatatgccaaagtacgcgggatagatatcgttcccgaaattgacatgccgggacatatgctggctgctgtcagcaactattccggagtagcctgtaccgataaagtaggctggggaaacactttctcctcacccgtctgccccggaaaagaatcggcaatggaattctgtaagaatgtatatagtgaactgatcgacctgtttccctacaaatatgtacacatcggaggagatgaagttgaaaaagcaaactggaagaaatgtcccgattgccagaaacgtatgcgggataatcatctgaaaaccgaagaagagctgcaatcctggtttatccacgatatggagaaatttttcaatgcaaaggggaaagagatgatcggctgggacgaaatcatcgaaggcggactgagcccgacggctaccgtaatgtggtggagaagctgggcaaaagatgctcccgcaaagacaactcaacaggggaactccatcattttcactcccaacggacagttctatctggattatcaggaagacaaaaactctgtacgcaatatttataacttcaatccggcaatcgaaggattgacttccgaacaacaggcattagtcaaaggcgtacaaggaaacatctggtgtgaatggattccttcacgcgaacgcatgcagtatatggctgttccacgcttgctggctattgccgaactgggttggagccaaccctcacaaaagaactggaatgactttgcacaacgcatggcaaaccaattcgaacgcctcaacatcatgggtatcaattatcgcatccccgacttggaaggcttccatcgcaacaatgcttttatcggtgaaggaaccgtaaaggtaacctgcctcgatcccaatgccgaaattcattatacgacggacggcagcactcctactctgcaatcgtctaaatacgaagggcctattcaagtaaaagaaacaacggactttacgttccgcaccttccgtcccaacggaaaagccggtgacatctcccggacacgcttcatcaagagcgaatatgctccggctacgactgtcactccctctgccaaaggattgcaggctgaatggtatgagtttaaaggcaacaagtgtgcagacatcactaaagcaccgctgaacggaacttacccgatagaaaaagttatgattcccgaaaaggcaaaaggaaatataggactggttatcaaagggtttattaatgtgccgaaagacgatatctatacctttgcccttttgtcggatgacggcagtacgctggtaatagacagtgaacaggtgatcgataacgacggaccgcacgggccgcgtgaagttatcggccagaaagcattatcgaaagggtatcatccgatagaagtacgctattttgaccaaaacggtggccaactgaaaatgacggtaaccggcactgaaggaaacgaaattccgacaagtgacttatatgcaaactaacattattgctcaaaggataaattgacatgacacacaagggtgtgtcatgatccaccacagagtagcaccgaattcgacagatcgaacttaatctattattgataaatgatatttatctgtgtaaatcggtgtactctgtggtgaatacgagtttaggtacaccctccgatacacggattataattcagttccgctccataacacaaaaaatcgatatcatgataaaacttaaactaagcattcttgtatgggcgatcggcctatcgatgaccgccttttctcaaacaacttcgtccttgcgggcgaaagtgttaaccttgaacgactatccggatgctcttcggttgtgggagttatataacgattccgcttctgtagaacaaaaaaatccgtcatagaaggcaactgggaatttatatttctttttgatagacacgtgtatgctccccccaagggtgatagcaatctcctatatatacaaaattgaaatgttcataatagcctgtatgagttgtacacaagtataaattcccgaagcctaaccgccgggtatcctcttctactgctttgatcagtaagtttccgtaattatgccctctatactgctcttcgatgaataaagcaaccaaccacgggtataagtccatacgtgaattaaaatcatttgtggcaagtccggcacaacctataatttctccttctccatttatcagaagataccattgtggcagaggagattccgactccaaacaagttctgaaacagttatcataaaccattctactattttcgtcagcccacttcttttggaaataagcaattgcctcctctaaatattgagggcttttccgtaatgaaataatatccataattataatcttatttattagccgcttacattattactgcatttttcactctctttctttctcttcttccaaagttgccagctattaataatgttttgccacaatacatagcttcccggccctacagcagaaagtggattcagataagtatgagccatccagatggcaagaatggtattcttttgccctaaagcctgtccaccactaatacgatcgttgtatatactgcccaatgttttacccagaaaaaattgaagacaacatgctatcagggcgacaaccgcaatcataatctccgtaagtccgtctgccggatcattaatcaaagaataaagcgtttgtgcagtgacaatagcaagagaaattccccataaataaaaggccagttcatgataacccaacagcactttatgcaccttgggaataaacctctgcaagaaccaggctgctaagaaaggacagatcaataaaggaaaaaccttactgagaatcatcagaaaagcatctataaaactaataccgggattggcctctatcaatggaaacaggatcggaacagcaattgcagctccaatattggctatcaatgtataagttgtcagactggcggcacttcctcccaacttcgatgtaataacggcagccgcagtagccgtggggcaaataacacaaaccatcgctccttctgccacaattttattaaaacgataaagtagcagataaacaatcaaagatccgaatatctgaatcaataaaagccataagtgtaacggcttcggttttaagtcacgcggagataccttacaaaaagtgagaagcaacatagtgaaaatcagtattggagtaaggaaagaaaagctgataaataccggataaccaacagcacctaccagcatagctatcggaagtgtccaatttttcaagaacttcagcattgttatatcgtttaaatttcaggtgcaaagtaacgtaaaaaactcaaaacttaacactaaatagtgagttttcaacaaatttctgctacatttgcacattattttatatggaactacgtagaccacacatattatatatattgatttgcctttggctactcgtttctccatcaaacgtcagtagcgtctgggcaaaagatttcgttgtagttattgacgccggacatggcggtcacgatcccggagccatcggaaagatatccaaagaaaagaatatcaatctgaaagtagcattgaaattgggtaatctgatcaaacaaaactgcaatgatgtgaaggtggtctatacccgtagcaaagatgtatttataccacttgaccgccgtgcagagattgccaacaatgcaaaagccgacctgtttatttcaatccacaccaacgctctggccaataaccggaccgcaaaaggtgcttccacatggacattaggtctagccaaatcagacgccaacctggaagtggccaaacgggagaactctgtaattttatatgaagatgattacaaaactcgttacgccggatttaaccccaattccgcagaatcgtatattatcttcgaatttatgcaagacaaatatatggagcagagtgtacacctggcttcattggttcaaaaacaattccgtcatcactgtaaacgggtggaccggggagtacatcaggccggattccttgtattgaaggctagtgccatgccaagcattctggttgaactcggttttatctctacgcctgaagaagaacgttatcttaatacagaagaaggaagttctactttggcaaaaggtatatatcgggcatttctctcttataaaagagaacacgaaatccgtttgacaggcagcagccgcactgcacttcccaatgatgatgaagtaaccgatactgaggttgcacagatagacagcacagaaagcgaaaacaaaaagccccaaaatactccacgcaccgacaagctggtaacagaagcaaaaactcaacgcccaattgttgtagaaagcacaacaaacgactctgaaattacgtttaagatacaaatactgacctcttcacgtccactatccaaaaatgataaacgactgaagggattgaaagatgtagattattacaaggaaaatggactatacaaatacacttacggggcatcgtccgattataataaggtattacggacacgccgtaatacagtcactccattatttaaggatgccttcatcattgcattccgcaacggagaaaagatgaatatcaacgaggctatagccaattttaagaaaagaagaaataaataaaaagactaaataacaaaacatgaaactcattacaaaagaagtcaggataggaatagcaggtgttgcggccttgtgcttactcgtcttcgggatcaattatctgaagggcatcaatatgtttaagcctgccagctatttttatgtaaaattccataatgtaaacggtctggcacaatcgagtccggtattcgccgatggtgtccgtgtaggtatcgtccgtgatattgcttacgattacaatcaaccggaaaatgtaatagtggaagtagaagtagatactgacttacgcataccgaaaggaagctcagccgaactggtacccgaactgatgggaggagtaagaatgaatattttattggccaacaatcctcgcgaacgctatacagtaggcgatacgattccgggaacgctgaacaacggcatgatggagaaagttgcagcaatgatgcccgctgtcgaaaagatgttgcccaaattagactctatccttacttcactgaacacaatcatggcagatcaaagcattccggcaactctgcattctattgaaaagacaacagccaatctcgaagttaccagccgtcaattgaaagtattgatgaacaatgatataccacaattaacaggaaagctcaatactatcggtgataactttgttgtaatcagcggcaatctgaaagaaattgattatgctgccacattcaaaaaaatagacgccactcttagcaatgtaaaaatgcttacagaaaaacttaacagcaaagacaacactgtcggattactgttaaacgatccacaattatacaataacctgaaccaaacaaccattaatgcagcaaatctgcttgaagacctgaaggaacatccgaaacgatatgttcacttctctttgtttggtaagaaagataagtagagaatacgccttaaatagaatttatctaaataagcgtgtaccaaacgaggataggatgaaatcctttaaaagtctattcatagacagaaaggatacgtgcaccaactatcaggttaaagaataacaggtggaccgtcacgtgataagcaattaattaacaagtagttataaaaaagcaatagcttcccatgaggagtattttatagggaaatgataagtcactgaaagtaaacacattattctttcagtgagaaatacaagaaaaaggagatttgtttttctcgaataagattcccaattttgcaaccgtagaagttttgcttaattaataaatgtattacagccgctatgagtgaatcgagtcatgtcggcctatggaaccgctgtcttgaaattattagagacaatgttcctgagtcgacatacaaaacatggtttgttcccattgttcctttaaaatatgaggacaaaacgttaatcgtacaagttcccagccagtttttctatgaattcctggaagataaatttgtggacttgctacgtaagacgttatataaggttataggcgacggcacgaagttgatgtacaacgtgctggtggacaaaagttcaggggcaaccgtgaaccaggagtctactacccgctctacggctattccccaatccggacttccccgtgttgatgaaaggaaagctccgggcttgctgcgtgcaccggccgttcaggaccttgatccccatctaaatccgaactataactttgagacctttattgaaggatacagtaataagctttcaagaagtgttgccgaagctgttgccgagaatccggcaaaaacagtcttcaatccgctgttcctccatggagcatcgggagtaggaaagacccatttggccaatgccatcggtacccgcatcaaagagttgtatccggacaaaagagtgctttatgtttcagcacacttatttcaggtacaatataccgattccgtacgtaacaatacaacgaatgacttcatcaacttctaccaaacaatcgatgtattaattattgatgatattcaagaatttgcaggtgtcaccaaaacacaaaacactttcttccatatctttaatcacctacatcagaatggcaaacagctgatattgacttccgaccgtgctcctgtattattgcagggtatggaagagcgcttactgacccggtttaaatggggaatggtagccgaattggagaagcctaccgtagaactgagaaaaaacatattaagaaataaaattcatcgggatggattacaattcccttcggaagtaatcgactatattgctgagaatgttaatgaaagcgtgcgtgacctggaaggtattgtcatttccatcatggcccactctaccatttacaataaagaaatcgatctggacctggcacaacgcattgttcgtaaagtcgttcgttgtgagacaaaagctgtcactatcgatgatatcatcaacgtagtttgcaagcacttcgatttggagtcatctgctatccataccaaatcaagaaaaagggaagtcgtacaggcacgccaagtagccatgtatttagctaaaacacatacagacttctctacttccaaaattggaaaattcataggcaataaagatcatgccaccgttttgcatgcatgcaaaacagtaaaagggcaatgtgaggttgacaaaggattccgatcggatctggaaaacatagaaactttactcaagaaaagaaacgtgagtaacggtgaacggtagacgatgaacgatggacatactgcaaaataatgtaagatgttcatcgtccatcgctcgccccatttatcgctcactgttcatcgttatttaatccataaagccctgccggcgaagtaccttcaacagattctcagacataaattcattatccttctttgtatagcggacatccgtgaatacttgggccagagtctctttctgattctcttctataaataacttgttctcaggcaaagattccttataagcatataaccggtttatatcttcggcggtataatcgtgatagctctcttcatgtataatgccctctatcggcagacggtctacctgtttcggagattccgccggatatcccacagtcactgtagtaatgggaaacaccaactcgggcaagtgcaaagcatcgatgatcatttgaggattataggtagtagtacccaaatagcaaatacccaatccggcttcctcggcaagcgtacagaaagtctgtgcaaccaataaagtatccatagcggcattcaaaaaggacattaaattaccatatcccggcaccgcattcctttcctgacaatatttgcaaaaacgacgaaaatccgcgcaaaatgtcaatacaaccggagcctcctttaccatcggctgattaaaatgagccggagaaagtatttcttttttctcggcatcacgggtgacaaccacactataaagctgcattccacccatcgtagaagcgcgaaatgaagtttcaagcaaatcatttaacaaatccggcgtaatatctttttgctggtatttgcggattgtccttctgttcttaactgtatccatcatatcttttttctgcaaagatataaaaagaataatcattctatctcatttataaaatagaataattttctttttggaaaacttcaagcgtcgaacaaaagcatcattcatttgtttatcaattgcttatcgtttataaacggataacttagtaccggttaataaattatctcgtttttattttgatataccaaaaaacattcatagctttgcaggcacgtttgttaatgataagtaagcttctacatatttacttattaataaagaaatctaagacacattgcatcgtggaaaagcaaatttacttttacgaggaagccttcgaagaatctttacgatattttcagggcgatgaacttgctgcgcgagtttgggtaaacaaatacgcagtaaaagactctttcggaaatatttacgagaagtcaccgaaggatatgcattggagacttgccaacgaggtggctcgcattgaagcaaagtaccccaacgcactaagttccgaacagttgtttgagctgtttgatcattttaagtatatcgtaccgcaaggtagtccgatgacaggtataggtaacgattatcaggttgcttcactttccaattgctttgtgattggtattgatggttctgccgattcatacggtgccatcatcaaaatagacgaagaacaggtgcaactgatgaaaagacgtggtggtgtaggtcatgatctctcgcacatccgtcccaaaggttctcctgtgaaaaactccgctctgacttctaccggtctggttccgttcatggaacgttattccaattccacacgtgaggttgctcaagacggacgtcgcggcgcactgatgctcagtgtatcgatcaagcatccggactcggaagcatttatcgacgccaaaatgacagaaggtaaggtaacaggagccaatgtttcagttaagctggacgatgcattcatgtcagcagccgtagaaggcagaaaatatacccaacaataccctattgactccgatcacccgactacggtaaaagagatcgaagcttccaacctatggaaaaaaattgtgcataacgcatggaaatcagcagaaccgggtgtattgttctgggataccattattcgcgaatcagtgcccgactgttatgcggacctgggatataaaacggtttcgacaaacccttgtggtgaaattccattatgcccctacgattcttgccgactgttggccatcaatctatattcatacgtagtcaatccgttcaccaaagatgcctacttcgacttcgatctcttccataaacatgtagcactggctcagcgcatcatggatgatatcatcgatctggaattggagaagatagaacgtatcatagagaaaatcgatcaggaccccgaaaacgaagaagtgaaacacaccgaacgcggactgtgggaaaagatctataagaagagtggtcagggacgacgtaccggtgtcggtattacagccgaaggcgatatgcttgccgctctcggaatgcgttatggaacagaagaagcgacagagttttcagagaaagtgcacaaagcagtcgctttgggcgcttatcgttcatcagtggatatggccaaagaacgcggagcattcgatgtatatgactcggaaagagaaaagaacaatccgtttatcaaccgcttgcgcgaagccgacccggcattgtatgaggatatgaaaaaatatggtcgccgtaacattgcgtgcctgaccatcgctcctaccggcacgaccagtctgatgacccaaactacctcgggtatcgaaccggtattccttccggtatacaaacgcagaagaaaagtaaacccgaacgataccaacgtacgagtcgactttgttgacgaaaccggagatgcctttgaagaatacatcgtattccaccacaagtttgtgacttggatggaagcaaacggctatgatccggctaaacgatacactcaggaagaaatagacgaactggtagcaaaatcaccttattacaaagcaacgtccaacgatgtggactggctgatgaaggtgcgtatgcaaggtaaaattcagaaatgggtagaccactccatcagtgtgaccatcaacctgccgaacgatgtagacgaagaattggtaaatcgcctgtatgtggaagcctggaagtcaggctgcaagggctgtacggtttatcgtgacggttcccgttcaggagtgctgatctctgcgaagtccgacaaagataagaaagaggaactccctccttgcaaaccaccaacggtagtcgaggtacgcccgacagtgcttgaagccgacgtcgtacgcttccaaaacaacaaagagaaatgggtggccctggtcggcttgctcgacggcagaccttacgagatattcaccggtctgcaagacgatgacgaaggaatcattattccgaaaagcgtaaataccggacgcatcatcaagaacgtcgatgaaaacggaaacaaacgctatgacttccagttcgagaacaaacgcggatacaaaatgaccatcgaaggtctgtctgagaagttcaataaagaatactggaactatgctaaactgatttcaggtgtacttcgctggagaatgccgatcgaacaggtgatcaaactggtaggttcgctgcaattggacagcgagaacatcaacacctggaagaatggtgtagagcgtgcgctgaaaaaatatgtgcaggacggaacagaagccaaaggcaagaagtgccccaactgcggaaacgagacattagtttatcaggaaggttgcctcatctgtaccacttgcggtgcatccagatgtggataaacttagccaagtaaatgattaatatgtaagcaaaaagtgttgaaaggagcccataggctcctttcaatgtttaatcatacaaagagcacaaacgtttgcatactattttaaagtagttcgacgaaagtaaagatacgacatatgtagaatatttctatacttgcaaaatcattagtcaataattaaatctaatatatatgatagttacatttcatattgaatatcgcacaagctggggagaagaagtcagaatattaggttctgtccccgaacttgggaaaaataatccggagcaggctgtagcccttaccacagtagacggcattcattggagcaatgaaatatccattcaattgccggccgaaggggttgtcgaatacagttatcacatatatcgtgacggtaaggccatccgtaccgaatggaactcctttccgcgactcatctatctgccggccgacgttaagaaaagcctgcgcatcaacgactgctggaagaatcttccggagcagcaatacttctacagttcggcatttaccgaagcactgctggcgcaccgcgaacgaagcgcaatccccaaaagctacaaaaaaggattgatgatcaaggcttatgctccacgcatcaacagtaagtactgcctggccatctgtggtaaccagaaagcactcggcaactgggacccggacaaggcatggcccatgagtgatgccaactttccggaatggcaagccgaactggatgcttccaaactggaatttccgctagaatacaaatttgtattgtacaataaagaagagaagcgtgccgaagcttgggagaataaccccaaccgctatctggctgctcccgaaatcaaagcaaacgagacattggtcattgccgaccgatatgcctactttaatattccttcctggaaaggtgcaggcgtagctatccctgtattctcactaaagtcggaaaaaagtttcggtgtaggagacttcggagacctgaagagaatggtggactgggcggtcagtaccaaccagaaggtagtacagatcttaccgatcaacgataccaccatgactcatacatggacagactcttatccctacaacagcatttccatttatgccttccacccgatgtatgccgaccttaaacagatgggcaacctgaaggataaggaaactgcggccgccttcaaccggaagcaaaaagaactgaatgcactttccgccatcgactacgaagctgtcaaccgggtgaaatgggaatatttccatcagatattcaagcaagaaggagaaaaggtgctggattcgaaagccttccgcagcttcttcgaagccaacaaagattggctgcaaccgtatgctgcattcagctacctgcgcgatttataccatacaccgaacttccgcgaatggccccaatactcggagtacaatgctcaagagattgaagaactgtgccgccccgacacggcggactatgcccatatcgccatctacttctatatccagttcaatcttcacctgcaattgctcgaagccaccacttatgcccgcgagcatggagtagtgctaaagggggacatccccatcggtatcagtcgcaacagtgtagaagcctggacagaaccttattatttcaacctcaacggacaggccggtgctccacccgatgatttctctatcaacgggcagaactggggtttccccacctataactgggatgtgatggagaacgacggttataaatggtggatgaaacgtttccaaaagatggccgaatactttgacgcctaccgcatcgaccacattctgggattcttccgcatctgggaaatcccgatgaatgccgtgcatggattgctgggacagtttgtacccgcccttcccatgagccgtgaagagatagaaagctacggactctctttccgtgaagagttcctgcggccgtatatccatgaatatttcctcggacaagtgttcggaccacataccgactatgtaaagcagacgttcatcgaaccgactgaaacttacgaggtgtaccgtatgcgtccggaatttgatacccaacgcaaggtagaagccttctttgccggcaagaacgacgaagacagtatatgggtcagagacggattatatgccctgatcagtgacgtattatttgttcctgaccgcaaagacccgaacctgtaccatccccgcatcggcgtgcagcacgactttatctaccgtgacctgaacgactgggaaaaaacagcattcaaccgcctttacgaccagtactactatcatcgtcacaatgacttctggcaacagcaagccatgaagaaattgccacagctcacccagtctacccgcatgctggtatgtggcgaagacttaggcatgattcccgactgcgtggcatgggtgatgaatgacttacgtatcctgagtctcgaaattcagcggatgcccaagaatccggcagaagaattcgggaggctgaacgaatatccgtaccgttcggtctgcaccttctccacccacgatatgtcgaccctgcggggctggtgggaagaagactatcagcagacccaacgctactacaatcagatgctgggacattatggtaccgctcctgccatagcaacgccggagctgtgcgaagaagtagtacgcaatcacctttacagcaattccatcctctgcatcctatccctgcaagactggctgtcgatggatggaaaatggcgcaacccgaatgtacaggaagaacggatcaatatccccgccaatccgcgtcattactggcgctaccggatgcacctgacactggaacaactgatgaaagcagaaagcctgaatgaaaaaatcagggaattggtgaagcagacaggcagaaatccggaaaagtaacatccgcctgtcactttaagaagaaaaagaacaaagagagaagagtgaaaccaagtgtttttcactcttctctctttgttttcagtaatattcagtatctttgtcagaccaactacacaaacatccggaatgggagatgacaaaaacaaacgaatagattttgtggacttaacgaaaggagtctgcatcattctggtagtaatggcacacataggtggagccttcgaaaaacttgattatcactcgatgattgccagttttcgcatgcctctttatttctttatctcaggcattttcttcaaatcctatgaaggccttttcggcttcttcatccgaaagataaacaagctgatcatccctttcctctttttctatctcagcgcgttctttctgaaatacattgtatggaaaatcgctcccggagtcttccagcttccggtcagctggacggaactcctagttgtgtttcatgaccatgcgctgatcaagttcaaccctcccatctggttcttgctggcactcttcaattgcaacatcttgttctatctggttcacagtttgcgcaaccggcggttaggtctcatgtttgccctcactttgctgatcgggacagccggattctatatgggcaagcatcagatagaattgcccctttatatggacgtagccatgagcgccctgcctttctacgtagccggattctggattcgccgttacaatttcttcctctttccccatcgtttcgacaagctgattcccttatgcatcctggcagccctggcagtgatgtacttcaccgccacattcgtgggcatgcgcaccaacaattatgccggcaacattttccaattttgggcctcagcctttgccggcatatttatgatcatgcttttctgcaagaagttcaagaagctgcccgtcatctcgtatatggggcgttactcggtcataacactgggcatacacgcacctttactccattttgaatatccggttgtcagccggtttatccacaacgaatggggacaggccattgccttactgctgctgacgctgaccgtctgcatcattgcgacccccatattcctgaaactgattccgcaagcagtggcacaaaaagactttattaaaaccaaacaatcgacacaacaaggatcataattgcattaattatcctatttttgccggaagatacatcaattataaaacttatgactacccagcattatatcttcctggaaaacgtacgtttctacagttatcacggagtggccccccaggagaccgccatcggcaatgagtttatcatcaacctgagactgaaaacagacttcggcaaagcgaccgaaaccgatgaagtggaagataccgtgagttatgccgacatatatgccacactgaaagaagagatggaactgccttcaaaactgctggaacatgtatgcggacgaatcgtaaaaaggctcttccgggactttcggaaaatcagggagatagaaatcaaactggcgaaaagaaacccgcccatgggagcagacatcgactctgccggagtagagatgcattgcacgcgagactgaatcgacattaaaacacgaataagatgaaaaaacttttattaatcctcctactggtactggcaggagaaatcagcgcacaacaagcagcaacgattgtagtcaagactaccccggacaacgaaattgcttattggcctacaggcaaagagcacctgttctgcattgctctgggaaccaaagcacaagccggccctctgggagaatttgtccatcaattccgcaccgaccgccccggcatggtgcaggtatggacccaagggagtgattcttttacactctacctgacaccgggaagcaaagacaccattaccgtgaccaaagataccctgatcatcagcggtacaaactcggcctataaccgatgcctgaaaacagtgaacgattatcagaaatacagcgataaactggtgtacatgcagccgcacgaactgcgaggaatcacttcactggagcaatatcaccggctggcagacgccagaatgcggcaggcactcgacgctgtaaatacttccggactcaatgaagagtttctcgcggaacagcgtgcacacatcgattacatccgccggtctatatttatacatattgcaaggcagctgtcgagaaaagaaaaactacccgaagattggcaaagagaactgacagaagtcatcaattcatccgtcaacggtgattatctgcgttcctaccgcggaatcggattctttgtaaacgacctggttatgatgcagttcaccaacctcgaaaacggtgacctcaaagagataaaggattacgcctccttcctcttcgaccggtatcggaagttcttcacaggagacaatctgcaatacatgcaggcccagcttatctacgaagatgaatttcagggtagcaaaactccttcgatcccccaactatacgaaacttatagggcagagttccccaacagtccttttttgaacgtactcgaaccgggcgttaaagaaaacctgcgctttcagaatagccgtatcaccgacaaagactatcatattctgacatgcgactccaccatcaccagtctggaggatgcggtaaaaccctttaaaggtaaagttgtctatatcgatgtatgggctacctggtgcggtccctgcctcaaagagttccaatacctgcccgccctcaaggaaaaagcgcacaacatggacgttgtatacctatacatttcgatagaccgtccggaggagcggaagaaatgggaaaagaccatcgcataccatcaactgaaaggttatcatttattagtaaacgaaaagttaggaaaatcgctatacaccgaattgggaaacgaacggcaaatactgagtatcccctgctttgtcattattgataagacgggaaagatagtcattcgccatgccgcagcaccgagtgaacccgaaaaagtgatcgaacagttgagcacctattataacaagtaaaaacagacttcggaataagctgatcaagaaaagaaaaacgggcaaaagcttgacttccgcaaagaaaaagagtatctttgcctatgtaatcataaagtatattccaattaaagtacggtaatagggagaagcattggcttctccctattttttatactactaacagtgcgtttccgcagagccggtttccaaagcttgcagagccggtgttcacctactttagagccgttgttttcctcatttacacggttgcttccgctacttttcccggtatgtcggctcccatttcccggcatgaaaatcgtttttcaccagaagataatttcttatctcctattgataatgaacaacggaaaggatgaagtcccgaaagttaacaatacataaatctgctattgacaaaaataggcggaaagacagcagccggaaccgatacatcacaaagtaaacgtgccacaaaatacacagagagcacaaagttattatatagtgattctacataattaaaactccgtgctctctgtatactctgtagtgaaatatatttcgtaaccgaataggctcttatttctttctctttcttttcttcaccgattctaccgcctcggtcaccaccggtttattctcgaaacgtttcgtatagcccgagtagtccggatgtgtccgttcatagtccggatcaaggaagagcggacttgaaataatatgatcggcagtggaacggttgcaacaaaagacgatgttttccacacttgccagacgggtcagtgccttcacatccgtatcgtgcggctgaagagtcatcgggtcggtaaagaagaaaagataatcgatctctccatccacaatacgcgatcccatctgctggtcgccgcccagaggaccggatttcaggatagtaaaatcccactccacatcgggatgtttctcttttaatgcctcctgtatcagcgtaccggtggtacctgtacaataaaacttatgtcccatcaataactccgagttccaaagaacccattcaatcaggtcttttttcatagcatcgtgcgctaccagcccgattcttcgaattagtttttccataacgtcatccttttaaatctgataattgtgaaaagaacttccgccctttcacatagaattgcactaagatactactttttatccgttcgggaataaagtgtgaggaagtttttctgagattctccgctcttgcatcccggaaactgtcacgtaacaacttgaattcgcgacgggcacgaaccaccgctttcgcattgggcaactgccctttaagcgcaaacgtagcagccgcgatgtaatcgagccagcaacgtacacgcatcactccggccagttctctgtccggaagattcttgtaaagcatgacaaggttattacgaaaattgaggaaggtcttgtgcggattctccttcttcaacgtggctcctcctacatgatagaccacactttgggggatgcaaacaattccacgtccgcgggcacggagtctccaacaaagatcgatctcttccatgtgggcaaagaagcgtccgtccagtcctcccgcttcgcgatagtccgccagacggatgaacatggcggcaccggtagcccagaatatcggcagtacggtgtcatattgccctcggtccgcttcgactactcccatcacccttccccgacaaaacggatatccgtagcggtcgatgaatccgccggcagctccggcatattcgaaccattctttttgtcgccaactgcgtatcttcggctggcaggcagccacctcaggatgggcgtccaaataggcagccatcggttgcaaccactgtccggtcacctcgacatcggaattgagcaacaccacatactcggcctccacctgccgaagggcaagattgtacccatctgcaaaaccatgattcccatccagcagaatccggcgtaccgagggaaactcgcggcgcagcatctccaccgactgatccgtagaaccgttatcagccacacagacttccacaccttcagcctccgaatatcgaagcacggagggaagaaacgaacggagcatctcgcaaccgttccagttcaatataacgacagatatcttattcatttttcttttcggggcgtttcagcttccaacgcttatgcgaccatagccaataggccggctctttccggatggtctgttccagcctgcgggcaaatatttcggtaatctccccgtcggctgtctccttcggacggtcggttaccagatcgaagtctacccggcaatatcctctccgctccttccgcagctcgcaatagaaaaccggaaaatccatcatcttggcgatacgttcggcaccatccataaataccgtatcctgattcaagaaagtagtccaataatgggcttcatgcatattgggcgattggtcggtaatcagtccgatggccatcttcttgccggcacgcttcaacttaatcacttcgcgggcggtagagtgtttcggaacattatatcctccgaaacgggcacggatgtatttaaagagtccatccagatagacatctttcaagggcttgtatacctgcacgggcacatcgcccggacgcataatcattcccatacccgtaatccactcaaaattagcgtaatggggtatcaacaggacaatcccgccccgttcgtctatcatccggaggtaggtttccttattctcgtaggtcatccgtttgcaaagttctttctccgacatgcgcagcattttcacatcttcgagcatatagtcgcaaagataatgaaaaaacttgcgttcgatggccttcaattctgctgccgacttttccggaaaagagttcttcaggttggtacgtaccaccttcctccggtaaccgatcacatgatacagccagaaatagataaaatcggacagtgcatacaataccggaaacggaagaacagccaaaagccacattcctacataggtcaacaaatagaggagtttcgatttcatgtttattgtgttatagttcctttcagtgcggtaccctcttcattaaaatctcccaaaagaacattcactactttattatccaacgcggcgtcactctccacttccacacggatatagtttgccgtaaatccatgcatcggcgctcccgctttgggcttttccatcaggacaggcatggtctgcccgatgtaacgggcataaaaggcttttgttttttcatccgacagtgcaagcagacgctggcttcgctggtgtttctcttcaggagtcaccacatggtctattttcagggcctgggttcccggacgttccgaatagctgaacacatgcagctgggtgacgtccagtccgtgaataaattcataagctttctcaaagtacccggcagtttcgccccgggtacctacaatcacatccacaccgataaacgcatcgggcatcacctcttttatcttcgcaatcttcgaagcaaaaagttctgtcccatagcggcgacgcatcagttggagaacttcgtcactaccggactgcaaagggatatggaaatgtggcatgaaactgcgtgaacgggatacgtattctataatttcatccgtcagcaaattgggttcgatggaagaaatacgataacgttcgataccttccacccgatcgagggcctttaccagatcaaagaaggtctctccggtggactttccgaaatcgccgatgttgactccggtcagcactatttcctttccgccttcggcggcagcctgccgggcctgttccaccaaagaagcaatggtaccgttacggcttcgtccgcgggcaaagggaatagtacaataagagcagaagtaatcgcaaccatcctgcactttaaggaaaaaccgggtacggtcacctcgcgaacaagacggtgcaaacgaacggatatcttttgtagcggtcgtataggcttctcctccttcgtgcttatgcaggtcgcccagatactgaagcaaatctttcttctgttccgcaccgagtacaacgtccactccctctatctttgccacatcgccgggttttaactgggcatagcaacctgtcaccaccacaaaagcgccgggatgttgtttcaccagccgatgaatggcctgacggcatttcttgtccgccatctcggtcaccgaacacgtgttgacaatacaaaggtcagccttttcacctttccgggctgtacgtacacctgcctcacgcaggattttaccaatcgtcgaagtctctgagaaattcagtttgcagcctaatgtataataaacggctgtcttatcttgaaatacagtggtatctatcataatctgtaaaaacgcatattcagcgcaaagttacacattattattaggagtaaagaggtgaaaggagttaaaaggagttagaggggaccgaagaagaggtacgggacgtgaaggacaccggaaagaaacattccacgtttgtaaatccttctgcctgcatcaaaaggcatccctctttggtttaaaaccagggaagcattgactttaagccaaagacacctgccttttaaagcaagagcccgttgctttaaaaggtatttccgtgaaggatagaatgctatatttcaaccgattagagaagagtacgaacagttatcgtttcctcttcatgtaaagatataaataaacaataagcctaattaacacctaaaggtttcttaatccggaagtttatacctacttttgcacaaatcttcaaaaaacgtgcaatgataaaagaaaacttcattaaactctacgagaacagtttccgtgaaaactgggatttaccttgctacaccaactatggcgaaccggaaagttatacctacggtgaagtagccgaagaaatagccaaacttcatttactgttcaagcactgtagtttgcgacggggagataaaatagccgttatcggaaagaataatgcccgctggtgcatcgcttacatggctaccatcacatacggagccatcatagtgcccatcttacaggacttcaatccgaacgacgtacaccatattgtcaatcattccgaatccgttttccttttcaccagtgacaccatctgggagaatctggaagaagaacgcctgacgggtatccgtgctgtcttttcactgaccgacttccgttgcctgcaccagagggacggagaaacagtacagaaattcctgaagcatatcgatcagtacatgacagatacttatccgaagggattccggaaagaagatgtgctctacaccaccctgtccaacgataaggtgatgctgctgaactatacttccggcaccaccggattcagcaaaggagtgatgctgacaggcaacaacctagccggcaacgtgactttcggtatccgcacggaactgctgaaaaagggtgataaagtgctttctttccttccgctggctcatgcttatggatgcgccttcgactttctgacagccacggcagtcggtacgcatgtaacccttctcggtaaagtgccctcacccaaaatcatcatgaaagcattcgaagaggtaaaaccgaatctgattattacggtaccgctggtcatcgagaaaatctataaaaacgtgatccagcccatcatcagcaaaaaaggaatgaaatgggccttgagcattcctctactggataatcagatttatggccagatccgcaaaaagctgatcgatgcgcttggcggacgcttcaaagaaatcattatcggtggagccgccatgaacccggaagtagaagagtttttccacaaaatcaagtttcccttcaccattggctacggcatgacggaatgcggtccgcttatcagttatgctccttgggacaaattcgtcccctcttcatcgggcaaaatactcgatattatggaagcccgcatctataaagagaatcccgaagccgagaccggagagattcaggtacggggagagaacgtaatgaccggatattataagaacccggaagccactcaggaagtgttcactaaagacggatggttgcgcaccggtgacttaggcaccatggatgacgaaggcaatatcttcattcgcggccgactgaagacgatgatcctcagttcaagcggacagaacatcttccccgaagaaatcgaggctaaacttaataatcttccatttattcttgaaagtctcgtgatcgaacgaaacaaaaaactggttgccctggtctacgccgattatgaagctttggactctttaggactcaaccacgaagacaacttaaaaacgatcatggacgagaatctgaagaatctgaataataatgtagccgcctacgaaaaagtaagccagatccaactctaccccactgagtttgagaaaactccgaaaagaagtatcaaacgctatctatataacagtatagcagaagattagatatgttttaaaacatacaaaaaaacataatgaaacattcttctaaaaaaaaaataaaaaaaagttgggcttaggagtacaacatatacaaaaagtacatacctttgcagcgttttaataagcaattgattgtattacagatttaaaaagcaaagaaaatgaaaaaattagttttgatgttcgtagctatcgcagcagtatcattcgcatcttgtggtaacaaagcagctgacgctgaaaaagcaactgcagattctatccgtatcgctgactctatcgcagcagtagaagcagctgcagctgaagcagcagctcaggcagctgatactatcgcagctgacactacagtagtaactgaaactgttgtagctgaataatctcgaacaacattagagagaattgaaagtctgccgtgccaaagcacgtacagacttttttttgtgtccttacctctcccctctcctcaaaacaaactcttccggacggcaacagacagtgtccccataccgtaatcgaaagaagttaatatcgcagcaacaggatattaacatcctgactacagcaagttaacttcctgtcatcagcaaattaacttcgtatcagcaaagaagttaatatcgtaacgtcacataaggatactaaaaaaaggacattctctttcaagaataccctttccttatatctcggtattgtatgctacttattcagctactacttcgaaaggaatttctacagaaacttctttgtgcagtttaacgatagctttgtaagcaccaacttctttcacagcgtcttttacaacgatgatctttctgtcgatctcgtggcccaatttagccaattcctcagcgatctggatgttaccaacagaaccgaagatagtaccggttgagctaacttttgtagcgatagtcaatgatacgccttccaacttagcagccaatgcttcagcatctttcttgattttctcaagtttgtgagcacgttgtttcagttcttcagccaacattttctttgcagaaggagaagcaataacagcttttccagtggggatcaagtaattacgaccataaccagacttaacagttacgatgtcattcttataacccaagtttactacgtcttctttcaatataatttccatacttttcctccttatttcatcatgtcagttacaaatggaagtaacgccaggtgacgtgctctctttacagcctgcgcaatacgacgctggaacttcaaagaagtaccggtgatacggcgcggaaggatcttaccttgttcattcaagaatttcttcaagaattcaggatctttgtagtcgatatacttgataccgctttttttgaaacggcagtattttttctttttaacgtctactgaaggcggagttaaatatctgatttctgattgaacttgttgtgccatgattaatcctcctttttgtttgatttaacacttcttctctttgcagcatattctgcagcgtatttatccattctgaaagtcaagaaacggattacacgttcatcacgacggaaatttaattccaacttgtcaattacagtaggttctgcattgaactcaatcaactgatagaatcctgtagacttcttctggattggataagccagtttcttcagtccccagttttcttcattgataatctcagcaccttcagcctgaagaatgcctttgaatttttctaccgcttccttcatctgaacatcagacaaaacgggagttaaaatgaaaacggtttcgtattgattcatactcgttttaattaaataaataaattatttgattttaaaaatgcggtgcaaaggtaggcattttattttgaactgcaaacatttaatctttttttgtgttacgagataggatttgtcaaagaagacatttatctttgcaaagttgcttaaacaataatttcatgatcgaacaatttaactttgatatcaggctgatctttgccatcttgaatggtaaggtctctgctgccattaatcggaaactataccggaacttcagacaaaacggtctggaaatcagtccggagcaatggacggttcttatttttctctgggaaaaagacggagtgacacaacaagagttgtgcaatgcaacttttaaagacaaaccgagtatgacccgcttgattgataatatggaacgccaacatctggtggtacgcatctccgataaaaaagaccgccgtaccaatctgattcatctgaccagaacaggaaaagagctggaagaaaaggcccgtatcatagctaaccggacccttaaagaggcgctgcatggcatcacagtcgaagagctaagcgtaagccaggaagtattaagaaaaatattcttcaacaccaaagattaatcgacaggagggagaagtgagagcaacaaaatcaactatttatggctaattaatggtttttttgcgaaaaatatttcgtccgttaaagaattatgcgttaatttgtgactggaatataataatctattaaaatacacacacatgaaaggcttattaaagaatttaggattgctattaatcttagtcggagtaatcattctgattgcttgctctctgaccggagaagtaaacaacaacgctgtcttgggaggctcgatagtattggtggtactcggactgattacttatattgcgataaacaaaagaattgcagattaatagtttcagcaagaaataaaaaagccggaaaacgaatgttttccggcttttttatttctatacactcccctatccattatgattcgggctcgggggtgatcaacttgtaaccttttccgtggatgttgataatctcaatcgaatcatcatctttcaggtgcttgcgcagtttagtgatatacacgtccatgctacgcgcattgaaatagttgtcatcgatccagatagtcttcaaggcaaagtcgcgctgcaagatttcgttagcatgcgcacaaagcaatcccagcaattccgattctttggtagtcagtttcgtttgtttgtcgccgatagccaggatttgcttctgggtatcaaacgtaaacttaccaatcttataaacattgctctccttgttcttctttccgcgaacacgtctcaggatagcctcgattctgaaagtaagctcttccatactgaaaggtttggtgatataatcatccgcaccgatcttaaatccttccaggatatcttctttgagtgtttttgcagtcaggaagataataggaatttcagcgttggccgcacgaacctcctgtgccagtgtgaagccatcttttttaggcatcatcacgtcaaacacgcataagtcatatttattcttcaggaaagctttaaatccggcttctccatcaggatacaactcagcagaataacctttagcctgtaaatattctcttaaaagcatgccaagattttcatcatcctcgcataataaaatacgcagtttctcgtccatatcaatcattttttaataaaggtaatgcaataataaatttagttcctacattcagttcactctctgcccggatggttcccttatgatcctgaataatctttttcacataagccagtcccagaccgaaaccttttacatcgtgcagattacctgtatgcacgcgatagaacttatcaaacaccttcttcaggttttcttttttaataccaataccgttgtcctgtatcgaaatcatcagtttaccgggctcgttccaggttctcacgttgagcaccaggtcttcttcgggcttcttgtatttcaccgcgttatccatcaggttgaatatcacattggtgatatgcatttcgtccgcaaatataacaggattggtagcctcaaggttcgatgtaatcttaccattatagcgttccaccttcaaagcgaacgtattgataactccggtaatcaactcattggcatcgagttccttcatcttcagcgttgctttctgcctgtcgaacatagacatctgaagcaccttctccacctggaatctcaaccgcttcgtttcatcattgatgactcccgatatatgctggaacatctgcggcgacttcccgactgcggggtctttcagcatctgggcagcaagcgagatggtcgatatcggtgtcttgaactcatgcgtcatgttgttgataaagtcattcttcatctctgtcaacttcttctgacggaagacgatgtagatggtgaagatgaatgtaatcagcagtacgatagtgaatatcatcgaaggaatcataaaactaaccgagtcgaagatataatctttcttaccgggaaagtgcaccttcacaatactcatcttcgcaggcggatcattctggaacagaggttgcgtataagagtcttcactccctccgtcttcgtagtccgagcaacgatatacttcacgtccatctttatcgatcaccgaaaaatggtagagcaactctacaccattattaataaagttcgatttcagataattatccagcttcttaaagttcacccgttcgccaatcgatttatcgcttgccttgtaaatcatccgcaaagccacatcgtcgagcagaaaacgctgatacatatacctatttttaatagcgtcagtcaagctccgtgatgtctgcggaatggtattccggccatgcctttcggaaatcatggctttgggcactttcgacggctcggtggtaatcatcttcagttcaaactccgaatacagggttccgtccggtgacttgaacctataacgctccgattgctgaattaaaccgtttttctgttcggtagtagaagaagactgagccagtgctctgcgttccgcttcagtgatatcctctaacagccaacgttgcgtttcatcatactctacatcctttgaaacctgaaacaaagcatttcgcacggatgtattaaattgttctttacgcatcttcaccatttcttcgatgtagctcacttgtaaatagagcaaactcagaaaggaaagacccataataatgcctaatatccagattgttgactttttcatagcaacaaaattaacactccctaattaacactcctaacagcttaacctgttttaacaggacgttctctataattaaccgaaaggcgttttttaggtcgtattctgaccactataacaaaacgtatacacctttggtttgcaaatttaataaaaaattaaagatttctcttcagaaaatctactttctttaatcattgttaatggacgggaaggctataagataccggttacgtcctctctcacaaccgccacaccggacaagcacgtcccaaagaatacctaaaaaagtaaagctacgagtagctgcacattcattgcacacttctcgtagccttatcatttagtagcacagccacttatagcctaaacccggcagcttatgactataactactcttctgtttgtttggattcgaagtcttttattaacttatcctgcacatcactcggaaccagttcgtaacttgcaaatttcataatgaacgaagcacggcctccggtaagcgaactaagagcggttgaataagaagacatctctttcaaaggcactttagccaccagtttctcataaccgttttcgctgctcatacccatgatcatggcacggcgtccctgaaggtcacccatcacgtcacccatcttatcggacggtacgaagacttccacatcataaattggctcgagaatcttcggtccggcgttcttaaacgcttcgctgaaggcattacgtccggccagcatgaacgaaatttcattagagtctaccgggtgcatctttccatcatatacaatgacgcgtacatcgcgggcatacgaaccggtcagaggtccctgttccatgcgggacatgatccctttaaggatggccggcaggaagcgggcatcgatagaacccccgacaatactgttaacaaataccaattttccgccccattccaatggaacttcctcagtacccttcacgttaatcttaaattcctgtccgccgaatttatacatatcgggcaccggcattccttcataatagggttccactatcagatgcacctcgccgaactgtccggcaccacccgattgctttttgtgacgatagtcggcacgggcagcttttgtgatggtttcacgataagggatcttcggttcttcaaatttcacctgaagcttttcattgttctccagacgccatttcaacgtacggaggtggaattctccctggccatgcacgatggtctgtttcagttccttcgattgttcgatgacccaagtcggatcttcctcacgcatacggttcaagatggccatcatcttttccgtatcggcctcgttcaccggcttgatggcgcgtgaatatttagaattcggatatttgataaaattaaaccggttctcggcacctttaccgttcagtgtatttccggtatgaacatctttcagcttcaccgtacagccaatgtcacctgccaccatctcttctactttgatacggttggcaccggcgcaagcataaatctgcgccacacgttctttcgaaccgcgatcggcattggtaaagtcgtctccttcatgcacttttccgctcatgaccttgaaatactgaacgtcaccaatgtgtggttccacaccggtcttgaagaaatacaaagaggtaggtccgttgggatcgggttccaccacttcaccacgggtattatgcactttcggcatttccgatacaccgggcactacattacccaggaattccatcaaacgacgtacccccatatctttgcctgcacatacgcagaatacggggaacatgccgcgtgcagccagacccttacggataccttcgcgcatctcgtcttccgtcagtgaatcttgttcgaagaatttctccatcaagccttcatcgttctcggcagcggcctcgaccagtgctttgtgcagctccatggctttatctttctcttcagcaggaatttcttcgatgataggtgcaccgccttcgggtgcccaagagtacttcttcatcaacagcacgtctatcagcgagttgaagttgggaccggtagccagcggatactgaaccggaactactttgggaccgtagatggacttcagttgttcaagcaccatatcataatcacacttctcgttatcgagctgattcaccaggaagatcaccggtttacccagtttctcggtatagcggaagtggttttgagttcccacttcggctccatattgtccgttcaacagcaaaattgctgtatccgttacattgagtgctgtcatggcagcgcctacaaagtcatcgctgcccgggcagtctatgatgttcagtttcttcccgttccattctacatggaagatggtcgaaaagacagaatatccatattcctgttctaccggaaagtaatcgcttacggtgtttttggcagtgattctgccgcgacgttttataataccactctcatagagcagcgcttctgtgagagtggtttttcctgagccgtcattgccaagaagggcaatgttcttaatttcgttcgtctgatatactttcatgatatataagatttaaatgaatgattcagtatgtgtttttcgcataccctttttttactgaggcgcaaattaggcattaatcaaatgaaaagcaataaaacggacagtgttactaaacaatgttatgtaacatacagccttcgacaagcgcgaaacaggctatctgacagaatggaagtattctttccgattcccgattaaaaagagcagtttgccttacatttactgactccttcttcttccggacaggatgaaatagaatgcagcagcagacttttcggtgcaagacggaggtttttccaaccaaagaagggggcatttcgggttgaacacggtgcattttcccaaaaagaagcaaacattctgtgcaaaagaagtaagcatttccggaaaatgcttacttctttcgggtaagatgtctatatgttttgcctcctcacatatattgttatgtgcagaaccccgcaccggtgcttttttttctccggttgccccgcagaagcatacggagagaatatagcaaaagcatcgggacagagacagaacgaaagcaaattcatcggattcagccccaagtccgtccatttgcacacatataccataaatctgtgacacaggagaaaagtctgttggcaaatgcaggcgtttttccggccaaccttcaggacggcacgaaacgaaagcattctgaggccatcggattatcagattgtcaaatggtcaaaaaggaactttcctcccgttaaataaaagagaatatctaccctacagggttgtttactaacacgaaaaccttacttttgcaatttgaaacgcaaaaataactcagaccatcatggcaggcatatacatacacgtccccttctgtaagacacgctgtatctattgcgatttttactcaacgacgcgaagcgaatggaaaggacgctacatcgaagcactctgcaaagagctggaaatgagatatacttacctgaaaggaaagcctattgagacgctctactttggtggaggtactccttcgcagctcgacgaaaaggatttccggaaagtattcgacaccgtccgccgggtttatgggatggagaattgccatgaaataacacttgaagccaatccggatgacctctgtccggaatacctgcaaatgctctccgaattgccgttcaaccgcatcagcatgggcatccagacatttgacgacactacgctcaagttgctgaaacgccgccacaatgcggctcaagccattcgtgcggtagagttgtgccgtgcccacggtttccgcaacatcagcatcgacctgatctacgggctccccggtgaaacaacggaacgctgggaaaaagacttgcaacaggctattgccctagacgtggaacatatatcggcttatcacttgatttacgaagaaggtactcccatttataaaatgttgcaaaagcatcaggtcgaagaggtggacgaggacagcagcgtccggttctttaccttattaatagaccggttgtgtgaagccggatacgagcattatgaaatatccaacttctgcaagccgggcatgtattcgcgccacaacacttcgtactggcagggagtaagttatctcggctgcggcccgtcggcacactctttcgatggacaaacccgggaatggaactgctcttcgatcgaaaaatacatgtccggcattgaaagcggacaacgggacttcgaacgggaagagcgggatctggccacccgatacaacgaatttatcattacctctgtccgcactcaatggggaatttcactcgaacgcctcagtaatgattacggaacgcaactggagcagtattgtctcaaaatggcacgtccttctttagaaaacggcaaattagaaatatacgaaggtgctttgcgcctcacccgcgaaggaatttttatttccgacagcatcatgagcgacctgctctgggtggaaaactaaaattataaagtcatgaccgaatcagaggttcgaaaattactcagacgaatgaaggagctggattcgcaaacagcgttccgggccttctacgatatgacgtacgaccgtctctaccgcatcgcctactactatgtaaaacgcgaagaatggtctcaggaaatcgtactcgatgtgttcctgaaactctgggaacagcgcagctcgcttcccgaagtcaaaagcattgaggactattgcttcatattggttaaaaacgcttcactcaactatctggagaaagaaaacaggcgtaccacggtatctaccgagacattgccggaacccgaagcacaaagcgactcacccgaagaatcgatgatcagtgaagagttgtttgccatttatgtgaaagcactcgaccgcttgcccgaacgttgtagagaggtattcatccgcatccgggaagagaagcaaagctatgcacaggtagcagaagaactgggtatcagcaccaagaccgtagacgctcaactccagaaggcaaccatccggctgaaagaagcaatatcgatggtgaataatgatcgataaacaatcgacagtgaataatgcccggcgaacagcaagagaggtttaacttttatttgcacacttccgatagggagattcttcaaacgctctgtctttatccatgaagttcatttaaaccaaaacacaaagacttagcttatgaagaagttattacgacctacaacctttgcactgcttacaatggcactgtgtttcactgcgtgtgagaacggcaacaactcttaccccaaagaatacctgggattcgaaaagaaagcgcaggatttctcttatcaaaagaatgcagaggaaacggaactgcaagtaaaaattgttgcggctgataaaacaagtgaagaccggattgtcttcatcgagtcgcccgcacggccgacgaagcccggaagctcttcggcaccgttttataaaattaaagataataaaatcaccatcaagggcggcagcaaatctgccaaagccacaatcctggtttatccccggaaagtgggaacgaatgaatacattcagcttatctgccggcctcagaacggaaagtcggaaacgaccaagatgtctatccggctggtgaaaaaataacgaaataaacaatgaaatatacagaccgggaacttgaccgattactggagaaacttatcgcatccacccgctcgcccagaggaaaattttcggcagcggcaagctatcagatattagagaaacgattgccgcgtccggcacttcgcctcttctctttacgcaccttgtcggcagtagctgccatcgctttgctctgcttcataggatggaacacttactgctatctgaaacctgccgccctacagacaatttccacactggccgatacgcggaccatcaaactgcccgacggaacggaagtgacgctgaaccatttctcgtcactcacctatcccgaaaagtttaagggagaacacagggaagtgaacctgaaaggagaagcgtatttcgaagtgacgaaaaataggaaacactctttcatcgtacagacagagtcggtcaatgtagaggtactgggcactcactttaacgtagagtcctatccggacgatccggaagtgaagaccacgctactcgaaggttctgtagccgtgagcaataaaagcaattctgtacgtatcgtcttgaaaccaaacgaaagtgctatatataataaggagaaaaaaagcatgacccttgaagtttcagaccgcgttgccgaagagatagcctggcggaacggagaattgatttttaccaatctccccttgcaggagattgcccgccagttgtccaacacatttggcgtagatatctccataacagacactgctttgcagaattaccggatcacggcacggttctccagtgaagaaggtctcgaccagattctcgatctgctacatactgttggcaatttcaactattcatacaataataaagaaataacgattactactaaacttaactagacatgagaaaatccaatccggatttccaccacatcagaagttacattctgatgtgtgtggtttccctaaccttttcgacaatctatgcgcaaacaccggaacccaagctcacactcaaactgcaaaacaccagcttgtcagaagtcatccggcagatagaacaggataccggtttctcttttatctatggagaggaggtgaagctcgaccataaagtcagcctcaacgtacaaaagaaacctctcagagaagtcctgaacctgctattcgccaataagccgataagctataaaataaccgggaagcatatcttattacaaaaaacgccccccaaacccgtaagccggaagttcactgtcagtggatacgtgaccgacggagcgtctgccgaaacgctgattggtgcaaatattcttgagagtcgtcatcatcagggaactaccaccaatccttacggtttctacagcatcacgctgcctgaaggagaagctcggctgagtttctcctatttgggatataccggccagcaacatgtgctgaacttaaccgcagatactctactgaacatccggatgaaagacaacaatatgctgcaagaagtagtcatcgtgtcggacaaagccgaatcgggagtcatggccacccagatgggagccagcgaaataccgatgacccagataaaaaacacacccagcatcctgggagaagccgatgtgatgaaagccatccagctgatgccaggcgtacaagccggaatggaaggctctgccggactctatgtacgcggcggaggccccgaccagaacctgatccttctggacggagtaccggtatacaacgtagaccatttattgggcttcttctccgtctttacacccgaagccgtgaagaaagtgacacttttcaaaagctccttccccgcccgctttggcggacgcctctcttccgttatcgatgtgcgcaccaacgatggcgacatgaagaactatcacggagtggtcagcgtggggcttctgaccagcaaaatcaatttcgagggaccgatcataaagaaccggacttcgttcaacatttccgcccgccgttcgtacatcgacctgctggccaaacccttcatgcccaaagacgagaaatacagttattacttttttgatgtcaatgccaagatcaaccataagttctctgatcgcagtcgcctgttcctcagtgcatacaatggcaaagaccattttatgacaaagtatgacgacacttactacggtgacgaagacaagtacagggatggcggaaagatgaactggggaaataccatcgtttcgggacgctggaactacatctttaacaacaagctgttcagcaataccacagtcgctttcaataactataagtttgacgtcagtacattcaccaagaatgagatacatacaaacaaccaaatcacctggaaccgctataaggccgattataaatcgggaatccgggattggagcgctcagatagattttgactataaccctatccccacacatcatgtcaagttcggagtgcaatatctgcaccatagcttccgtccggaagtctccacctcgaagatattcgacaagaccggagaaaccatcgagcgggacacgacgtattatactacctccaacagtgagatccttgcccacgaagcatctgcctatcttgaagataacttcaatctgagcagtcgcctgcgtatgaatctgggcctgcacttctcgactttccaagtgcaaaagaaaaactacttctccgtgcagccccgcatctccgcacgctatcagctcagcaaagatgtagtattgaaagcttcgtatacgaaaatgagccaatatgtacacttgatttcatccatgccttttgccatgcccaccgacttatgggtacctgtcaccagcaaaatcaaacccatgcaggcccatcaggtctcgttaggcggttactatacgggaatcgacggatgggaattctcaatagaaggatactataaaggaatgaaaaatgtactcgagtacaaagacggtgtcagctttctcggttcttctaccggatgggaggacaaagtggagatgggacacggccgctctatgggtgtagagttcatggcgcagaaaaccataggaaagacaacgggatggctggcatataccctggctaagagtgaccgtaagtttgccacaggaggaataaacaacggcgaacgctttccatataaatatgaccgccgacacaacatcgacctgacactcaatcatcggttcaacgaacggatcgatgtaagtgcttcctggatatttaccaccggaggtacgacaacgatccccaccgaactgacaggtattatccgtccgggcgacaacgactcatcgatagaagagggagactacgtcaagcatcgcaacaattatcgcctccccgccacccaccggttaaatgtaggggtcaacttcagcaagaagactaaacatggcatgcgcatctggaatgtcagcatatataatgtatacaatgccatgaaccccactctgatatatcgcacctacaaaaagactgaatatactcaaggcgaacaagcacaaggcaaccgcataccggtcattcggaaattcactctgttgccttgcattccttcattcagttatacatataaattctaagtatttatgagacgatcaattcttgatatattccttttcttgctggttatcatatccactgcggcatgcaataacgatcttcctttcgacttgaaggagaatccgcccaagttagtgatgaatgccattatcaacgccgacagcacctacaataccttgtttctgaacctcaccggcagaaacaagatcggacaaataaaaggagccaccgtagaagtacgcatcaacggttctctcagtgaaactctccgtcccgatccgcatagcagcgataaagggcgcttttatataaacagtgctttccatccgggcgatgtggtccgtatagatgctatgacggatgacggcgaacaccacgcatgggccgaagtcaccgtacctcaacccatcgggaagatagaaaaagtggatacggcctccatcatgagaaagccgagtaactatggctacggaactccgccaagacgacatctccgttaccaaatcaaaatcaaggaccgcccgggagagaagaatttttatcggatcattgtggaacaacggaaatactggaaatactattgggaacaaaatgaccagacctgttgggattcggcaatgcagaaaagctttaaactgcaaacaaacgaagacgtggtgttgaccgacggcaaacccagtacggaagaagatgatgaaaacggactgttcggcactgtcaataacaagtatgccatatttgacgactcacgtttcaccgacggaagttatacgatgaacgtctataacgatatctacggatggggattctggggacaggagtatatctggataaagacggatgtctacatccgcatactcagcattaccgaaaaagaatattattatttaagagcgttgaatctgctcgactccgatgcctacgacaacaccctgagcgagcctatcgctttcccaagcaatgtgaacggaggtaccggaatggtagggttcagtacagaaacaaactatatgctgacagttaaaaacaacgcagttcccccaatggtaccggatttataaagaaaccactatctttgtgccctaaaagcacatttatatgtttataattatcggaatcatgctcacgggcatgctactgggttacctgttacgtagcaaaaggctcacgtggatacataaagtcatcacattattaatatggctgttgctcttcctgctcggcatcgatgtaggaggcaacgaagccatcgtgaaaggattgcatgccatcgggctggaagctctcatcatcacggcagctgccgtaaccggaagcacactggctgcctggggactttggtatctgctccatacacgctatcagaaaaaggaggctaaaccatgaaaggcagtctcattatcgtctctttcttcattgtcggcactctgtgcggactttttcagctgatcccgtacgatttcagccaaagtaaactcagtttttatgccttatgcgggctgatgttctgcgtcggcattagcataggcaacgatccgcagacactgaaaagtttccggtcactgaatccccgcctactcttcctgcccgtcatgaccattctgggaacattggctggatgtgccgtagtcagcctctttttgtcccatcgttcaccgtccgattgtatggcggtaggttccggattcgggtattattcactctcaagtatattcatcaccgagtacaaaggagccgaattgggtaccatcgcattgctttcaaacatcatgcgcgaaatcatcgctttgctttgtgcccccctattggtaaagttcttcggaaaactagcacccatttcagtcggaggagccaccaccatggacacgactcttcccattatcacccgttgttccggacaggaatttgtcatcgtctccattttccatggattcattgtagactttagcgtaccgtttctggtgacattattctgttccatataggcatcatattacaaaacgatttcatttttctctaatatcccatcttttttacagcatatttttgatatacatcaagaaatgatatcattctgcccacttttctttctttgcgcttttatgttgaataacatatttgtatatttgcataggtaaaaagaaaaagctaagcgcttagcaattgtttttaataggtattagggtccttatgacaaggataaggacaaagattagttttcaggaataacaattaaaaaagtaggtattatgaaaagattaggattaacattagtggcagcgctatgccttgttgctactacatttgcagcaggcaatcaacctacagttgcaaaatgggaaggtaacatcaatgtgaataaattgggtaaatacctgaatttatcttctgtacaggcagaagaagtagccaacatttgcaactattttgacgaacagatgggaagagccaccactgcgaaaaagaacaaggataccatggttcgtaacgctgtttacggcaatctgaaattgatgaaaaagacgttgacagatgctcagtacactaagtatactacaatattgaacatgactttgaagaacaaaggcatcgaagtaaagtaggaacttgattgatgaataaaaggagaaaagaccggtgtcgtcgaatgaactgacatcggtcttttatttttatgccaatcactgacagccgcgaagatggttaacactgatgtttccggttaaatcagtaattcctcctaagccagatattgaaaagtctatcatacacctgatatcctccagactcctgagtcaacatgtctttttccagtaaacccttcaaccccgactgcaccgaactggcagaagtcaaccgatattttttaataaatgcagcagaagtaactccttttgctttctgctctttggcaatggcaatcattatctctttttgcttttccggaagacgagaaaatatttcttgaaaagtaaagtcttgtgtagcaattatattgtttagtgccagatttatcataggtacatcacagataccctttttatctgtcaaaataaaaagttcattcaacattaactgcacataccaagtgtgcccatcaaacagggtatatacattctctaccaattgatctgtcactttcttaccattctcctcaaacaatcccttcacaaaaggtttatatacctccaaaggaattgctcctaagtgcatcatactcacgctttgataaaatggcctggaaggactgttgaatatattcatcattatatgcctctgacttcctgcaaaaacaaaattagagttactgcaatgctgaactttagtccttaaaatagcttccagatttttctccggatatgaactgatttgctgaaattcatctattgctacaatacaaggcttgtctgcctgctccagatagataaagatttcttctaaagtagtttcaggagcatgaatatctcccaaaccaagttctaaaatcggttctcctgtaatactatctaatttaaatccaatccttaaagaggtaattatagaaaagaaacgatctatgaatttattcccctggggctttaacttctcaaaaatccctttacccaaagcaaaaacaaactctttcaaacttgaagtcgcatatatatcaatgaagaaagtataatagccttctttaatcaaaggctgataaaaacaatgccttatcaatcccgtttttcccattcggcgagttgaaacaagagccacatttctcccatttatcaagttacggatcaagttttctgtttcagcaactctatcacaaaaataacgaggagaaacgtatcctccaactacaaaaggattaataaccgccataactaaaattattatatttataattattgcaaatataataattatcttttaggtaaaagatgcaagtgaaaatatttgcgcataagaccaatatatattccactcagcaaaaggatacagcccaataaataccaatcaccataaccccggcaatataaatacccaataataatcacaatttgcacaatcatatacaccaacgataccaccacgtgcggtattctcaattcattaaccatgatctgatacaaatgtttccggtgaggcaaaccaatattttcatgtagcaacaaccggtgtatgattgtcaacacactatccactccatatacagtaagcatcacaagccagctgaaatctttcgtttgaagaatcaaactcccgatcaggaacagactttgttttaacacagtgttaaagcttgttctttggatgcaaataacaagtgttttaaatgcaaaaggcttgttatttgcacacaagaataaaatgaacggaaattgacgttaacattgttaaacagccggttttcccatataatttagctcaacaatactccctcttaaaccaacgttcgaatacaggatcagaaaacacatacagttccccctccttctcaataaaatcacgctcggtcagcatgcgtttgttgcaggtgatggtttgcgcgcttcccaattcatatttccgcactacaggaatagaattgaagcggtattcaccattggctacggcacgcaacatggctgtttacgcagtgatcagattttcagtatcattcatgcacataggcatatcggtatctatcaattgccgggtacgcatttcaatggtttccgaacctgttcatcttcatgcatcaattcgtccatcgctactttgacaagtgaagactttccccaacgacgtggagagatgagaacaaagacacaaattatacatcaacgtataatacatcgatgtataattttaaagattatctatttcaaaaacaggcatagaagcatcatttaatggtcaccatggttgctccgaaaccatattcctgaaatgaagcatcctgatagcggcaattactatattttcgctttaattcatcaatcaatgctttacgaagcactccgtcacctttaccatgaatgaaaactattttttgttcacgtttggctttgtacttctccatcacttcacggaatttatccaactgataattcagtatctcggcattccccatgccacgtgtgtcatccagcaattcgttgatgtgcaagtctatctcaagaatctcattctttccgccacgtttcacaatcggttgtgacttaggcttatccacttccttcttctggatcaatacagactgcagttcctcagccgaaacaaatacctgacgggtaggaacatcgtctttcacaatatcataaaccaaagccggctgttcaaagaagtccgactcacggaatgtatgcagtttatagaacttcaccgtatcgatacgcaactccacacaaactgcaggtttcaaaggtgctgtccgtccatctttaaaagcaatgaactgaacggccacatgctccatttcattcagcatatccttagtaaactcttccagcaaaaacttcgtattgggttccaccagtccatgcgaacgggttttccaggcctttccttcggcactctgatacgtataatacaaataataattgctgtcatttaccaaataagcctcaaacgaagtactgctgatagctttcacgtcttcaggcacataagccagaaaaacatttaaaacatcaccaccccgcacttcggccgaacgaactgccggaatctcaggctttaccggtttgacgggttcttcgggtttctttggcgcaggagcagccttccgggtcatattataatcatccgtatcgatcaccacacactcgcgtatctgcatcgggatatcaaatccatcagcatcttccaccaatacaatatcttttccccggaatccttttacgattcctccgcccacctcactgaggaagcgcactttatcacctattttcattgttctgtttacaatttaccatttacaatctacaaattaaggcaaatataactacttttgtcgtcgcaaagaaagaaatgatgaaagaaaacccgaaacatatccgtattagcgaatacaattatccattgccggatgaacgcatcgctaaattcccgttgcctgtacgcgaccagtctaagttactcatttatcgtcatggcgaggtcagtgaagatgtatttacctctctaccggaatatttgccagccggaagcctgatgatattcaacaacaccaaagtgattcaggcacggctccatttccgcaaagagacaggagcactcatcgaggtattttgcctggagcccattcaacccaatgactacgtactcaactttcagcaaacggaacatgccgcctggctttgcatggtaggcaatctgaaaaagtggaaagacggtccgctatgtcgtgaaatgactgtaaaaggattcccgatcacgttgaccgccacccgtggtgaatgtcgtggcaccagtcattggatcgatttccggtgggacaatccggaagtaacatttgccgatattctcgaagtgttcggtgagctacctatccctccctacctcaaccgggatacggaagaaagtgataaggagacctatcagacagtctattcaaaaataaaaggctcggtggccgctcctacggcaggtttacatttcacccctcgtgtactggatgccctgaccgaaaaagggatcgacctcgaggaactgactctccatgttggcgccggtacttttaaaccggtaaaaagtgaagagatagaggggcacgaaatgcatacggaatatatatccgtatcacgcagtattatcaaaaagctgatagaccacgacgcttgtgccactgccgtaggaacaacttctgtgcgtacccttgaaagcctctaccacatcggcgtaacactggctaacaatccggaagctacagaagagcaattgcacgtaaagcagtggcaaccttacgaaacggaatgtgatgttcgccccgtagtagccttacagaaaatattaggttatctcgaccgacatggaatggagacactgcataccagtacacagatcattattgctccgggatatgactataagatagtcaaggcaatggttaccaattttcatcagccacagagcactctgctattattggtttcggcatttgtgaaaggcaactggcataccatttatgattatgcactcggacacgatttccgctttctgagttatggagattcatctttattaataccttaaaacatgcaaagcgataataatcaggaaatgttccccatcgtagacgaacagggaactattacaggaactgctacacgcggcgaatgtcatagcggaagcaagctattgcatccggttgtccatctgcacgtattcaactcaaaaggtgaactttacttgcagaagcgccctgaatggaaagatatacagccgggcaaatgggatacttccgtaggcggacacatcgatctgggagagagtgtagaaatagctttaaagagagaggtcgccgaagagctgggtatcacagacttcacaccggaactcctgacaagctatgtctttgagtctgcccgtgaacgggaattagtctttgtgcataaaacggtgtacgacggagaaatacatcccagcgatgaattagatggcggacgtttctggagttatgaagaaatcaaaacgaatttaggaaagggtgtcttcacaccgaactttgaaagtgaaatagataaagtagagattttctcttctacttccccaaaagaggctgtgtagagacacttttcaccacggaacacagagtaacacagagtcttttttttgttaataatcaacaatttaaaattgccactgtgttactctgtatcttctgtgatgagttttaacaccttaaattacttttcttctatccaactgattatcgtctctgaaaaaggactctctttgggagctacaaaaccaacccaatttccattctcatcaatcataaacttctgaaaattccactgtaccggcgcatcttgctttccgttcagcttcttctctgtcaaccagtggtaaagcggagccatatctttaccctttaccgatatcttggccattatcgggaaggtaacatcatagttcaccgaacaaaatttggcgatctcttcgtttgtccccggctcttgtcccatgaagttattggcaggaaagccgataatcacaaaattctgatctttatactgatcatacaactcctgcaactctgcatattgcggagtcagtccacacttggaggcgacattcactaccagcaccttcttacctttcagacctgacagtggatactctttgccatctatggtcttcactgtgaagtcatagaatgatttattctgagcagccatcgacagtgaaagtaccaaggctgctacgaaagaaaaaaatgctttcatatcttattatttggtttatcaaataattaacaagcagccccggcagaatgtttgaaagcagcctattcttcagacatggaataaggtttagcttctttggcaagccccctctttttattcggagaagcagccatatcaaactcaagtgttcctcctgccaaaaggtcggcatgagtaatatacatcttatcgtaaacctttccgttcagcttcacctgccggacatagcaattacgatcgctcacctttggcgcttttatttcgaaagtgcagccattgggcagattcatacggatatacggcagataaggtgctcccaatacatattggtcagtacccgggcaaaccggataaaatcccattgccgtaaaaagataccaggcagacatctggccgcaatcgtcattgccgcccaggccgtcaatatcatttttatacatccggttcatgaccgtccgcagccagtattgcgtcttccagggttgggaagtccaagcatacagatacggaatgtgatgactgggctcattgccatgtacataccctcccaccaaacttacttcagcaatatcttcattcttttcgtaatatttgcggggaagtgccattgagaacagtgtatccaaccgactgacaaacttcttctcacctcccatcaaacgaatcaatcctgccacatcatggggcacgtggaaagagaaattccatgaatttccctctataaatccttccccgtaagtctgcattgcatcaaattccttcctgaactctccgttgctataacggggacgggcaaaaccaaccgaagtgtcgaaaacattccggtaattattcgcccttttcttataaagatcggccaactggtcgtctcccgccaacagagctgtccggtaaatagtccaatcgtcataggcatattccaatgtagtggaagcagccgtcccactttgatcgaaaggtacataacccaatcttttataagcttcaactccttcgtaataaggaacattagctgtatggtccattgccatcaaagcctccccgacagatatatccgctcctttggcaaccgcatcagccaaagcagacactgcatgataaccgctcatacaccagccttcattgcccatcaggctccaaaccggcaacatgccatgtacactttgctgctgatgacggatcatagactgcaccatgtccgtattctgccggggttttagcaagttcaagaaagggtgctccgcacgatatgtatcccataatgagaagatagtataattggtaaatccttcggaagtatggatattatgatcgagtccacgataccgaccgtctacatccatataaacggacgggttaatcatggtatgatacaatgaagtataaaacatggccaactgatcgggagttcctttggcttcgagtacatccaactcacgattccatgcagaatttgcctcggcaaccaattgattgaaagtttttccggcagcctctgcctgtaaattctttactgcaccttctgtgctcacagccgaaagagcgacttttatcactagctccggattctgccgggtatcgaaattaaagtaagccaccagcttccgaccggtcatttccggaaaattacggtcggtattaaaccgtcgccaaaaacctttatacagagctttccctttatccgtatacccataatccttgatgggctgagacaaagagatggcaaaatatgtgtaattggtacgtgcccatccgttcgttatacgatagcccgtcagtaatgtgtcattttccacacgtaaattagcccatagagtttttccatcatagttgtagattccgtgtatcaggtcaaggatgatgtgtccgtccgcattatcgggaaaagtatatttatgtattcctacccgttgagtagctgtcagttgtgcctttatgccataatcagcaagctccacttcataataccccggacgagcaacctctgtgtcatgactgaaacgggagcggtatccctcatcaggagtaccggctcttccgggattcaacttcagttgacctgtggcgggcataatcaaaatatcacccagatccgaatgtcccgtaccactcagatgggtatggctgaatcccacaattgtcggatcatgatactgatatccggcacaatattcatacgcatttttttgataagttccatctatgttgtgaggaatcgtatctgtatccggacttaactgtacaagtccgaacggagcacaagcaccgggaaatgtatgccccataccattggttccgatgatcgggttgacaaatgcacatacatccggcacttctgccgtctgctgggccatcactgtcgtaaatgccggaaggaatgccagcaaggaaagtacttttttcttcataatcttatctttgtgatgtgttgttgatatgcaaagatagtttttttcagctattccaattcacttcatctccacattttgacatttcaccagtcaatctttccaactcacagttttctgttaacaataaatatcccggcaacttacctttgtatcgacattcaaacacttaaagactatgtttaaagccattgtacgtttttccataaaaaagaaattatttgtaggacttactacactcttccttcttatcggaggcatatatgcaatgttgactctgccgatcgatgccgtaccggacatcaccaacaatcaggtacagatcgtaacagtctctcccacacttgcccctcaggaagtagaacaattaatcacgatgcccatcgaaattgccatgagcaatatcatgaacgtggaagatattcgttcggtaagtcgcttcggactgtcggtggtaacagtcgtatttaaagaaagcgtaccgaccctcgatgctcggcagttaattaacgaacagattcaatcggtagccggagaaattccaccggaactgggcatgccggaaatgatgcccatcactaccggattgggagaaatctatcagtacatcctgaaagtagaacccggctacgaagataaatatgacgccatggaactacgcaccattcaagactggatggtgaaacgtcagttatccggtataccgggtattgtagaaatcaacagttttggcggctatctgaagcaatatgaagtagccgttgacccggatgcccttttttcattgaacatcaccatcggtgaagtattcgaggcgctgagtaaaaacaaccagaacaccggagggagctacatcgaaaaagccaaaaacgcttattacatccgttcggagggcatgatcagccgcactaaagatatcgagcagattgtggttgccaaccgcaacggcatcccggtacacatcagcgatgtgggcattgtccgttttggagcacccaaacgttttggagcaatgaccaaagacggaaaaggcgaatgtgtgggaggtatcgccatgatgttgaaaggggccaatgccaatgtagtcacacaagagctggaaaaacgggtagaaaagatacagaaactattacccgaaggagtaagcatagagccgtatctgaaccgctcggaactggtaaaccggaatatctctaccgtagtgcacaacctgattgaaggagctattatcgtatttgtggtacttatcatctttttgggcaacatacgtgccggacttatcgtagcttcagtcattccgctggctatgctgttcgcattcatccttatgcgtattttcggagtgacagccaacctgatgagcctcggcgctattgatttcggtatcgtagtagacggttccatcgtgatagtagaaggcatacttgcccacctatacagcaataaactgaaaggacgcactttatcgggaaccgaaatggacgaagaagtggagaaaggtgcttcgggtgtagtacgttcggctacattcgccgtattcatcatcctgatcgtattcttccctatactgacactgagcggaatcgaaggaaaatatttcactccgatggcaaagacattggtattctgcattatcggggcactgcttctctccctgacttatgtacccatgatggcttctctttttttaaaacacaccattatggtaaaacctacatttgcggaccgtttctttgaaaaactcaatgtcatatatcaacggtgcctgcatttctgcctccgcttcaaatggcaaacagttaccgtggccttcgctactttaattggttcttttctgcttttcggacgactgggagctgaatttatccctactttggacgaaggggactttgccatgcaaatgacattaccggccggcagctcactttcggagagcatcgaagtttccaatcaggccgaaaaattattgatggaccggttcccggaaatcaaacatgtcgtcgccaagataggtacagccgaggtacccaccgatccaatggcagtagaagatgccgatgtaatgattgtgatgaaaccctttaaagagtggacctctgcatcgagccgggcggaaatggtagaaaaaatgaaagaagccctccagcccctggaaaatcgtgcagagttcaacttctcacaacccattcagttacgtttcaatgaactgatgaccggagccaaagccgatatagctgtcaagttatatggtgaggatactcacgaactttacgcaaaggcgaaagaagccgcccgcttcgtcgaacaagtttcgggggcttccgatgtcattgtcgaacagactatgggactgccccaactggtagtgaaatacaaccgcggaaaaatagcccgatacggcattaatatcgaagaattgaatacaatgatccgtacagcctatgcaggtgaagtaagtggcgtcgtattcgaaaatgaaagaagattcgatttagtagtacgccttgatcaggaaaaagtggcggacctcaacctcgacaagctcttcatacgcacttcggaaggcatacagattcctgtcagcgaagtggcaagcatcgacttggtgaacggaccgctccagattaaccgcgacgccaccaaacgccgcatcgtaatcggagtcaacgtacgtgatgccgatattcagcaggtagtatcagaaatacaacagatactggataagaatatcaagttacaacccggatattactttgaatacggaggacaatttgaaaatttacagaatgccatccgtacactaaccattgtaataccggtagccttgatgctgattctgctgattctgttcttcgccttcaagaatgtgacctatacactgatggtattctctacagtaccattatcactgataggcggcattctggcactctggttacgcggacttccgttcagtatctcagcaggagtaggattcatcgctttgtttggcgtagcggtactaaatgggatcctgatgatcaatcacttcaacgatttaagaaaacaaaataaatatgccatgaccaccaatcagattataaaaagagggacaccccacctgctacgtccggtatttctcaccggactggtagcctcactgggcttcgtaccaatggccatcgccacatctgccggagcagaagtacaacgccctctggcaacagttgtaatcggaggattgattctatccactatattaacgttgattatccttccggtcttttataaaatagtcaatgcggcaagtgccggttggaaacagcctaagagacggttgcatctgttcatcctgctaccgacacttctgctgagtgccaccgccacggcacaggccccacaaaccgtcagcctggaacaagcgatagagatagccaagcaaaaccacccaagactgaagatagccacaacggccatccggcaggcacaagccggacggggagaaattgtagaagcaactccctccacattcaactattcgtggggacagttgaatggtgaaaataagaaagacaaggaaatggctttcgaacagagtctgggttcattgttgacgccgttttacaaaaatgtacttatcaaccgacaggtacaaacaagcacttactaccgccaaatggtcgaaaaggagattacggcagaagtaaagcgcgcatgggcctattatcagtatgcctccgggatgtcttcactctatcacgaccaagaccggatggctgccgaattaaggcgtatcggtgagttgagatacgaacagggagaaatcaccttattggagaaaaacatgatgactacactggcagccgatttacacaatcgactcttccaggcactagaagagaaaaaagtagctttggcccgctttcaatggagttgttatgcagatgacccgattacaccgaaagatacgatgatgacactcttccccaccgattgtgagcagagaagtacctccgaagctcatctcggattcttcaatagccaagcttccgaagcacgggcaatcttgaatgtagaacgcagccgtttctttccggaattaagtatcggatacagccgccaggatattttgccactgaaaaatctaaatgcctggatggtgggtgtatccttcccgatctacttcctgccacaaaaaagtcggatcaaacaagcgaaattagcagtttcggcggcacaaatacaggccgaagccaacatccgagaattgaacaataaaataacagagttgagtactgccttgcgacgttacgaagaaagtctccggttctatacttcgtcggcactcaaagaggcagacgaactggtcaaaacagccaacttacaattacaacacagcgaaaccggtattgcggaatttatccagtcggtcagtgctgcccgtgaaatacgcaaaggctatatcgaaactatatatcaatacaacatagcttctttagaatacgaactttatcaataacctattgaaacataaaaaaaaatgaaaaaaatattttatccggtcctcttattggttcttgcggcatgcaaaaaacctgaacagacatccgaaaccatagttccggctcctgctattgccgacatcccgaccgatactgttacgacccaagtagacggaataacatcggctacttcaaagcccaatcaagtatctttcaacggcaccattgtattgcctccccaacgtcaagctacggtggccctcactatgggaggagtagtgaaacacacctcactcttaccagggcaacaagtacggcaaggtgccctgctggcaacactcgagaatcccgacttcatcgcactgcaacaaacctatctcgacagccatgcccaagcagaatatctgcaggccgaatatgaacggcaaaaaactctctcgaccgaacaagccgcttcgcaaaagaagtttcaacagagcaaagcagactatctgtcaatgaaaagcaagctggaagctacggcagcacagcttaccctattgggcatcgtcccggaagagttgctgaaaagcggcattcagcccttgctacaggtaaaggctcccatcagtggttatatcagcgatgtagcgatgaatatcggtaaatacatccaaccgggtgaagcactttgtgaggtcatcgacaaatcagcccccctgctttgcctgacaacttatgaaaaagacctagcagatatgaaagtaggtagtcccgtccagtttcgggtcaacggtatgggcaaaacagtgttcaaagctaccttggtctccatcggtcagaaggtggatgaggtaagccgttcgctcgaagtatatgcccgtatcgatgatgtcaaccaacagtttcgtcccggcatgtatgtaacggcgagaatacagaaataatccggtgtattgtcttatctttgtccccatgaaacgaatccgagctatatacaacgataaatacctcctatccaccctcatcatctcactggcagtggcggtgcttatccattttcccgaatcagtctctctttttgacggatttgagagtcataccctttttcccgggatgaaattcgctgatgtagccaacgagatcctctttacctttttgtcattgctgattctgtttgcagtcaacacccgactgtttcatttcaatcagacctcaatgaaaatcacatggcaaaagattattctctcttttgtactaacctggatattaagcaatttcctgggacaatgctttgtatatttgcacaagacatttgatattcccgctatagatgccatggtgcaccactacctgcatccattacgcgatttcattatgtctagcctggtgaccagcagttgctatatcatctacctgattcgtcgccaacaacaagtaattgttgaaaacgaacaattaaaggcagaaaacatacgcaaccagttcgaagtgctgaaaaaccaactgaacccacacatgcttttcaattcgctcaatacgctgcgttcgctcgttcgtgaaaatcaagaccgggcacaagattacatccaggagctgtcacacgtactacgatacacattgcaaggcaacgagtcgcaatgcgtcactctacgtgaagaaatggactttgtgtcagcctacatctttctccttaaaatgcgttttgaagataatctgcgattcgagatcaatataactcataattccgaagagtatttgcttcctcccatgtccatacagatgctgattgaaaatgccgtaaagcataatgaaatcagcaaccgccgtcctcttaccatcacaatcgcgaccgattcggaagaaggactcctggtaagcaatcccatacagtctaaactgacagctacaaccggtaccggcattgggctggtcaatctcgacaaacgctatcgcctcttgttccgacaagaaatacaaatcacagaagacagaaacttcaccgttcgtatacccctcatccggaaagacctatgaaagcaatcatcattgaagacgaaaaagcagcggtacgaaacctgacttcactactcggtgaagtctgcccgcaaatagaaatcgtaacggaactcgacagtatcgccgataccatcgagtggttcaccgatcattcaatgcccgatctggtatttatggatatccacctggcagatgggtcggcatttgagatctttgaacacgtccacatcacctgccccatcattttcactactgcctatgacgaatatgccttacgggctttcaaagtcaacagcatcgattatttactgaaacctatcggaagacaggatatagaacaggcattagaaaaactgaccctgttcagttccggcaattccaaacctaccggtccggaaacaaacgaacttgtgaacctgatgcgtatgttaaaaaagcaggaaagctataaaacccatttcctgattccgataaaaggcgataaactgctccccgtttcggttgatatgatcctgttgttctacatcagagattgccaggtgaaagctgttctgacagacgggacggaatattcattcccacaaaccctcgacgaattgaccgaatgtctggacccgacactctttttccgggccaaccgccaatatctcctttcacgggaagccatcaaggatatagacctctggttcaacagtcgtctttccatcaatcttcgtcattcggtatcaggagagaagattttagtcagtaaagcacgtgtagctgaatttaaagagtggttcagcgttaaataattaaggaataaaaaacaaatattaatgcacgcttgcagaatactcctacaagccgtatctttgtaaccctaattctaaatactcaaatatggctttcaccaacaacgtaatgattgtgcgccacaagttgctggctaaattggtaaatctctggaaagagaacaaattaacgaatgaaattgacagacttcccattgaactgagccctcgccgttcacgcccgctcggacgctgctgtatccacaaagagcgtgctgtatacaaatataaacttttccccttgttgggtttcgatatgacagacgaaactgacgagctcactccactttcggaatacgcacgccaggcgttggaacgtaaaaacaaacagaaagaaaatatactctgcgtcatcgatgaagcttgttcatcttgcgtacaggttaactatgaggtgaccaacctctgccgtggttgtgtagcccgcagttgctatatgaactgccccaaggatgccatccgtttccgaaaaaacggacaggcaaagattgaccacgacgcttgtatcagttgcgggaagtgtcatcaaagctgtccgtaccacgccatcgtattcattccggttccttgcgaagaagcctgtcccgtgaaagctatcagcaaagacgagaacggtatcgaacatattgatgaaagcaaatgtatctactgtggcaagtgcctcaatgcttgtcctttcggagccattttcgagatttcccaggcttttgatgtccttgaaggcatccgtagcggtgaaaagatgatagcgatacctgctccctctatactcggacaattcaacacatccatcgaagcagtatacggagcacttcgccagatgggatttgccgatgtagtcgaagtggcgcagggagctatggacaccgtaagtcacgaagctgccgaactgaaagaaaagctagaggaaggacagccgtttatgacaacctcttgctgcccgtcttacatcgaattagtgaacaagcacataccgggaatgaagccttatgtttcttctacgggatccccgatgtattatgccgcccgcatcgccaaggaacgccacccggatgcaaagatcgtgtttatcggcccgtgtgtggccaaacgtaaagaagcccgtcgcgatgaatgcgtagactatatacttacttttgaggaaatggcttcgatctttgagggactggacatccaacttgaacagacacagccattctcagtactctatacttcggtacgcgaggcacacggttttgctcaggcaggtggtgtaatgggagctattaaggcctacttaggcgaagaggctaagaaattctccgctatccaggtctcggacctgaacaagaaaaacataggcttgctgcgtgctgctgccaaaacaggcaaagcacaaggacagttcattgaagtcatggcctgcgaaggcggatgtatcagcggccccagtgcccataatgacgctatcggtggacgccggcagttgaaccaagaactgataaaacgccgtgaatcatatgaagaaactcatagataaattaagggaggagcgcaccctcacctccgaagagttcgcacacctgttgtcgcactatgatgatgaagccttggcatacatcaatcagcaggcacgggaagtagcgaccgcacacttcggacagggagtctacatacgcggactgatcgaaataagtaattattgccggaataactgcaactattgcggtatccggaaagacaattggcgagccgatcgctaccgactcagtaaggagatgatttgggattgttgcgaacatggctacaaactcggattccgctcattcgttctccagggaggcgaagatccgaaacggtcggacaatgatatggaggagatcattgcggaaatccgccggcgatatcccgaatgtgccatcacgctgtctatcggtgaaaaaccggcgaaagcttacgaacgctattttatgaaaggcgccgatcggtatctgttacgccacgaaacattcaacagagggcattactactgtctgcacccctatgaaatgtccaacgaaagacgtatcaaatgccttcaggaactcaaacgaatcggtttccagaccgggacaggcatcatggtgggaacccctcaccaaagagtggaatttctgatagaggatatacgttttattgaaaacttccaaccggaaatgattggtatcggaccttttatcccccatcagcgaaccccattctgtgacgaaaaagcaggcagtgtagagctgaccttgttactgctctctatcttcaggctgatgcatcccaaggcactgatcccttcgacaactgcgttggcaagcctggcaccggacggcagaatacggggtattcttgccggcgccaatgtggtcatgcccaatctgtcgcctatcattgtaagaaacaaatataacctgtacgaccagaaagtagctttcggtgccgaagcggccgaaggactggccttattggaaaagcaactgacagcggtcggatatcacatcgactacagccggggagattataacaactaatcaacaaaagacatgtataaagtagattcacctgatgctgtcgactttattaaccatcaggaaattattgaaacactggagtatgcccgcgcccatcggaatgaccgggaacttatccgaaatttaatagagaaagcccgcctttgtaaggggctcacccactgggaagccgccatattgctggaatgtgctgaagaagatcttactaaagagatttttcatcttgccaaagagatcaagcaaaaattctatggcaaccgcatcgtcatgtttgctccgctttacttatccaactattgtgtcaatggttgtgtgtactgcccgtatcatctcaaaaataaaaccatcatccgcaaaaagttaactcaggaagagatatgccgggaagttattgccctgcaagatatgggacacaaacgcctggcactcgaagccggtgaagaccctgtgcgtaactcaatcgattatatactcgaatcaatccgtaccatctacagtatccatcataaaaacggagctatccgccgggtaaacgtgaacattgccgccactacggtagagaattatcgcaagctgaaagatgcaggtatcggtacatatatcctctttcaagagacatatcataaagaaaattacgaacagctgcatcccaccggacctaaaagcaactatgcctatcataccgaggccatggaccgtgccatgcaaggaggaatcgatgatgtaggcatgggagtcctgttcggcctgaatacataccgctatgattttgtaggattgctgatgcatgccgaacacttggaagccgtttatggcgtgggaccgcatacgataagcgttccccgcatctgctcggccgataacataaatgccgaagactttgaaaatgccatctctgacgagatcttccaaaagatagtagccgttattcgcatcagcgtaccctacacaggcatgattatttccacacgagaatcgcaaaagacccgtgaaaaagtgcttgacttaggtatatcgcagatcagcggaggatcacggaccagtgtaggcggttatgccgaagcagaaactccggaagagaactccgcccaattcgatgtcagcgacacccggacactggacgaagtggtcaactggttactgaaactgggctatattcccagcttctgtacagcctgttatcgtgccggacgcacgggtgaccggtttatgtcacttgtcaaatcgggacaaatagccaactgctgttcccctaatgcactgataaccttacaggaatatctggaagattatgcctcggaagagacgaaagctcgcggagtagccatgataaagcaagaaatgcaacatatccccaaccctaaaatccgagaacgggctttagaaaacctgaagcaaattgcggcaggagaaaggaacttcaggttttgaaaacgtcgccccgctccaatcgcctgcacattgccttgtttggtaaacgaaacagtggcaagtcgtcattgattaatgcattgaccaatcaaaacgctgctttggtatcggacatcgccggtactactaccgaccctgtatatcaaccgatggaaatacatggtatcggtccgtgtgtattcatcgatacagccggattcgacgatgaaggtgaactgggctccctacgtatcgaacgaaccttacaagctgcggacaaagccgacatcgcactgatggtttgttgcgatacggaactttccgaagagcaacgatggatagagttactgaaagagaggaatatcccctacctgttggtactgaataaagccgatctgttagagaaaccggatgaagtcgccgataaattggaacaacagacaggacaacaccctttaattgtcagtgccaaagaaaaaacgggcatagactcaatccgtcagtctattcttcatcggttaccggaacttaacgagcaaccggatattgtgggagacttggccaacgaaggcgatgtggtactactcgtgatgccacaggatatacaggctcctaaagggcgacttatcctgccacaagtacaaacactgcgcgaacttcttgacaaaaaatgcatcaccttgagctgcacaaccgaccagttggacaatgccctcaaagtcttgtcagctcccccctcattaatcattaccgattcgcaggttttcagaaccgtctacgaaaagaaaccgccacagagccggctaacctccttctcggtattatttgcccgctacaagggagacattgactactataccgaaggagcgtatatcatcgaccaactgacagaaaattcccgggtcctgatagccgaagcctgtactcatgctccactgtccgaagacatcggcagagtgaaacttccacgaatgttgcgcaaacgtatcggagagcaactgcatatcgacattgtttccggaaatgattttcctaaggacctgaattgctacgacctgattattcattgcggagcctgcatgttcaatcgcaaacatgtcctgaatcggatagtcaaagctaaagcacaaggtgtcccaatgactaactatggaatagttatcgcatatatcaatggcatacctttccactgacaacaaacgccttatgagacacgatcgtatttcataaggcgtttatgctcctgtcatctaatgaaaccaaaaacttgaaatttattcaaagagtttgatataataaaacagttaataatattattttatcttatatatgatgaaaatcggattttcattggcatttcttttttgcaattcttgtggtacagtaatttgagtttgttctttaaatgtttctatctcataaggtgtaacaacctgtaccagattatttcctaagacacgtccccataccgggaaccggttatgccccttactacctaccatacctaactgcatattgatatcagccaagttataagcacttgtctcagggatatcacactgctccacaacagtttctccactgtgtttatccaccgaagccacataatacttctcattcagcatcatgcgcagataaaaacggcgaggcgtctcaaaaatatcacttacaaaaatatcaccgttagcagggaatcttttaatatcgcgaatattgagcccacgaataacctcttcatccgaattgcttagaccggccactaaaacaggctgtatggtatctgccgacaaacggtaaatggtatcattgctagctgttttaaacaagactgacgcctgcttcccatccgaaggtgaacccattactccaaaagtaaagcctgaatcttcacgaggtaccaacggcgaatagaaatcgtttttggtaattatcgcctcaccgtcctcttgaaataccccaataccaaaactaccgttctgaaacggcataagaggcatagcgatggcaccaatgcgcttgttaccaaggtgatgagcataaataatgggagaatttacaggcaggtcttccacaaacgtgccttccaatgtatatatgccaaccttattgccgataacatagaaacgattatcagcctcatcagcctgtataaaacctatcataccattaaagtcatcgggaccttggccttggcgaaggaatgtacgcaaaaagtgtccttgacgatcgaacagtacgatacgggcttccttgcccaccaatacataaatgtatttgcttgtgatggcaaagtctaccacaccgtctatcaatgaggcatcatcattggtcatttccaaagggatatattcaactgactctatctcatcagcaatagacaaagttgccggcgaattaagtgcatcacgaacggaagcggttaacagacctgtttggtcgacttgatttaaattacaagatgccaaaacaaatgcgccaatggcaaccatgaaaaaagactttgtgttcatcatgttttaaagttatattttggtcaaagatacagaacatttgttatttaccatttctttttccggatatttttccatgaatccacaaaacatataaagctgaaattcctatatttgtaataaaaaaaagattactgtccaaaagtattataactaaaaaaatcttttacttttacttatattttccggaatcttcctctcgatgatggcatcaaatacccgtgacaactctttaataaccaaaaaacatttctgtcacttgaaaattgggtaatataattaggctgtgaatgtcaaatgataacattcacagcctatcactatccaactaactttcagtaggatatattacctaaaatatatagttccggttctaataaaaccggctattcactttctctatagaacaatacctctgtcagtattgaaaatcttcccctttgacgtacacccggtaatcttttatcatgccgggatatcccttttcggcacggggcaaatagcggaaaccggttacggtatagtctccacccagatcgatgactaattgatgaggataagcatctttagccaccgtcatccagtaagtggattcctgaaggtcgaacactttatctcccgtacagttaccgctacgtgtctcttcgctgtcggcatagcgtattctccacttttcacgtgaaattggcttaccgtcggcacccagtacatcaagttcggcgatggctgctatcttctttcctttttgtgccgaaagggcctcaaggcagaaataacgaccgatactctgacgatcaaagcaaacttcctgccatccgttgcccggaacaaacgtaccttcggcaacgggagtttcccgactcaagtccagttgttcaccctctttgcgatgggtagaagccccttcattgcgtaaccaatccaagatgggcttcttcagtccgcggatagatgctttctcagggcctttcaaatcaagaacaataacttcattttctccctctttgagccaacaaccgggcatgaagagtgtctgctgcggaccaatctcccagaaacgtccgatagcaaggccattaacccatatcatacctttaccccaagtactcatgtcaaggaacgtatcgccaactttatccaaacggaaggtagtcctataatacgcaggcatagtctgagctgtcccatttttatatcttttatcttgcacaaacgaataatccaccggaaaactataaaccgtccaattctttaactttgcagattgctttccacggacaagttctactttttcagtgatacctttgcgatcgtgaatcgactcatcaaagttaacgcgtcccatagcttctaccaggatgtcgatacgcgtccctttcttcaaagccggcagttgcaagacaaattcaccacgacgacggtccagacgagccaacaatttaccatcggcaaaaacttgtgcccaatcatgtacttctgtgatcttcatcgtagtgccattttcgacaggctcctgcaaagtagtccgatacaaaatcgttccccacccctgatcaaaagcctccatcggttgtacatccatactctctttagcctcgggcaaattggaaaagagaggagcaatctgagtaaactccacttcaggtatctcaatcaccggaaaagcttcgggaatctcaggcaattgttctcctgcaggcagataatttttcagcagatcacgaagctggaaatatttgtccgtagtccatcccggctcactgataggcgcatcgtaatcgtaagaactacacatagcggagtaagacggattgttggcaccaccccaatgcccgaaagtagtacctccatgggccatatagagactgaatgaaatattacggtcaagcatatctttgataccctgcaccatgcttttggcaggacgagtctcatgcttgcgtccccaatgatcaaaccatccactccagaactcactacacattaatggagtctccggacgagcctctttgagacgcttgaactgctgttcaatgttggctcccgtaccaaaattgatagtccagagcaaatcgtccaatccattccgatcaaaggtactgctccagtcacattgaaaaagaggaacttcggtaaacccggcacttttcactatatcacgaatagccgaaacatagggtttgtcaactgcataagcaccatattcattttctacctgcaccatgataatgtttcctccgcgagtaatttgcaaaggtgcaagctgttttccgacttctttcataaagattgcagtgcgctccataaaataaggatcgagtgtacgaagtacaatatctttcttcttcagtaaccaccagggaagtccgcccatctcccattcggcacaaacataaggacccgggcgtacaatcacatacatcccatgcttctgagccaggcggcaaaaagcggctatatcattttgtccggtaaagtcaaactgtccctcagtctgttcatggatgttccaaaatacataaagacaaatcgtattcatccccaatgccttacacatctcgatacgatgctcccagtaaggagccggaatacgggtataatgcaactcggcagccttaaccgtaaaaggcttgccattcaaaaggaaagtgctcttcccgattgtgaaattttgtgctgtaacaggcaatgaaaaaatcaaaatgagaagcagaatcagttttttcatgttcttattaaattgttttgagtttttgagtcgtctcactaaagcctcctttcttcaaagaaagacagtgtttccgatatccgacaagggtttctcccatgatatttccgaaaacagaaggtacaaagaaacgggaaatattatttcgaaaaaatagactttgttaaaaaaaagatggattatattatgataaaaaaaggctgcatcgttaccaatacagcctttcgtatatttattaaatgacttacttagccaattcgttgattacgttcataatcttctgcccgatctcctcagcagcctccatagtcgaggcttcgctatatatacggatgatcggttcggtattactcttgcgcaagtgtacccacttatcggcaaagtcaattttcacaccgtcaatatcattgatctcttcattcttatagatatctttcactttagcaagaatggcatctacatcgatttccggagtcagatcgacacggttcttggcaatgaaataaggaggataagttgcacgcaactcactaaccttcttaccttcgtgtgccaaatggctaaggaataatgcgatacctaccaaagcatcacgtccgtagtgactggctggataaatcactccaccgtttccttcaccaccgatcacggcatttgttgctttcatcttggtcactacatttacttcgcctacagcagaagcattgtattccataccatatttgcgggttacgtcgcgcaaagcacgggtagaactcagattggatacagtattgcccggagtatgtttcaatacatagtctgccaccgtaaccagtgtatattcttcaccatacatcacaccgttttcgcagatcatcgccaaacggtctacgtccgggtcaacgacaaacgctacatcagcttttccacccttcatcaggttcatgatatctcccagatttttttccaacggttccggattgtgggcaaagtttccggtcggttcacaatagagtttttcgacgtgtttcacccccagacgttccaacaattcgggcaggatgatacctcctacagagttcacacagtcgatagccactgtgaaatcagcttttttgatagcctcaacgtctaccaaatcgagtgccaatacactgtcgatatgttttttattataagtcaagtctttgcgataagatcccaaatgatcgacatccgcataatcgaactcctcggcagcagcaatacgaagtacttcttgcccttcggctacattcaggaattctccatgctcattcagcaatttcaatgcattccattgtttggggttatgtgatgcagtcagaatgataccgccacaagccccttccattgtaacagccagttcggttgtcggagtagaagcaagatcgatatcaactacgtcccagcccatacccatcaaggtaccgactacgacattctttaccatctcaccggaaatgcgggcatcacggcccactactatcttgttactttttgatttgcatgttttgcgaatcaaagtggcataagccgacgtgaattttacaatgtcaagcgggttcagtccttcgcctgcgcctccgccaatggttccacggataccagagatagatttgattagagtcataggttgttgttttagaaaattggttatttagtagttttagttcaatgctttctgaaatttacgaatatcgtagaaataggggtttacatattgatttgcactctgatgtcccatctttgaaggtacaatcattctcacatgggcataattggtaacatactttaaagcaagcagccatccgggaggaacatccgtcgtaccatatttggcatacatcgacccctctgtaaatacaccggctactgaagtaccgttatccacataacggaaaacgtccggataagtatagtaattcggataattttcgaaaccgggaagcaccacattgaagcaagtggtatcgttcgccttgatgtcgtgctctacaaagcgtacggctacaatattgttattcttgatagagtcattttccggtttatcggtaactatacccttatccacaatttgcatgtagactccgtttgagaaagccacgtattcgttcttggtcgtatccgttttatatccgtttgcttcaaagtcactctcggaaatagtctggatattgtgttttttaataaaggcgtttactgcgtctttctcttcatccagcatttcagcataagtcttcgaattgtcgcaagcctggaacatatatccaaaggctaacaaggaaaaaaataacaatagaagttttttcatttctgtatcttaagtatattccgtacaaatgtattttaaattagtcgaatctttagatttaaaagcagaaagttcaagtcttttaacctttgactttcaacttttaacggaagagcgatgagccaaccgtcaacttaccactttattctttcaaaagtggtttatatttctccaatgcttgttcaaacacttttacagcctcttccatagtaccgtaaaattcccctccggacgcattgagatgcccgccgccattgaaaaattccgcagctaaccgattacaaggaaacttacctactgaacggagagaaatcttaatcattttcttttcagtgtcctcacgtagaaaacaagaaaaacagacattcttgatagacagaggtatgttgacaaacccctcgctatcccctttgatataatcaaatttgccctgttcttcctttgtcagtgaaataagggcggaattgtaatctttatacaccttcatattcgataacacatatcccatcagacgcaaacggctttcggaataagtattgtagactttccggtaaatatcatctttatcgattccttttgagagtaactcgctgatgatgaaatatatttcacgattattagagttataagtgaaccctcctgtatctgtcatcatgcccgtatagatacattcggctccttctttggagatatcactaaaatatcccatccggcaaatcaatcgaaacaccagttcggaagtagaggaaatctcaggatgtgaaatggtgattctgcaaaaatcttcaggataaagatggtggtctatcattattttgcgccccggtgaagcggccactatatcactcatttcatcaatacgcttcagcgcattaaagtcaagacaacaaatgacatccgcctccataatcagcttgtcggcaaattcctggtaacggtcatacagcaaaatatccttactacccggcatccatttcaaaaaatcgggaaaagcattggggacaatcacattaacaattttatcttgagaatccaaaaaatgatacaatcccaatgatgaaccaatggcatctccatcaggtgacacatgagatacaattactattttgtcggcccgttcaaaccatttggtaaaatgatcaatatgagcctgagcaatcactttagtcagcataacttgtttgtataaatattgagttggcaaaaatacgataaatctttgtacttagagcaaaaacctcacagaaccttcgtcggaaagggagataaaatgcaaccctaaccgacgacattcttcactataagcctctttataataagcagacagagaagaatccaaaataacttcccggcaatgaaacaaacctaccaatgactccaacttccctgtatagcctttgcatacatacaaataatctatgtttaacgattcagcaacggttttgttccgccaacgattgtcactaaccatacaaatacgtttattaccgaacataagcaaatgatcctgcatccaaaaaccggacgaatgaaaattgtctgttatagcaaccggaacatccagatgcagtctattccaatatccggctactgcacgcgaaagccgtctttcatccggaatgctgtccgcataagccaaccacgacttgccacaagcttcgatacaatgcaccaccggacatccccggacattatagaaaacaatgctttgcaccggacggtccatcattctgctcacccaatgaaaacttcccatagccaagatacaaataccaaaaacatataaacatttcaaactgcgcactactttataacgtataccgatcaacaagaccagataaaaagcaaaagcttctgtcggatagatccagacacgatctatagatgccaacggtaaatgttccacccaacggaccatagtattcaaccaatcaacaagagatctcactaccactgaacatcctgtataaagcataggaaaaggggtgagtaccagcaatgcgaccgttgcatacatgatgcctgaaacaagtggaattaccaacagattagtcaacaaaaaatgagtaggaaatctggagaaatacaataaaaccaaaggagcagtacctatttgtgcagcaagcgaaacactcattaatgcccataccttctttaacaagctattaccgaccggcaattggcggaacagccagggatataataacagaatagctgcaactgctgaaaatgaaagttgaaatcctacatcgaacagccaaaaaggatgaaccactaacatgatacatgcagtcaatgcaagtgtattgagtgaaatacctgtacgccgggataaaaccgacaaagccaacagtgaaaacatgataacggaacggacgaccgaaggagagagaccggtaaaaaaagcgaatccccacaatgcggtaattatcactaccgcacgaaaaagtctcacaccaaaagcattccctggcagccacttcagaaaaaacagaagcatcatatacagaaacccgatatgaagtccggaaagtgccagtacatgactggctcccgatacagagtaagtttcccgaatatcttcgctcaactcctccttataacctaccgtaagtgcggcaagtacggcaaattcatccggattaaacttcaaagcacgatattggtcaagaatccgatcccggtattccaatgcaatctgcctgcatgatcgggaaaaccgatatccggtaattttccaattcccacttgcaacaaaagcaatcccgctaatccctttgtagcgcagataacgcgcataatcaaattcatcgggattaccattatttgaaggtggagatacatgggcaaaaaatattaactcatccccactacgtaacccttcggacaatgaatccttcgatatataaagcaaaacttttcgatttaccggcatggtgcacactgaatcctgcctttcctccaaaaatgcccgacaaaggaagctatgttccttcggctccgtttgttccgacactacagcccggtaaacacatttttgttccgaaaaagaataaagcgtctgttgcaaagcctgatttattccacctgctccgcccaaaaacacgaacaggtacaaaatacagccgaacatccaacgtaaagagtaacggtgagaaaaataaacgactaggagcagaagaaataatcctgccagcacgcctgccagcacgcccttcgaaacacagactcccctaaaaaacaacccattgccaacaagaaagcctgctatcagagggaatagcaggcgtataaaaggatatcggtgtaaatactgaaagttcacaagacggctctacagccctttcatggcgtgaatcattccttccggattctcagcagcaaagatagcatttcctgccaccaatgcatctgccccggcagctatcagacgggcgcctgtttccagatttacccctccatcaacttcgatcagtgctttagatccggtacgctcaatcagttcacgaagctctttcactttctctaccgagtgttcaataaatttttgtccgccaaatccggggttcacactcataaccagcaccatatatacatcccggataatatcctgcaacagggctatcggagtggccggattgatagtgaccgctggttgcatacctgcttcacgaatctgttgcacgacccggtgtaagtgaggacatgcctcgtaatgcacattcatgatgtgggcacccaatgccttcacttcaggaataaacttttccggattgactatcatcagatgtacatccaacggctttgaagttaacttagctacatatttcagtaccggaaagccgaaagatatgttcggcacaaatactccgtccataatatcaatgtgtacccagtctgcttcactacggttgatcatctcaatgtcctttgccagatatgcgaaatctgcagaaaggatagaaggggatataattggtttcatattcatcattcttaaaataatagcacaaaattaacaaaaaaatatcagggctccccctcaataacaatttatttggcagaaattctttttctgctatttcaaattcataattataatcaacgggatcggctcatatcccaaaaggataatgcactatctgttattacacagccttcatcttaaatgcttcagtcagatagaatccacgtaaaagttcatctgtcttcagtctctttttacctggcaactgcaacgaaaggacatttacaaatccatccggcacagccactctcaaaaagttttttccatcagtaacaatgcttccggaagccaacgtatgcacctttggcaacttctcactctcaaagattttcacgacaaccgcttccccttccggattcaccaactcactccatgcagccggataaggcgaaagcccacgaataaaatcataaacccgtttcaccggctgattccagtcaattcggcaggtctctttaaaaatcttcggagccggacgaagttcgcctgccactgccatttcttcctgaggaattgatttcacctttccctccagaatagcgtctacagtttctataaccaaccgaccgcccaaatgcatcaacttgtcatgcacaatctctacattgtccgtatcggcaatgggaatacgtacttgctggattacttcccccgtatctatttcatgtttcaggaaaaaagtagtaatacctgtttcggtgtctccgttgatcactgcccagtttataggcgctgctccacggtattgcggaagcagagaagcatggagattaaaagttcccagacgtggcatattccataccacttccggcaacatacgaaaagctacaacaatctgtagatcggctttccactcacgtaacgcctgaatgaattcttcatctttcagtttttccggttgcagcaaaggcagttgatgatccagtgcatattgctttaccggagaatactgaattttatgtccgcgaccggcaggtttatcgggcatcgtaatcactccaaccacattataaccgccttcaaccagacattgcagggcttccacggcaaagtccggagtccccatatatacaattcttaaatcttctttcttcataatttataagttatgagtttcacactgcagattacgaaagtaacgaattgcctgcaaagcacactatccattacatacagccatcgccgttccgtcaatcttccgagaaatgtaccaatacctggcgatatgaattaaatatcttagatttggatacaaatcccaggtatttgccctcttcattgaccacaggtaagttccacgcttttgtatcgtcaaaagtctgcatcacctgttccatgctatctgtatcatacagacgggcagggaccgaggtcatcagtttactaacggtaaaacgatgataaagttcctgacggaacatgatgttcctgatatcgtccagtagcacgacacccagcaagaccccgtctttatccgtcacaggaaacatattacgatgcgaagttgaaatcgccttcaccaattcgcccagatccatttccggacgcacgctgacaaagtcagtttcaaccacattttcaactttcatcagtgtcaatacagctttatccttgtgatgggtcagcaactgtccctttttagccaaacgcatagagtagatactatgaggttcaaacacgatgattgtcagatacgaactgaccgaaacaatcatcagaggcaggaagaggtcatatccgcccgttagctcagcaatcaggaatactccagtcagaggtgcatgcatgactccactcataacccctgccattcccatcaacgcaaagttcttttcgggcaaagtcgaggtaaagtcaaaatcattgctaaagtgcgaaaacacaaaaccggcaatacatcccagatacagcgaaggtgcaaaaataccgccacatccgcctccaccgttggtcgcactcgacgcaaagactttcaacagaatgatcagcaccaaatagaccagcaacagattaccgtatccataaaacaacgagttattcagtaccgtatcccagtcggcattgctcacgccgttcaacaatagttcgatcgtatcgtaaccttcaccatacaagggtggaaagaggaagatgagcacactcagcatcacacctcccaatgccaacttcttatacggattggagagtttgccaaatactccttccacagagttcatagcgcgagtgaaataaagcgataccaatccgcaaaagattcccaaaagaatcacataaggaatacgctccaattcaaaaggctgatccagatgaaatttaaacatagcctcctgtccggtcgtaatatacgaaacagtggcagccgtgacagccgaaatcagcaatggtaataaagacgacatggtaaggtcgatcatcagtacttccagcgtaaacaccagtccggcaataggcgctttaaaaatacctccgatggcacccgccgctccacagcctaccagcaacatcagtgtacggtgctccatcttgaacatacttcccaaattcgacccgattgccgatccggtcaacacaataggtgcctcggctcctaccgatccgccgaaaccgatggtaatggcactggcaatggtcgacgaccagatgttatgtcttttgatacgcccctgcctcctcgaaattgcataaagaatcttcgtgactccatggctgatatcatcctttacgatattgcgtacaaaccatcctgccagaaaaataccgaccaccggataaaccagatacaggtagttggcctccgtcgtattaaagttatctgtcaggaaattctgtatcgtatgaataaagaattttaggagcagtgcagcaatggcagtaaaaataccgaccagaaaacttaaaatgagaataaactgcttttctttgattttattctcgcgccagataataaagcgctgtaataaacttatcttttctttttccatcattcgcgaataatcttgatcactccacctttatccagtttaatgatactcgatggtttaggacgactcatatcatcttgtcgaaaattgacaatgtaatccaccgacgattttatttcttcgctgatttcattaaaattggctgctcccggttgtccgctgacattggcagatgtcgagacaatcgctttgcgaaactgctggcacaaacgacgggaaaacgcctcgtttgtcacccggatgcctacgcttccatcctctgcaagcagatttgaagccaggttgcgagcaccggaataaatgatagttaatggcttatcggcaacctcaatcaaatcccaagctaccgaaggaacatcctgcacatagaattccactttcaccggcgagtctaccaataccagcatcgccttgctgtcagcacgtcgttttatctcatacacccggcgcacagcgtcttcattggtagcatcacagccaattccccaaaccgtatcggtgggatagagaatcaccccgccttcgctcatcacttgacaagcttttttaatgtcttctatcatttcttgatctatttcttgtgagaataacgtgcaaaaatactaattttgcccaataataacaaaggttaagagaaaacaaatggaagaaatcgaatttcatcacagtttacctatacaactacgattcaacgacgtagacaaattcggacacgtcaacaacaccgtctatttttcattttacgatctcggcaaaacagaatatttcgcttctgtatgcccgggagtcgactgggaaaaagacggcattgtagtcgtacacattgaagccgactttctggcacagattttttcatcggaccacatcgccgtacaaaccgcagtttgcgaaatcggaaccaaaagctttcatctgctgcaacgggtcatcgacaccgaaacaatggaagtgaaatgcatctgtcgttcggtcatggtgacattcgatctggagagacacgaatccaagccactgaccgaagaatggatagaggcaatctgtcggttcgaagggagagacttaagaaagaaaaaataaataatcctccgtagataccttttttctacggaggattttgtttttctccttaatataagaattccttattcacgttccccgacacactcgcgtcaaaccaggaaagattggattgatcaagcacccatttctcataattaggatatgctttcgtaatgataactctttccttgggataattccacgccggtgaagagtcttccttccgcgggaaatcaagagcccatggatatcggttatccatacgataataaacttcagccccaggatccgatctgtcattttctgtcccgaagagtgaagtgtcggcatgttttgtcggcttataatctaccagatgtatttctctttgacggctgttgacaaaaataaacggattaaacttctgagttaacaagctgctgacaggagtcttcagtcgtacggttacttcaaccggaatagcggaaattccgaccgccgcaccctccgtattcacatatccttcagtcgtaccgaaagcagtattaacatcattccagacaataaaagtagcccggtcattaccctcttcaagcgtagcaccttccgactttgctttgtcgatattgtcagccgaaagcggcagttcgatgcccacaccgatatgcgtccatgaagctgctccctttgcaatcggcgtgaaagtcaactttagagcagtaatcatattattatcccctttctccaactcataactgtaattcatcacaaaatcgttgaagtcatagtcccccatcttaggccactggtcttcaaaggccaatgtaccataaacagcctccaatggagtaaattcatcgatcaccggaatgtcttcttccggttttatggcagataccggtgatgcggtaagctttatcatcacatcattaaaatcataatctgctttcggatcatcataagggcgaatatcgaagcccataatgcaacagttataatcgggcacatttcgaatcaccgcattcgtccttttcgttgcattcaaagatggggtagagtaatagaagccattaacatctccattcgggaaggtctgattcttgaacttataggaactttttgaattcactcctccattggcagcatttacattagctatattcaatccgtcacgtgccacagcaaaaccgatacgtgcacctttcgggaataccttactatattgttttccgtcccaatacaacaattgtacttttaaacccgaaggacacttttgctgatgagtattcggaagtaacaaagtcatacgatgtccctgtatatcttcacgtctgccaagctccccttcctggtagctataataagccaacacattgtagacggtcgcattatttacataaaatccaccatcaccgacatacgtagcccacacttccgctcccaattcgtcagtcaccaccaggtcagagctctttttcaaatccacatcctgcacattcttctgttccggataccaactattcattaaatttagaaacttagcagataattcctctttcgtaacaagcggagaagcattcaaaagtggtataccgtcttttccaatctccgaatcagtataagggctatacaattcataaagattgctcagtttctggccgacgggaacatccaatcctgtttcactccgggtagcaaccatacgggtagtagcagtcttgatttgaaaggctgttgcagtcaagttgcacgtcatcgaaggttgcacatccatcttctgcactcctggataaccggctgtcaacgaagcgacatacaacttatcactgtttgccggaacagaaatagtagcatcaatctgcccattcccatctgtatagcccatatagagaggcttaccggaaataatcccgtcttcttcataaggctgttgaagatacactccaacccctatcccctcagcagcttttccatctgcccgggtaacagatatatgaatctgtttatcggatctcaaagcgaatttgaacgataggtccaactcttccgtttcgccaggatcctcccccgacggttcatacaaatctttctcatttacacatgctacacagcaaagtgctatcagcagtgcatacttcagcaatgataaatttctcttcataagacgatgtttgtctgtttgtgtaaggttactatattcagtaaattaacaacctaacttgaatacaaaaataacaaaaaaacagaaacttacaaaatctaatcatcttaatgtagattttattctttttatatcaatttatgtagccatgtgaagcttacagtcagtccacgatccaactatcaatattccttgttttcgagctaaagttcactcctgcctttatcagttggcgggaatcattggcaaacggaacggcatatcccttttcttctatctgtttcaaagcctcttccgcactcccgtcaaatttgaactccatcacatgctaccccgcatttttcatcctctaaactgaagatttagaggttttcaaatgcgaatctatataaaagtaattatcatctcgcaaactttcaaagttctgtatcccaatcgggtaaagtttagccatagcgtattcctattaatggtttcactcacaaatatacaagattattcctaattaccgattccgtaaaccatataataaaatgccgctatccattctttcaaacagacaacggcatttattatttcaaccgaaatgatcggctgaccgtcaaagtaatccctgacctcctattaccccggcaatagcacttgccacagcaatgattactttcaaaaagatgttccaattatttttcctcatattctaatcctatagaaccgctaactacgcagtcggatcatctactatgtctccatcaccacctccggaaccattattgcccgaagcaccgatcccactcgctttctggaactcaacaccctgaaacaaagcccgggtagtaccgatagccgcaggacgagtatattcaggagtaaaatgacaaagaagggctgccacctgattcgggttcacctcttcctctttgtccactccccttcctcgtgtacgcgctttcatcgtaaaagtacccaatccgtccagacgtaccgtcttactgtccagcaatgcactacgcatcgctgtcatcaagttacgaaccacattatgcacatcacccggagtcaatgacgatttttccgcaatcatctcagccaattgctgagtagataccaccttgcctaccttcaccaagttcaagtgccatttcttatcaccggacttagttgccatagtcgattttactgctttataaaataatgccatattcctacatctccttttttaatgttattactactgattttattcacattgcgttgatcaacattgcaaaggtgaacatttgcaggaagatggcaaaagaaaacaaggcatccggatcaagttatgcagaataagttataatcatcacattatcagtattattacttaactttttcttatacatctacttcacatactctgctattgtccgattgttcatattatacccgtttaacgaaatgtccccggttttatacctgacatggcataaaaccggagacgaaacaaaaatctatacccattagggcatatctcttttctacttcgtaaatctccgataagcctcttccagttttttatcgtactgattgtgagcatatccgggaccattatatcttttggcaaaaccggtccagtctttctgctccagactgggctgtaattcagcaaatttaatgaacctggcaaatgcctccagttgcttatcttctccggaacacatatctttcaccatttcatctacactgccgtacccgcacatcacatagttaaagcccatcacctgaaacattccccatgaagtggaagcgtcagcagcttctttatgtatttctcgggccttttccagacgttcatactctcttatccctccataataatgttctctcctccaactgggataaagaatattttcattaccggcaacatacttctccggatcaagtccccgctttttgagttctctccaaaagatgtgaccttcaaataaaattatcggcctccccggcgccacaaagcccccacgaccaccggtttcaactgtctgtacggcttttaccactgccacttcaacgccaagccaatctgccacacgctgaaaatcattctctgttaagttttccatgagtaattaatttgatttatgtaaatagaagaatctcttcataaataggaagtataatatccccaacaccaagatgctccctaataaatacccatatccatactcccgtaacagcaaatatcctactagaactacggtttgcaccaacatataggtcaatgccactgccacgtgtggtatcttcagttcattggccataatctgatacaaatgtttccggtgaggcaaaccaatattttcatgtaacaacaaccggtgtacgatcgtcaacacactatccactccgtacacaacaagcaatacaagccagctgaaatctttcgtttgaagaatcaaactcccgatcaggaacaggactacaaaagctatactgaccgaacctacatcaccggcaaagcatttcgctctcttacggaaattaaaaaagtcaaacaccaacacagaacaaatcatcgtataaataaaactctgttctgtgaaggagatcacttccacattcacatatgccaaagaaaccaggataaccaatgaatacccgccggtaatgccgttaatgccatccataaagttataggcattgataatccccgtacagacgatcagagcgacaagcaacgtccaccaaggcaagctgaacaacccccattgatagaacatcagggccattgccgtaaaatggaagactaaacgcaaaccctgcgaagtagaacggatatcatctataaaactgataaaagtgatcaaagtcaaagccaatataaaccaaggatattcaaactgattcgtcaggaaaaaagtcaatgcacccaaatagaagatgattcctccacctctcagagtaatccgggtatgcgaactccgctcgtttggcttgtcaataatattacatttatcagcaatacggaaataaaaaagttctgccaggaatagcagaactaagattagcagataatacataagttatttagtttcttcaaatgaacgaatggtcttcattaatccttctttagcagtaacaggtaatttatcgatacctaaagctgctttgatcttagcattacttaccacataattttccgtcagtttacaaagtctttcggtattcaaaggcaagtggagtaaagtgcccaatccggcacaagcttccataaaacgcttattcatcttccagatatgaggttgtttttccattgcctcgcacatgatggcaatcaattcatttgttgacaaagcttcatcatcccccatgtgataaatgcccgtaggtacatcctgattcaaaagcccctcaatcacataacaaaggttatcgattgaagtaaacgaacgacgattatcaaaatcgccaagaggccaagggattccttttttcactacattatataataaattcagattccctttatttcccggtccgtgaatcatgcagggacgaagaatatacacctgtttctctgttgttgagtattctaaatgctcctttatatattcttcagccttaatcttactctctccataaggcccaacaggagccggaataacatcctcagtaagcatatctcccactacactatcagccgcagcttttactgaactaaaaaatatgaatttcttcgcagaagactccaaaaagaaatcaaatatcttttgagtcaggccggtattaatatcaaaataaggctgagcagctgattggtttttcgtatcatgagcctttccggcaagatgaatgattgcatcaaactggggaagggtctgtaatgggaaagactctggattaatatcttcccaagaaaatgtttttatacatcccttcctctgtttaacaataatatctaaaccaaaaatagaataatgagtttttagagattcaactagattagaacctacaaagccatgaaccccagaaattaaaatattcaaaatatattttttaaaaaattattagaaacaaaaccttagttaaaatgtaagcgtccaaaacctgatacacaccacttaggacagatgcctgaggacatctgccaaaatcttggaacacgtttttttaacatctattttagacgcttacttaaatctttcaaccggggatgcctgctgtccttctccgagagaatcacacgatctgccggaatacgccagtcaatacccaaatccgggtcatcccaggtaatggcaccctcactatgcggagcataaaaattatcacacttatactgaaaaacgacttcctcgctcaatacactgaatccatgtgccaacccacggggaatgaaaaattgacgatgattatcctccgtcaactctactgccacatgttgtccaaatgtaggagatcctttacggatatcaacagctacatccaataccgctcctttcactacacgcaccaatttactctgagcaaaaggggcctgttgaaaatgtaaaccacgaagtacaccataactcgatttactttcattatcttggacaaatgtagtcttgcatactttttcctcaaactccctctgattaaaagattcaaagaaatatccccggtcatctttaaaaatacggggttcaaggataacaaccccatcgatagcagtctttattacattcatttcaaaccaagttcctgtatcactttcaacaaatactgtccgtactggttcttcagcatgggctttgccaattcacgcatcttatcggcactgatccaaccttgtctcaaagcaattccttccaaacaagctactttcaatccctgacgtttttctatcacttcaataaaagtagatgcttcacttaaagaatcatgcgtaccggtatccaaccaggcaaa

SEQ ID NO: 5026 - DNA, 6677 bp, Unknown
  gut microbiota DNA sequence
caggttaacgtcatttacggtttctctctcattcttttctttcttatttaggtttaaaattgatgtttggtataagttctaaacgaacttgggtgagaaggatgcggattagaaagtagcgagagagaattattggtgagagaattggagatacagaatttgagaataagacataaaaaagcccgtccatgtgttaccatgaacgggctttaaccctcaataaataatgtgttaaattaatatcccggattctgatcgtctttcaacaatggattcaggtcaatggcaccttgaggtataggcatcaacatcaaacggttatcccaaactttattaattacgacatatccgtttggagcataagaaggaccattcatagccttactacagtaatcattaccataacgccgtatatcatcaaagcgatggccttctgctgccaattcaatacgccgttcattacgtacaaaggccagagcttcttcttttgaaggcatggtggttggcacatccggcataccacaacgatcacgcaaatcattcaatgctttttgtacttctgtatcccatcccgaattctgaatacgtgcctctgcataagttaacaatacttcagcataacgaatcaccggatagtcttcttctgcagtccaggtatcgtatggatcaagagtgaccattttacgataaaaatatccggtccatgattcattaccgtctttatttatcagatccggatcccaacggaagtagaatgtacctttaatggtttcatgccatcctttgaaagggaacatcatagacacatacaagcggctgtcgcggttacggaactctttcatatagtcatatttcataatatctatttgtggcactttttctatgaattgagattggctcatatctttgaaatctttccatatttccgcataacgttctttacgttgttccatagtgatgtcattacgcatcgttttaccatccacatcccaataggcgtcaatcaggtcctgcatgggttcgtaagaacaatacccgtcatattgagagaacgatttaggtataaaataggtgtatctggtccagtcgtaattgtttgcatcagccatatactcacgtgttacaatatactccggattagcgggagatgcattacctttgtgccacagtgattcataactgaacataccttttacgaatttatctttatcgatacctttggctgcatagtcaatatatgcatccatttcgtcagcttctttttgctgtgcggtggtaagcgatgatacacggaataaagaatgatgtccttcagatatgattttcccggctgaagcctcggcttcagcatagttgccgaaatataaagctgcacgggcacggagggccaaagcaccggcacgagtaatacgtccggtttcatacagataactaccgttataactgtctggaagaatttcagctatttcagccaattcatctaaaataaatttacgaacagtttctacttcatcacgttttacattgggagcgtcataagccaaaacctctgtaattacaggaacttttccgaattttgtggtcaaatccagatagcttaaagcgcggaaaaaacgtgcttctgctttcatacgtgttttcagttcttcactgactgcacatttatctatattcgcgataaagttgtttactatacgaacggtaccaaaatagtagctcccatatccgttggctgtactaataccattttgctggaccatttcgaagtttccttcccaaggtttatggctatgcgcattgtcggtacacaattcatcccagatgtctacaccatctaatgtggcataacaagtgttcaaagcataccatgcatctttttcagtctgccaaaagttttctgctgcaatgtcagcaggtggaaccacatctaaatcgcaggctgtcaatgctcctgtgagacataatcccaatgcaatttttcttatattgtttttcattgtgaattctattttttaatgaatggttttagaatgatatgtttacaccaaatgctaccgatttagtccccagcgtataaatcacaccgccggctgtttccggatcaaagtcttccatctttttatcagcacgaaccgtgaaaagattctcgcctgttacatatactttcaatgactgtaatccccagttcttcactgttgcagatggtactgtatatcccagtgacagagttttgaaacggaaataatcggaatcgaacaaatgataatcactaaaattacggttgtaagttgtatgtacgctacttgctgaatagatgcgaggatatgccgcatgtggattcggattctcttccgtccatcttttcaaatgatattttctcgggctgtcctgtccatggtagaacggatgaacgccataaacatcaaatgctacttttgttccactgattccttgtccgaacatactgaactcaaaacctttatattgcagactcaaatttacgccatatgtaaaatcgggtacatctttaccaagaatagtacgatcttcatctgtgatttcttgcttatattcgatatcacgctgaggaacgaatttaatgtcacccgcattgggtaccactccactcaaggtgtagtaatgtccggcatcgatgtctgcctgagtataaagtccgtccgttttaaatccatagaatgaaccgattgattctccctttttcagaatgtacttcacgatataactactggtttggataatgttgtctgaaccacctaaattggtaattttgtttttattggtagcaatgttggcaccgatgctataattcacagctccaattttgttccggtgattcaaagccaattcgaaacctgtatttttcacttttccaatattttgcgatggagctgctgtaataccggtttccgtaggtacattgtatcctaataagatatcgcttgtatttttaatataatagtcggcagttacccccagaagtccattgaaaatgtcgaaatccaaaccaatatccgtcaaagcaactttttcccaaccgagagtttcattagccggtttggattcaccgataccaatcactggtgaatcactgaagttataatgatttccactactataattttggaagtaatcatagttacccacattgtttatattgccaagtgtaccataggaggctctgattttcaaattattgatccactcaatatctttcatgaagctttcttcacttattctccatccggccgagaatgaagggaaatatccccagcgatgatctttatggaaacgtgaggatgcgtctgcacgcatatttacctcgaataggtaccgatccatcaaggtataattgacacgagcaaaataagacaacattttatattctgatgaacctgcgccattggtataccctgctccggaggtagaacctgcttccatatccgtcaatgcgtcggatggaaattcttcacgtgatccggccaatctttcgtatttataatgttcataagatgtaccgaccaaagctccgacagcatgtttatcgttcgaccaatcatatcgggctgttgctgtataaagcattgtatttgtactttgccagtccatgctcattttatttttggtaactccggttcctgctatttcctctccggaaaagtagtttatagcattgggttgtaaagccgtgtagcttttgctcttatattcataacccttgaatacaccttgtccactgattataagtcctttcacgggtttaatgtcaaatccgagatcgtacattgtattttcactcttggacttactccaatctttcttgctcagtgcacgaagcggattgcctgtaataaaattacttgtagccgtctgacctccatttacagtaccccaatcaccatttgactgtttggcaacgaatgtaaccggtaccattgagaaactggccaatgaaggcgcaccacaatcgcggtcggaatcattacgtatgtatttcactccggcttttaccgtcagccatttagtgatatcggaactcaaattggtattcaaattgtaacgctggctgtcttgtccgggaatcatattgtctttatacacatatcccaatccaataaaatagcgtattttatctgttcctccactgaagtccagtgaatgttgagtggtcaatacgttcttatccagtaccagatcattccagtctgtgtttggatataaatcgggtttggagccatctctgaaataaccaatttcttcttcagtgtagccttggtatttcccgcctttaggattgtaattgtaaagagcttcattgtacaactctgcatattgggtagagttgacatattccggtttgtaagtcggattgctcaaacctacgtaaccactatatgaaacgttcattttatcgctctttccctgtttggtcgtaactaacactacaccgtaagcggcacgtgaaccataaatagctgatgaagctgcatctttcaagaaagagatggactcaatgctattcggatcaaggttagaaaagaatgtggcgtccgcaattgcaccgtcaattacatagagaggagatgaagttcctaaattaccgcgtccacggaagtttatactcggtgtttgtccgggacgtgagataaccgtaactcccggcactgtaccttgcactgctgacaatacatttgtttgtacacgatctttgatttcatcggtactaaccgaagctactgaccctgttaaatttaccttcttttgtgtaccgtaacctacaactacgacttcgtccagagttttagtatcctctttcattgtaatactataatcggttactcccggatggatttttacagtttgtggaatataaccgatatatgtaatttgtatttcattaccggataccgttaatttaaagtttcctcctacgtcagtaattgtaccattacttgctgaccctttttccaccacagaagcaccaatgataggttctccggtggtatcttttacttgtccggtgatacgcacacttttctgttgctggagagaagaggttttcgggatttctgcttttatggctgagacaacaatctggttatctattattttataagtgtaaccggaattgttgaaaatctgatccaatacattttcaataggtgcgtctgtaacatctacagaaacctttttagtaagtttcacctgattgtcattgtaaaagaaagtatatccacttttttgttctaattcccgaataacattctggatagagacatttgtcctcttcatggatattttaagaatttgagcataggtagtgacgggcactatacaaaccagacaaatggctaaaacaaacgctagttgtcttttgattttttgcggactaaaccaccgcagattgcattttttcataaatacgattaattattagattgtaattttgattgataaagagggtacatgattcttttttgcatcaatgtacctgggttaactaagctttcaattttctttgtgcatttctttctttttatttaggtttaaaatgatttaattcctaagttccgtatgaacttggtatacggtaagtttcaaagagataactaataataatcatattacatatagaaagaggcctatctataactaatagataagcctcacattttttataaaaatctattgaatatcgtcaaacgcttctaattactggttggattctgtgttaaggttccaggataagagttaatagcactttgtggaataaaataaataacccgatagtctgtagccggaatttcaagcatggcatcatgtactccgggatatttgcgagttaatgtttcacaattgcgaaatacatcataactacgttctgcttgataggccaactctaattgtctctctttttctattcgcaccttagcattagaagcatttaagtcattatagcctcttccgggtaaagagcgttcacgaatgatattcagatctgcttgagcatgagaataatcaccttttttggcatatgcttctgcacgatttaagtaaacctcgcctaaacgagagataacaggagaatgtaattgagattcagcttctccgcttgcagttccttcattcgaacatttgagaatatagaatttgggttgcccacttgagagttctatttcataatcaataacaccggaataggtttgaccatctgaatagttgattgaatatttttcttcactactgtttattaatgacaatgtgtaattagtttccccctctttacaagtcacagtgttacctctcttagaaatgggtaattgtacatatgtgtaccccgtatgtatgttgtttttgttgtatacattctttatgaaacggaatacttcaacatatttaccatcactatccgtgatgtagcttggtgaaatgaaatttgctcgtgcatctacaatttttttcttgtcaggacgccaatcgttacgtccctgttcatttaataaatccatgtatttggcacttgcatacatttctccccaaccttgctgaccagcataagaatacattccaccgatagaattccaataatccggtttttctgatgccatgatttttactacaaaaatagattctttattattttccggcatgaatgtatt

SEQ ID NO: 5027 - DNA, 108533 bp, Unknown
  gut microbiota DNA sequence
acttttttctttcatcagaattcaagtcctcaaaataaccgctttcccacaaaaaatcgggaatatccatatccaatacaatgttacgcacgacacggtatttttgttggatggctacaatattttcagtcacacggaaaatttcttgccgcaaataatcctttagctgggcttgcgtcaaatactcacgttttaaaaatagtgcatctactttagttttatagtcatgcgctatacaactatctaatatcttctgtatttctctgaaattggtttctatatgattttccataatcgtgtgcctttaaacgttcttactacaaatataaggtaagaatctcacttttcccgaaaacatcggcaataataaggaagaaaagataggataagcgttaagaaattataaagatatggggaagaaaactattaaagtacaccttttctttgtattcgtcattcagtacacatttagtacgccctataaaagcagaaaaccctgataatcaggcaattatcagggtttattcgtacccagacccggggtcgaaccgggatggaagtgaatccactggtgtttgagaccagcgcgtctaccgattccgccatctgggcattggtttcaaatgcggtgcaaagatacggcttttttttgaacttgcaagagttttataaaaaaaaggagaaaaaaagaataaaagatcgcataaacacttctattttcagagaataaaccgtattttagcagaaacatttaaaacagtcaatatcatgacaagcaaagataattattgtgtcattatgggcggaggtatcggcagtcgtttctggccgtttagccgcaagacaatgcctaaacagtttctggatttctttggaacaggtcgttcactgttgcaacagactttcgaccgattcaacaaaattattcctacggagaacatacttatcgtaaccaatgcgatatacgcagacttggtaaaagaacaacttccggaattagatccaaaacaaatcttgctggaaccggcaagaagaaatacggctccgtgcattgcatgggcatcatatcatatacgtgctttaaatccaaatgccaacatcgtagttgccccttccgatcatctgatcttaaaagagggagaatttttagccgctatagagaaaggactggactttgtatcaaaatctgataaacttctcactttaggtataaagcccaatcgtccggaaaccggatacggatatatccaaatagcagagcaggaaggagacaacttctacaaagtaaagacatttactgaaaaaccggaactggaacttgctaaggtttttgttgaaagtggagagttctattggaattcaggcctcttcatgtggaatgtcaatacaatcattaaagcaggagaaactcttctaccggaattagcatctaagctggctcccggaagagagatttatggtacacctgaagaaaaagactttatcgaagaaaacttcccggcatgccctaacgtttcgatagacttcggaattatggaaaaggctgataatgtatatgtctctttaggagacttcggatggtcagaccttggaacctggggatcattatatgatttatcacctaaagatgaacaaagaaatgtaactctaaaatgcgactcattgatttacaacagcaatgacaatatcgttgtattacccaaaggtaaacttgcagtgatagaaggtctggaaggttttttggttgccgaatcagataatgtattactgatctgcaaaaaggacgaagaacatgccatacgcaagtatgtgaatgacgcacaaatgaaattaggagaagattatatttagtactgtacgaagttaatttcctaagtacacgaagttaacttattacagctaagaagttaacttcctataattatgaagttaactttataagtgacacgaagttaataagaaaaaggggctgaacggcaacgttcagcccctttactattatttaatgaaggaagaattttacttggctgtttcgtaagcagaactaatagccttggcaatagaaacaaactcatcgtctgccagtttcaattttggattagagaaaagcatatccgattctttttgaataggaatcaaatgaatatgagcatgtggaacctcaagtccgatcactgcttcacccacttttttacaaggaaaagctttttcaatagcacgggctatttttttggcaaaaacgtgcattgcagccagatcttcatcactcaaatcaaagatataatcaacttcctgtttaggaacaaccaaagtatgtcccttcaccaacggattgatatcaaggaaagcaaaaaacttttcgttttcagctaccttatagcatggaatttcacccgctatgattctactgaatattgttgccataatcctaatatataaaatagggcaagcccgaatatggacctgccctcatgttaaaacgaaatgtttactacttcaagactgattttaccctgtggaacttggatctcagcaacatcacctacctttttgccaagtaatccctgagcaatcggtgtgctaacggaaatctttccttctttcagatttgcctcgctttctgaaacgatggtataagtcattttcataccattcttggtattcttcaattctactttattcagaatctgtactgaatctgttttcagtttcgattcatcaataatcttagcatctgctataacagctttgagtttgttgattttcatttcaagcataccctgagcttctttcgcagcatcgtattcggcgttctccgataaatcacctttatcgcgcgcctcagctatagccgcagaaattttggggcgttccactgtttccagttctttaagttccgccatcaatttcttgtaaccttcttctgacatataagccatgatgttttcctccttttatttttaacggtcatataaaacaaaaaagaattccaacatgagtcatgctggaaccctcttttcaattatttcttcgcaaagataaccttttaaatgacatgtgtcaagcaaaaagcaatgctatgtaacatatttaaacgaaatcttctaatttataacaacttaaagcatagacttgatagtaccttccagatctttcaccgtctccccacgggccctcagttcattgtttcggttgatcaggaagaaagccggcaggttctgtacgccatacaaagctgcattggttgagtaaattccattctcatcgcgcacgcatacccaaggcagattatcagctgatgttttccagaaatgctcgtcggcatccaatgagacctgataaatctccaaaccctgacttgcatacttattgtataaatcacgcagcatcaagttatgaggagctgccaccgcactttgataaacagtaaaatcaagcagaaccactttacctttcaagtcagtcagcttacggatattacctttcatatctctcaaagcaatatcaatcacaccggtttctgcaattttttcttccggtatctcaatggtcttctgttgtggagtacgggtattcttcataccttttatcactatattatatagattctttgaacgcaccgcgtgcggataagtattgttcagactggtagccactgcaccaaaacatttaatatcatccttattattcaacggatcaaagatcatataattgtttaatttctgaaatagtgcaaaataagcagaagcagtattgggtgccgcaaagatataattgattttcacatcatctttataatttttcagtagtacggccaagctgtcttcaaaaacatcgttacccaattgatgagcctgtgcagcctttaccaacgcatctacatctttttgcagacgaacctgtttcagagtcagctctttaatttttgcagagttctccgatccttccactgtataagcagtagagaaatctgtataaggtgcttgaatgctaacagtttctgttgagtcaaccgagaaattaattactttatcttcaacccgtaaacgataaaactcaggagattcgggacgcaattgtttaaaactgaatgaaccgtctcctttcaattttatagaatccaaaggcacaattccttcaagtccggaagcttccagataaagcatttttccatctgctcccgaaacatctccctttacattaaatttagggtcagaattacaagaacttaaagcaagagccacaagagctactaacgttacttttttcataatattcgtgttatttttcaagctgcaaatatacttcttttcaagattagtcaaagcattttgccgcgttcttcgttccaaaattgaaaaaaatcaaattcctgctaactttttatctcattttcacgatattagtgcaataaatgtatatctttgcgggaattttgaaagaaagatattagataaaacaatttttatgattaacccaattgttaagacgatcgagttgggagatggcagaaccatcacactcgaaacgggaaagctggcaaaacaggcagatggttctgtgatgcttcgcatgggaaacaccatgttgttagctactgtttgtgccgctaaagatgcagttcccggaacagatttcatgccgcttcaggtagagtataaagaaaaattcgcagcattcggccgctttcctggtggttttacaaaaagagaaggaagagcatctgattatgagatccttacttgccgtttagtagaccgtgctctccgtcctttattccccgataactatcacgcagaagtttacgtaaacatcatccttttctcagcagacggtgtagatatgcctgatgcattggccggattggctgcttccgcagcactggctgtttcagatattcctttcaacggaccaatttcagaagtacgtgttgcgcgtattgatggtaaattcgttatcaacccgactttcgatcagcttgaacaagctgatatggatatcatggttgccgctacttatgaaaacatcatgatggtagaaggtgaaatgagcgaagtgtcggaagccgaactactggaagcaatgaaagtagctcacgaagccatcaaagtacattgcaaagcacagatggaactgactgaaatggttggtaagactgttaaacgcgaatattgtcacgaagaaaacgacgaagaactccgtaaagccgttcatgatgcctgctatgataaatcatatgctatcgcagcttccggcaacagaaacaaacatgaacgccaggatgctttcgatgcaatccgcgacgaattcaaagcacagttctcggaagaagaactggaagaaaaaggcgctctgatcgatcgttactatcatgacgtagagaaagaagcgatgcgccgttgtattcttgatgaaggaaagcgtctggacggacgtaaaacaactgaaatccgcccgatttggtgcgaagtaggttacctacccggacctcacggatcggctatctttactcgtggtgaaactcaatcattgacttcagtgactctgggtactaaactggatgagaaaatcattgacgatgttctcgttcacggaaaagaacgcttcctattacactataactttcctcctttctctacaggagaggctaaggctcaacgtggtgtaggacgtcgtgaaatcggacatggaaatctggctcacagagcattgaaaagaatgattccggaagactatccttatgtagtacgtgtcgtttcagatatccttgaatcaaacggttcttcatcgatggctaccgtatgtgccggaactttggccctgatggatgccggtgtgaaaattaaaaaacctgtatcgggtatcgctatgggattgattaaaaacgcaggtgaagaaaaatatgcagtgttgtctgacatccttggagacgaagaccacttgggcgatatggacttcaaagtgacaggtactaaagacggtatcacagctacccagatggatattaaggtagatggtctgtcttacgaaatcctggaacgcgccttaaatcaggcaaaagaaggacgtatgcacatactcggtaaaatagaagaaacaatttccgaaccacgtactgagctgaaagatcacgctcctcgtatcgaaacaatgactattccgaaagaattcatcggtgctgtaatcggcccgggcggaaaaatcattcagggaatgcaggaagaaacaggtgcaacaatcactatcgaagaaatcgacaacgtaggtcgcatcgagatctcaggaactaacaagaaatcgattgatgacgcaatccgcttgattaaaggtatcgttgctgttcccgaagtaggtgaggtatacaaaggtaaagttcgctctatcatgccttacggtgcatttgttgaattccttccgggaaaagacggtttactccatatctctgagattgactggaaacgtcttgagactgtagaagaagccggcattaaagagggtgacgagatcgaagtgaaattgatcgatattgacccgaagacaggtaaattcaaactttcaagaaaagttttattgccacgtccggaaaagaaataaataacactagtctttactgacagagtgataacctggctattattaatagtcaggttattttttttatggacaatcagtataaaagtcattctttcattttgatattacgaaaagtttatgttgctttgtcataagaaaatccaattaacctttaaaatctattcatgccaagcaacaacagccttcacaccatggacttattcagccagttctttcaagaaaaccagaagaagtttctgtcgtttgcttattcatacacccgaaataaagccgcagccgaagatattctgatggaagcaatggtcagcctgtgggagaatcgcgaaaaatgggaaaaagattccaacctgcatgcattgctgcttactatcatcaaaaacaaatcactcaattatcttgaacacgaacaagtgcgtatgaaagctgaagaggcgatcaatacacataagcaacgtgaactcgatctccgtatctccaccttggaagcatgcgaacctgcgacaattttcgatactgagatacaacgcatcgtatataaaacacttgaacagctgccggaacaaagccgccacattttcatattaagccgttaccacaatactcccaataagaagatagccgaacaactcggcatttctatcaaaagtgtagaatttcatatcaccaaaacattgaagctgttgcgtctcgaactcaaagattatcttatatccctacttttttaaaaaaacttcattttcttttagggttgtcccagggtatcctgttatatatacagaaggaggaaataaagcctctgacaatacataaactaaaaacattttatggaacaggaactgctatacaagtattttaaaggaaccacttctgaagaagaagaaaggctgattctggattgggtggatgcctcccccgagaatcggaaagcatttcaaaaagaacgcatgctatatgacatagccctattcacagacgaaaaacagatgaaccggaaagatagaaaagcccggatcatccctatgctgaggtggagtgcacgtattgccgccgtagtcattgtagccatcagtttcggattcttgtttaagaactatcagtatgaaaaatcagcttgccaacaaaccataacagtacctgccggacaacgcgcacaaatcacactggcggatggaaccaaagtatggttgaactccaaatcgaccttaacctatgcatccaacttcggtcgtaaagaaagaaatgtagagctggatggagaagcctattttgaagtagccaagaataaaaaaataccattcttcgtcaatacggagattaatcgggtgaaagtggtaggaacccatttcaatgtctgcgcctacaaaggcagcaacgaatttgaaacgactttaattgagggaattgtcgacatctatccgatagggagtgatcaggtaattacccggttgacaaaagacgaatttttcggatcgtacaatggaaaatataaaaagaccactttgccttcgtacgaatatctgagatggaaagagggattatactgttttgatgatgcaccctttaacagcctgctcaacaaactggaaaaatattataatgtgaacatcagcgtgagaaacctgaacatactcaactaccgttgtaccggtaagtttaaagaacaggatggcatagaacatatcctgaaagttattcagaaagatcataagttcacctatagtatcaacgaagagaaagacagcatcatcattgaatagaaataaggaaagagctcaatataaaccttaaattagtacgaaccattaaaaccagatacgcatgaaaaaatagaaaagaaagtccattattctcaaaaaaagagaatcggaaagtacccccatactttccgattcgaaacagtcaaaaatcgaccttaatcaatttattaacttaacacgttacaaagatatgagaaaaatttctttgccgaggcatttatgcccaaaaaattttgtttcaaaacaaatattgttagccatgaagatcactttattccttctctttttcgtagcattccaagcttacagtgagaatggatactctcaaagcactaaaataagcataccgcgttctagtctgaaagtaagcgaattactatcaaaaatagaatctcagacagagtacctgttcgtctacaataaaaaaaacgtagacaccagacgcagggtgaacgtgcaagccgataacaaagctgtatccgaagttctcgaccaagcattcaaaggtaccaacattaaatatgtgatggaaggtaacaacattgttctgaccagaaacaatgataatgccataactgcacaacaggacagggtaaccgtaaaaggagttgttactgatcagaatggtgaccccatcataggtgccaatgtactcgagaaaggtactaccaatggctgcatcaccgatatggagggtaatttcaccctcaatgtacccagtaacgccactcttgcaatcacctatatcggttatcagccacaaaatatccaggtgaacggacggcagagtttcaacgttaaactgcaagaggaagccatggcactggaacaggtagtggtaaccgctatgggtatcaagaagaaagaagcttccttgacttactcaacccaacaagtgggcggtgacgaattgacccgtgccaaagatccgaatatgattaatgcccttgccggtaaaacagcaggtgtacaaatcactaaaagttcatccggactgggtggttcggccaaagtttccattcgcggtagccgttcgatcagtggaaacaaccagcctctgtatgttatcgacggtgtaccgatgctgaacagtagcaatgaacaagcttccacagctattggtggtacagccgatgcaggtaaccgtgatggcggtgacggtatctcaaacttaaacccggacgatattgaaagtatgagtatcctgaaaggagcctctgcagcagctctctatggctcacaggctgccaacggtgtgatcttaattaccacaaagaaaggcaaagccggtattcaaaaaatcactttctcttctaatctgactgtagaccacgccatttgtttgcccgaattccagaacaattacgccatggaccctgaagccaaaaacagttggggaaagaatcaaacactgaaagattataataacgccgataatttctttcagaatggtgtaacagccatcaactccgtatcttttatgaacggcagcgaaaagatgcaaacttacttctcttatgccaatactacagccaaaggtatcgttgagaaaaataagatgcaaaaacacaacctcaacttccgcgaaacggctaacttctttaatgattacctgaagctggatgccaacgtgaacctgatgacacaaactatcaaaaaccgtcccacctccggtggctattatatgaatccgttggtaggtctctacggtttcccgagaggtgaagatttatccgaatacaagaataatttcgaagtcttcgatcctgcccgtaacatgaacgtacagaattggtatacttcttatcaggacatggaacaaaatccctactggattaccaaccgcatcaacagtaatgataaacgcacacgtgcgatcgcttcactaacagccaacgtaaaaattaccgactggctgaatatccaggcacgcggtacagccgactacacacacgaccagtatcaacagcgcatgtatgcttctaccgctcctgccttagcggggcaaaacggacgttacatcgacctgaatcatactgaaacattgtattacggcgacgtcatggctatggtaaacaaaaaatggaatgacttttcattgaacggagccatcggcggcagtatcaacagtacaaatgtaaactccctgagactggattctaaaacagcttccctatactatccgaatgtatttacggtagccaacattaaaatgacacaggctgcctacatcgatgaacaaatgaatcagaagcgagtgttgcagtctttgttcggaaccgctcagttgggttggaaagagagtctgtacctggatgttaccgcacgtaacgattggtcgtcgacactggcctataccaagcacagcagtttcttctatccctcggtaggtctgtcatgggtactgaacaatacagtgaaacttcccgaatggatttctttcggtaagatcagaggttcttggtctaaagttggcaatgaccttccattgttcatcagcaacacgatcccgggcagcaatgatatcatcggagcaggtggtgccatcgtgacttactccaaagcccccttcaacgatctgaaaccggaaatgagtacttcttatgaaataggtaccgaatggagattcttcaattaccggctcgatttcgatattacttattaccgcaccaataccaaaaatcagttattcacattgccttcatcagcaggtgccgactataaatactatatggtaaatgccggtaatatacaaaacgaaggtgttgaaatcactcttggagctactccggtaatgaacgatgctttccgttggaaaacccaattcaacttctccatcaacaaaaacaagattatcaagcttcatccggatctcaagacattcgtttatggtgacgaaagcttctcttcttcttactccatgcgtctggtagaaggaggttcattcggcgacatttacggtaaagcattcgaacgtgacgaaaatggcaaagtggcatttactacagataaagacggagacaagatcccgaacgttatcggtggcggcaatacagaaaaagtaggcaactgtaatccggactttatgttaggatggagcaatacattcacttacaaaggtttctcactctacttcttgatcgatggacgttttggtggcgatgtactctcacagactcaggccgaactcgaccaaagaggtgtcagcctgaacagcggtaaagcccgagatgcaggatatatcaatattgacggaacacaagtgaagcctagaaaattctacaccgcagtcagtggacgtgacggatgtacggagtactatatgtacgacgctaccaatattcgcctccgcgaactctctttgggctactcactcccccaaagctggttggctaaagccggcggtgcatttaaagatgtccagttgtcatttgtagcccgcaacctgttcttcatctcaaagaaagctccgttcgatccggatgccgttctttcgacaggtaacgataatcagggtattgacgtattcggcatgccgactacccgtagcttaggtttcaatattaagttcacattctaaaagagattcatcatgaaaaacaatatcaaatatatagcaggcatactcttaggaggattgatcggattttcagcttgtactaattcttttgagtcgttcaacaccaacgaagcaggattcgataatgatagtaaaaaacaggatttcaattattatggcatccctttgggaatcattcagcaaggaatctacttcaactacgactggggaagcggcaagaactggccttttcagaccatgcaaaacctgggggcagatctattctcgggatatgtgcatgacttcaatcccttcaacgaaggaaagaacaacagcacttactacatgatggacggctggaacggttctacatgggataacacctatggatacattatgccggaagtacagaaatcagagactattaatgaaaaagacaatataggattcttcggtattaccaagatactgaaagtggaattaatgcaccgcttatccgacctgtatggaccgatcgtctatactcagttcggatcaaaaacgggttctacacccgatacgcaacaagaagcatacaaagctttcttcaatgacctggatacaggtattgccaagatacgtgaatatcagaaagccaatccggacattgaaagttttgcaaaattcgatatcctgatgccgcagggaaaacgcacattcagcgaatggatacagttcgcaaattctctccgtctgcgcctggctgtccgtattgccatggcagactctaagctggctgtggcagaagcccaaaaagcacttacggatgaagaaggattgctggaaggcaatgatgaagtcgtagccgtttctacttcatcaggttatactaatcctttcggagaaatcaataaagcatggggcgaagtgtttatgaacgccaacatggagtctctattagtgggttacgaagatccccgcatggaaaagtattttgataaagcaaccggctctgatgcaacaagccttatcaactataaaggtacttacaaaggtatccgccaaggaacaggctttagtcataaaaactacaacggacattcaaaaagtaccattacccaacagacagacgccgtactgatgactcctgccgaggtatggttcctgcgtgccgaagcagctctgcgaggctggagcagcgaatcggtgaaagattgctatgaaaaaggtgtaaaagcatcatttgcacaatggggtgctgccggtgccgaagcatatctggagagtgacagaaagccatccgactatgtagacgctttcaaagcagccaataatgtgaaagcagtcaacacactgacccccaaatgggacgatgccgccggcaatgaagacaagctgggacgcatcattacacagaaatggcttgccatgttccctgaaggaggagaagcttgggcagaacaacgtcgtacaggctatccgagactattccctgtattggtcaaccaaagtgaaggtacggtagataccaacctcggaccacgtcgactgaacttcttcgtaggtatcaaaacgaccaatcccgagcaatatacccaattggtaaatgcattgggcggaatcgacaactgcggcactcgcctgtggtgggacaccggaagaaatttctgacacacaaaggtataaattttaattagtgggttttcttcgtattagttgcggggaaaagattgggaaggggcaaagtcgagggggactttgtccccttttttattaaaaacagaatcaaaatagcaaagaatgaagaatccagatcatgatctataacagattagcaataagcatattactcgtcacaagatgtttcaaaagacgttcgtcttttgaaacaggattcttgctctctgtacaaaatgcaaagggaatagataaatgactgataattaaaacgatgcgaaaagatttgcacaagtaaaaaaagcatcttatctttgttgcatcagacgaacgtcttttgaaacaccacctgtgtattcaagacagttatatctgattggaatacacaaacttacgcataataaaagttgtatcaaacagtctttaccgacttatacccttatgtataagtcgggcaagagattttgatctgattattcattaaataaatttagaatgaacaaacttttgattatgcggacacacctcctatggatcggagtaatgacggcatccagcctttcgttgagcggatgcacgcaagaagaaaagtatccattttttccggaaaaaggttatgattccggtactgtaatccctattaaaatcagtatggctgaaaatggagagtacgattcctatactccggaaaacgacatggctcctcgttacaatgctcctctgattgccgaatgggcaggagtacaaactctaagccgtacccgtacaaaagaatctccggaatataatggccccagaatcgcatctatggaactgacagaaaatactccttccaccctaactacccgtgcaaacactctgtctacaggtgtttactttcgtctgatcgtattccgaaagtcagggaataactatgtgttccaatcggctgcagactatacctcaaatggtgcttcttcacctgtactgaagaaaggaaaattactcacacgctcaggaacgatccgggtcatcggatactcattcaatacaactgcgacattgggggatatccccgcatcatatacatataataccaccaagatagatatccccaacatgaataatgactttatgacttatgattcaggagacatagccaatgtgaacagtcttaattacaatcttccggtaatattcaaacagaaactgtgtaaactgacaataagcattagtgtaaccggcttcacaagtaataccatcagcgggtgtacaggggtatacgtaaagcagggaggtaattcaacctcgtgggtaattggcagttcggcagtggctgctaataccagcaacacagcttcattcaacccaaacactaaccagactactacgatacacatggttcctttcgcaagttcccggacaataacagtacacttcaacaagctgacagtaggaaatctaattgctaataatgcggataatatcgatattgcttcaactcagagtgtccaattgaaagagggaatgagctatacaatgaaaatccagtttaagagaagtcccggaataaatgttccggcaggtagcatcaatctgagcaatccgaaaaaagcatgtaccaatgatgataagcaaaagttatcaaaattggtatttgccgacggcaatttaaaaagtaccggtgcaagcaacaattatgtatgggcaaccaacaaagaatatggctactattaccaatggaaaaaagactataatggaaacaacatcgatccatgtgccagactaaatcccacaacttatggtagtggttggcggctgcctacacgcaatgaattagaaagattgggaagatgcaataatgtaaaaaaggtctctaatggagtgaatggtgtgtggttcctaaatgccacaaccggtatttttttaccgttaggtggctggcgtaataataactcgggaacaacggcagaagactggcctggaacgtatggtcaatattttacagatgaatcaattaatactaatgattgttatagattggatatatctcccggagaaggtaaaaccgatgtcaatagcacaccaaagaaaatggcataccaaactcgttgtgtcaaaggacctaaactataatatttccccttaaataaaagaagagtaaaaaaacaaagacagaaacagtgctgataacctactgcctatttttttcggagatattccgtaaattacaaaatacaaggcaactaattcatttcgaatcagttgccttatttatattttaatcatttctccaaaaaattccgaacacctcaatcgagggagaagtctaaaagaaatcccctactattagatagtcagtacaactcgtcaggaatctattatgaaccaactttgcaagcattgccataccctggatacaccaagtctttcgatattagcaaccacacatactctgatagtaaccgtccaaaaagcaagtataaaactcaaacaaaagaaaagttcacttctctaataataaatatcttatgttataagaatcatgtttcaaaggacgtacgtctgatgtaacaaagataagacgctttttttatctgtgcaaatctttttgcattgctttaattatcagaagtttatcgactccccttgcatccagtgcggagggtaaaaatagtgtttcaaaaaacgtacgtcttttgaaacacaacaggcgttctatctgtctaatttacacaaacttaccgcaaaataaaagctgtattcacagcctgccatagccggcctgcccattcttaatgggaaggccttgctgagtatgatctattttattcatttttaaacatttgagttatgaatacgaagacaaaacttctgtatgtaggctttcgtgcgttaagcacatgctgtctgtacgcggcttttttaatgataacatcgtgtggcgacaatgttgtgaaccccgacagctcggaaccggacggagaggatatgattcctgttacggtcagccgggttgaggatggcagctatatggaaaaccatgttgatactcccgacacaaccgggggaagaacgcttgtggacgaatgggtgccggtgaaagagccacccgccagcagggtcataccggctgccgtgccttacgaggggcctccagcggtacggatgacgctccgcgaagaaccacaagtcactacccgtgccgctacattgggcaacggcatttatttccggttgatcgctttccgtaaagtaggcagcaattacgtgttccagtcggctgcggattttacgacgaacggggcttccgctcccacactcaggctaggaaatctgctcaccagaacgggaaccgtccgtgtgatcggatactcgttcaatagtacggcagcgatgggaacgatcccttcatcctatacttataacagtacttccgtcactatcccgaatatgaacagtgactttatggtctatgactcgggggacatagcgaatgtgagcacaatcagccacaacctgtcggttagtttcacgcaaaaactctgcaagctgacggttaaactatccttgtcgcagtttgtaagcaacacatttaccaactgtacgggcgtatacgtttctcaaggcggcaatacgtccgcctggacgataggtccttctacaaataatgtaagtgccaataccggaaatacacctacattcaatatagccaataattcgactgccactatacggttagttcctttttcgggttcccgggcaatcacggtgcatatcggtacgctgactctcagtaattacttcaacgcaaataaccggaatatcacctcgagtcagaatgtccagttgctgccgggacggagctataccataacactacagatcggacttgggatacaagtggcggcaagtgacattaacctgacacaaaatggatgtacagcgagtgataaaaatgacttggcaaagttgagatgggccacaggaaatttgaagagtaccggaagtacaaattatgtatgggcttcttcaacagatagaggttattattacacatggtacagtacctatacaggaaacacaaatattaataatacagatccatgttccaaattgaatacagcatattacggtacaggttggcgaacaccttcaaagaatgaacttatgaaattagcaagatgcacaaacaaaatattaactaatagtggaatgtggtttatgaataacagcataggactttttttacctgctgcaggttgtcggcaagacggaaatggtagtaatacttcgccaacaacagattccggaactgatggctactactggagtagcgatataggtaataataatacagggaaaagactatattttggtaaacgttataataccgcagatgtagcggaccatgccaaaaacgccggactgactgttcgttgcgtaaaaggcactaaacaataatattcacttttaaaaaaatagataaatcatgaaaaccgaactcaaaggctggcttgcggacaataccgtaaccaccgacaacaaagaagacaaaatcctggtattggaaagcgccggaaacctgacactatccgatgtactggatgaaatgaagaaagaagataccggcttgcgggcagagactttaaagcatgccgtcgatctttttcagcgtacagtatcggaattggtactgaacggatactctgtcaatacggggttattccgtgctgttccccagtttcgcggtgtaatagacggtggagtatggaatcctgagagaaattctatctatgtttccttcaatcaggataaggatttacgtgaagctatcgcacgaaccggcgtgaaaattctgggagccaaaggcgattcggcctatttcatcggtggtgaagacgccgccacccgtgctacggacggtagtgcaactgcaggacgtaactatcgcttacaaggcaagaacatcaaagtagcaggtacagatcctgccgtaggtatcgtcttgattgatgaaaaaggcacggaaacgaagctaccgatggatatgatagcagtaaacaacccttcggaagtattggtgctacttcctgccgacttgaaagacggaatatacaaactgcgactgactacgcaatataccagtggcaaccggcaactgaagacaccacatgtcatcagccaaaccatcgtaataggcaatacaaccgagggcgacggagatattgtggacgacccgacagcataaatcataccgcatcgcttcccttatgcaggggtgcatcgatatcttgtgcagttctgcacaaggtgccggtgcacccctgcacaatgcggcaatgcaaccaagctctaaaattactgataaacctgtaccggaagttctccccttaaagcccccaaagcattcaatgccaaagcctccatctcatcttctcccggatacacgaaaacgggagcaaggaaagagatacgttcccttaaacgggaaattacataatcggaataggcaatgcctccggtcagcagaatggcgtctacctttccacataaaacagtagaggcagcaccgatacttttggccacattgtagatcatggcatcgagcaccaaccgggcatggtcatcacctgcctcaatggactgaataatggcaggaatatcagtagttcccaaatgggcggtaagcccggcacgacccgaaattcgtttcttcaattcatctttggtgaatttcccgctgaaacaaaggtctatcagttgtccggcgggaagagttccggctctttcgggtgagaaaggcccttcgccatccaatgcattattggcatcgactgcacgcccatgacgatggactgcaacagaaatacctcctcccaaatggcagacgatcaaatcaagatcttcataacgagtgccatgttcggcagcataacgacgggcaatagctttctgattcagtgcatgccagatagtgatacgcggcatcaaaggcgaaccggtaatacgggcaacctcttccagttcgtccaccacacccggatctgcaataaacgcccggcatccgggtaaagctgcggccaattcatcggctatcaaacctcccagattgcaggcatgtgtacgcatagcgtgaagggtatcccgcttcatggcttcgttaacctcataaactccaccgggaataggcttcaccaagcctccgcgtccaatgacagcatcgaaccggaaaggaatatcgtttacctccaactctcggagaacaagcgatttacgaaattcgaactgatcgatcacccgggggaaggcagacaactcttccaccgtatggcggatgttgcgtaccaacaaaggagtttcattttcataaacagcgatctttgttgaagtggaaccgggattgataacaaggagcctttccccccgtccattcttcacagaagacggagtagagcttatattcagtttatccatattcttagtttaattatgatcatcattcggagcatcttcctctctctgccgaccgggtagaagctgtcagacacgccatcgcaatactataatacttggaaagtccggaatcactgcgtgacggtaacaccaccgggcaaatggggccttgcagcaatcctgccatatcggctttggcaaacaacgaaacagatttatagaaagcattgcccgactcgatattggggaatatcaatacatcggcctgtccgttgatgggcgatacaattcctttaatatccccgctggcctgctcgcaagaggtgcgtacatccaacggaccatcgataatcacattaccaaactctccggcttcggccaactccacaatattaacataatcgagcgaatggggaaacttggcacttaccttctccgtacaatggatcaaagagatacggggttgttctatcccaaaccgccggcaagtacagatggcataccatatcatctcaatgcgttgttgcaaagtgggacgaggaataacagcggcatctgagaagaacaataatttatcatatgtcggaatctgcattacggccaaatgagtcagaatcttccccttaggcagcaagcctttctccttgtcgagaatggcatgaagcaaattgtcagtattgataatacctttcatcagaatatcagctcccccttcccgaacaatacgaacagcttcacgcgctgcctcatcgggatcttcaatgtggagggtcttcacatattccgggtacttctgcagactgggatacttttgcaggatggccgagtcaccaatcatcaggaattccgcaatctcttcgtcgagtgcacgggcaatggcatattctgtattcggatcgttggcacagacaacggcaatccgtttccgccggtttaaggttttgagatgggctgtcagttggtcaaagtttctaataggttccataacgttagatttttagcaaatatcagaaaaaggatcgagaagtacatcatggaatactgaaaaaatagacaaaccgagtaacattttgatataatacaacgctttcatttctacggatgcaggtaatttcgttttttaatgtaaatttgtgtcctgttaaactcctataatcaaacagaaccatgaaaacaaaaacatttctcgctcttttctgcctgttgtgtatcagttcaggcttttcatcgtgccaacgtcattcatccgaccagtggaaattggtttgggaagataatttcgaccagaaaacaggttttgatccacaggtctggagtaaaataccacgtggcaaatcagactggaataactatatgaccgacttcgattcctgtttcgacatgcgtgacggcaatatggtgctgcgaggcatcatcaattacagccagcccaatgatacagcaccctatctgaccggaggaatctacaccaaagggaaaaaagcattcagcaacggacgcctcgaaatacgcgccaaactgaacggtgcacgtggtgagtggccagccatctggatgctcccgatagatgctccctggccgatgggtggagaaatcgatatcatggaacgtctgaatcacgatacaatcgcttatcagactatacataccaattatacgtacaatctgggtatcaaagacaatccgttatcacactccgtaggtgcgatcaatcccgacgactacaatgtatattcagtagaaatgtatccggacagcattgcattctatatcaatgacacacatactttcacctatccccgcatcgaaacagacaaagaagggcagtttcctttcgaccagcctttctatctactgatcgacatgcagttgggtggctcgtgggtaggggctgtagacccgaaagaacttccggtggagatgtatgtagattgggtaagattctatcagaaagagaaatagaacctttttaccctacaagcgttaaagacaaatcagatatcagcttattaaatcactttattaaatgaacttacaatttcccccatttctgcacgaaggcgataaggtagccatcgtatcgccttcaagcaaaatagacagtatattcctgaaaggtgccaagacgcgtctaagctcctggggacttactcctgtcatgggagatcatgtccgaagttcatggggctcgtatgccggtgccacccatcagcgcctcaaagattttcaggcagccatggacgatgaagaaattaaggccatcttgtgcagccgtggtggttacggagcggttcacttgctggataagctggacttcacacgctttcgtaaccacccgaaatggctgatcgggtttagtgacatcactgcgctccacaacttatttcaatacaatggttttgcctcactccatgctcccatggcacgccatctcgctgtaacaggagaggaggatccatgttcattatatctccgcgacattcttttcggtaaactgcccggatataaatgccaccgccataagttgaatcatctgggacaggccaaaggcatcctgcgaggcggcaacatggctgtgttccacggtctccgcggaacaccatacgatattcctcccgaaggtacgatcctcttcatcgaggatgtgggcgaacgtccttatgccatcgaacgcatgatgtataacctgaaattgggaggcgtacttgaaaagttatccggacttatcatcggacaatttaccgaatacaaagaagactattcactgaaaaaggacctttacagcacactggatgccttggtgaaggagtatgacttccccatatgttatgactttccggtgggacatgtgacagagaacctaccactaatcaacggtgcggaagtggagttcgtatccggaaagaaaggagtggaattgttaataaaccctcctatctgactcaccctacagtgaaaatcattaattttgaggctttaaactccaaaagcataattatgaaaagaaactctatgttcatactgtcagctttcatcctgttttctgctttctcctgcggaacaaacggcagcaagaccacttcgaccgacatcaccgagaaaaaggtaattgtccaagtgccccaatttgacgcagacagtgcttacaagtacatacaggcgcaagtcgacttcggaccgcgcacaccaaattctaaaggtcatgttgcctgtggagactacctggccgccaaactggccgaacatggagccaaagtgatcagccaaaacgctgaattacccgcatacgacggtacactgctgaaagcacgcaacatcataggatcttttaagcccgaaagcaaaaaacgcatcgcactctttgcgcattgggatacccgtccatgggccgacaatgatccgaatgaaaagaatcatcacacaccgatactgggcgccaatgatggagcaagcggagtgggtgtattactcgaaattgcccgccagatcaatcaacagcaaccggaactgggaatcgacatcatctttctggatgcggaagattacggagcacctcagttttatacaggcgaacatcgggaagaccagtggtgtctcggcgcacaatattgggcacgaaccccgcacgtagatggctataatgcccgcttcggaattttactcgatatggtgggcggcaaagatgctactttctttaaagaagtatattccgagaaatatgccaaaggtatcaacaagaaggtatggaaaaaggctaacgacgccggatacggacgttactttattaacgaagtaggcggtcagatcactgacgatcatctgtttatcaatcgcttggcaggtatcccgactatcgacatcattccaaacgacgaaaattgtgaactgtccagcttcggaccgacctggcacaccgtgaatgacaatatggatgccatcgaccgctctacactcaaagctgtgggacaaacggtactggaagttatttataacgagaaataattatttatcatgtcaatcaacgaattacaagacgaagtcgttgctgaattcagcgactttgatgactggatggatcgctaccagttacttatcgacttaggaaacgagcaggaaccgctcgacgagaaatataaaacggaacagaatctgattgaaggttgccaaagccgtgtatggcttcaggcagacgaagtagacgggaaaattatctttaaagcagaaagcgatgcactgatcgtgaaaggcatcatagcactgttgattaaagtcgtatcgggacatacatccgacgagattcttaattcggaactctactttatcgacagaatcggtctgaaggaccacctatcccccacacgtagcaacggattgttgtcgatggtcaaacaaatgcggatgtatgcactcgcattcaaagccaaagaggccaaaggctaaatctccagataaggatgtgtcaggactcgtattcactacagatcacaccgatttacacagataaatattactggttatcagcagattaaaatcatcctgtgttaatatctgcgtaatctgtggtgaattatgacgtacctccatcttcttcatccacctgatactccagaatatcccccggctggcaatccagcactctacagatcgcctcaagggtagagaaacgaatcgctttggcctttcccgttttcaggatagaaaggttggcaggcgtaatgtcaatcttctctgccaactcccccaaagatatttttcttcgggccatcattatgtcaaggtttactattatagccataattctattaatttttcaatattcggattcagatagtaagatcttgttcttctttcatcttcaacccgatggcgaatacctcgcctacaattagtgaaaccagtcccagaatgaccagcatcacagaatctatgcttgtctccatagaatatccggacaacgagaagactgaagacaactcataatcattcatcagggccggcactgcctcactaataaagttcagcaacaaggcgactcccaaccatcgcaaccgacggacattcttccaattaaaaatatccgatttattgatagctacaatcagctgaataaaaagcactgttgacgcaatgatggcaaaaacagccagaagcccggaaatcacctgggcaaccatcatccaggtactcctgtcgacttttacattcgtaaccatctgtgtataggcaacggggacataagagccggtcttttcattataaacagaatctttaaaggacgaaaaatccttgggcatcagtgtggcaatccgaaagttgatagcctgctctacactttgattaccggaatgacttatcttcatcccttcggaaaagccatgaccgaaatcacgccccatattaaacaccgaataacagaataccagaaaaaccagtaaacatagtatgttcaatcttcttttcatattatgacttattattcaatctttatcgtttattttcattcatctttccgccacgttcccggaaccgtaacctgctttatccgaagaaaacagcctacgaacaccatagccgccactgctatcaatagataatagggagtcgtacccgtcacatccctgattgtatctgcatcgggataggtcagactcagcatgacagaaatactgttgttcacaatgtgtatcaggatacaaggaatcagacttcgtgtccgataataaacccatgccagcaaaaggcctccaaagaaggctgcaactatctgagccggattcaaatgaaatactccgaaaagcagtgccgaaaggaagatggctttccggggagaatagcgttcaagcaatgccttagtggcaccaccacggaacagaagttcctcaagaatcggccccaacaaagtaatggccacaatgcctaaccaaccggactggagagcgtcgaactgctgttccagaatatcaggaacccaagataagacggcagtcaacatatccatcaggacagtcatcgacaagcctatcagaaacgttatgatcagaaatggaaatgaaatgaatgaccaacttgtcttgtctttgggtatatagtgtgctttccataaataaaaaaacatcactgccatggaaagcagcatcgaaggagccaatgtcaactccgaaacccgggtggcatctacgctcccaccattcatacgggcaatgatagtaaaaggaataccgatcagcccaccgcaaataagctggattcccagataaatcagaattaatttgatcgccgttttcattcagtcttttgttttaaatatgtacaaagataacggttttaattgactaccgcttcggtagaagagctatttgtatggtgaccatgcaaaactgaactacatacaaacaaagctaacatggagatggatactaccaacatcgtaatgctcatcaatgactttctcataaaacttactttgaagattcgttatgttattcaataataatttatcgtttttcgatatgcaaagattcatattaattttcacctaaacaagtaattcgataattatttatcgataaacaataaatatagaatgtttttcgatatttgtagaggataaacgctgatataaagaagcctcaaagaaccagcgtcagggagagtatatccatttgatagcgtattacacctttagacgtcactctgacactattcatcctaatctactgacacgcactaaaacacaaatcatcaaacaggaagaagaaaatgcatacaagacgcatataacatgcaataagatgcaacatcgaccgaagatttccaataaatatgcatgatatctttagaagagaggtcacataccattaaaagaaagacatcattgggttaaaacaaaagcttcattagttcaaaacttcacctgcatgaagccggaagagagacaaaagaggacatttgcatgcctgcaatcatttttcagcacgcatagaatgatcagggagagaataacgatttgcaccttaaaacagaatattctgcaaattaaagaacacagaacaggctcaaaacagaacaagagacatgtattatccgcaatcaggatgactatctgaaaaaccgaattcacaaaataagctcctatttaagagccggaagataacgggccgaatataactcactcagtggcaaacaaaaaatacaaaatgtcaattgacattttgtattttccccaaaagcgcttccacatcggctgcatcctgatgaagctgcgctatcaatccttcaatcccatcgaacttcagctccggacggagatattttacaaaagagaggcggataaatttatcgtaaatatcggaatgaaaatggaggatattcacttctatcgaacgttcgggaccattccctatcgtgggacgagtaccgatattgagcataccattatacgtatgcccgtcgaacgtgacatgaactgcatagacaccatcggcaggaaccaacttatcaggatcgtctacactgagattggccgtagggaatccgattttccttcctacctgataaccgctcaccaccgtaccatccagaaaatagtcgtaacccagacaacgtgcagcccgatctacttcgccctgatgcaacatcttacgaatgacagaagagcttatatggagatcatcacacacacaggcacgagcacgaatcacctctattcccatttcagagccataacggcaataatcctcaaagccttcactacgattgtgtccgaagcggtggtcatatccgatgacaagtgtctgcacccgataacggtctctcaggatatcggacataaattcatgggcagtcagatgtgatacttcacgtgtaaaatcaagcataaagcaataatccacgcccgtttcttcaagcagcgccagtttctcttccgaagtggtcaataactccggacgatagtctgcattcatcaccttacgaggatgaatgggaaaagtaatcagtgcagaacgcaatccacgagccgcagccaactctctgacttgttctatcagaaagcgatgccccatatgtactccatcgaagaaaccgatggtggcaacacatggttcgggtagaactcccggtatattacggattatctgcatgctgtttctcctatttattttaattctcggcaaaaagcggcctccagtcttcaccgggtttcactgtataggtagagatgcccaatgcctgggcgccctggcagttggcttcggagtcatctatgaaaaaagtttcgcgcggatcgaggtttgcatcatcaagcactccccggaaaatctcttcagcgggctttaccattttcatttcatacgagaggtacatcttttcaaaatagtcttctacacggaaaccccgatacggaaacgcatgctcacatgcccacttccaatgtatctcgttggtattgctcagcagatagaccacatatttctcgcggagtttcaataacatatcaagcttaaaacgtggaatatccaccaagaaactattccaagcagcatcaatttgctcatccgtcacctcctgagttatctgcccgcggatactatcacgaaactgggctgacgagatcaaccctttctcatgttgcataaagattccctgctgagaatacatgcctaacaattcgtccaccttctctaatcccaacttccggaagttttctatacaacgctgacggtcgagattaatcaatacaccaccaaaatcaaaaataaggtttttaattccttttcttttcatctctattctgtttttgaaagcttatacacgacagagcacgcaaaggaaacggagtttttatatcctgttcataaaagacactttctttgcgtccactgtgataaatagctttcattttcatttctgagttaaacgtttaaccaagcgaatcaattctccaatccacaagacgagagaagaagaaccgatgatgataagccatgtttgccagtcgagcggttctgtacggaatacagctccaccgaactgcactataagaaactgcccacccaggatggccagtacaatcaattccattccgtacgacttcgtaagacccttgaatgctgaatcggtagtgccaaacacacgggcgttgaacagattccaaaactgaagcattacaaagaaggtgaaaaaaatggtcaaccgctgtaccgtcattccaccgtcggcatttgtaaagtagtatatcatcgccatcagtactaccagaaagagtgtaccgacaccgaatatattatgttgcatcgctttactaataataaaatcagtactgcgacgcggtttatcgttcataacactctcacttggcggaatagaagccaaagctaaagcggcaaatgtatccatgatgagatttacccataacatttgggtcacagtcaacggtagttctgttcccacaatagaaccgagcaatacgatgagaagtgccacaaagttaatggtcagctgaaatacgatgaaacgctggatattcttataaagtgaccgcccccacatcacagcagtcccgatactgttgaaagagtcgtccagcaaagtgatgtcactggcctctttggcaactgaagttccggtacccatcgaaagccctacctgtgcatgattgagcgccggcgcatcgttcgttccgtctccggtcacagccacaacggctcctttctgctgcagcaattgtaccagacgctgtttgtcggtaggacgggcacgcgacataattttcaagtccatcactctatccaatgcttcttcatcactcaattcggcaaaagcaactccggtaatgcgattgtgttccgtatcttccggtttccacagcccgatctgacgcgcaatctcagttgcggtgcccggagtatccccggtcacaatcttgataccgatacctgccgactggcatttagctactgccgcaggcacatcgggacgtataggatcggaaatagcaacgactccaaggaaattaaggttattttctgaaacaagtgccacacagtcatccggttcgttatcttccaccaaacggaatgcaaaaccaagtgtacgcatagccatattctgataacccagtaattgtgcttcgacagtcgaacgatattccacactatccacacgacggccatcgagaatcacctccttacatttgccaagcacgatttcgggcgcaccttttatatataatacctttttgcctatcaacggcgacttcaccaaagtagccataaacttacgttcagtcgagaacgtcaattggtcgagcacccgtgctccttctctgagttcaagatagttacgtttctggctattcagccacagcaacaaggcaacttccgtaggattacctactcctttcggcttctcaccctctcccgtttcttcaagaaaagcagtggagttagcactaatcccttccgcaatcagtctgctgatatcgtcatctgccagtttcccaccatctttcaaaccatagaaattgggctcgtgcacctgcatcagattttgtgtcaacgtaccggtcttgtctgtacaaatcacggtaatcgcccccattgtttcgcaagcgtgcatcttacgcaccaaattgttagtggcaagcatacggcgcatattcagtgccaggctgagtgtcacactcataggcaatccctcgggaacggcaaccacgatcagggtaaccgccatcatgaaatatttcaatgtacgctccaacaccggcaaccagtcatgccaaccgttcagagccccaaaatcgaaatacagtacaacgtcttttataaagaaaataaggaaagcaagtccggctacggtaaaaccgatcttaccgatcaggttggccaatttggtcagctggatattcaatggtgtaggctccgtagtttgttccgtactctgacgtgccactttcccaatctccgtagcatctcccacacgaagtaccttcatcgatccatgaccatcgaccacagttgtaccgcgcatcaccagattggaagcatacgtagcttcttcatcaaaatcggcttcgattattgttttattaatcaccggttccccggtcaggttcgattcgttcacctgcaaagaaatagcttctatcagttcgccatctgcgggaatctcttcaccggtctccaataccacaatgtcacctactaccacatctttacgcggaatctcctgaatacgcccgttacgaatcacctttactaaagtctcttcattaacggcattcagtaaatcgaatttcttattggcatcgtattcgaaatagaaaccgataccggttgccaacaggatagcggctataataccgatcgtttcggcatactcattctcgataacggaaatgataagagagaatacagctgcaataagcagcacacgtacaacaggatcttcaaatttttccaaataaagcttcaggagcgaaggacgcttaggaggcgtcagtaggttggcaccatatttctcccggctttggagaacttcttgatcagtcaggcccaaatgaaaataatcgtcgttctttgcagtcatgcagatacatacattaaattagaagttgcaaaagtacaacataaatccggtataagatgtttcttaaatcttttttaaggattccagttttcccaacagtacttttgacgaaatgggcttcgtcaggaaatcggtaaagccgctatgcatgattttctggcggtcttcttcatacgcaaaagcagtaagagcaatgataggcactgtagccgacatctgtcggatagcctccgtagcctcgtagccattcacctcaggcatacggatatccatcaagataatgtccggttggaatttcaggaaaagagaaatggcctcttcaccattgtgagcccaatgtaattcgtaacgtgaagcgaggatagcttcgcaaagacgataattgtcttccatatcttcggccaccagtatgctcagttttttatcacttcccgcatcgataaccggaacccgtactgcagaaggcaattcttcctgctctttctcaatgatgactttgggtttaatatcggaatgttcgggcaatgtaaaccaaaaggtacttcctttgcctacctcagattcggctccgatttccccacccagcttatttacaatcgtcttacagatagagagtccgagtccgttaccgtttttatcactttgcaaacgcacaaaacgatcgaaaacaccctccaatttatccgccgaaatacccgaaccggtatcgctaacataaaaccgaagtccattctcggaagactgatatccgatacggatactgccctctgtggtaaatttgattgcattagatacaaaattggacacaacctgagcaattcggttacgatccgtatgaaccatacacgaaggcaacccgggctctgttataatctgtacaggcgagttagagcctatcttcatacggaacaattgttccaaatcattcagtaacaagttgatatcgacatcagaataaacaaactccaatgtaccggcctcaatcttcgacaaatcaagaatatcattaactagctgtaatagcaattcgctgttcgtatggagtatctccaggtatttttgcttttcttcttctgtattggccgctgccagcagttcggaaaagccgacgatggcattcagtggcgtacggatttcatgactcatattggctagaaaagcggacttggaacgatctgcattttccgctttttccttcgcttcagccaacgcctcttccgtttgtttaatcgaagtaatgtcatgcaccgtcagcaccatgcgctcttcactatccagagtcataaatactcccgagatcattacgtcgcactttacaaattcatgctcgtctatggcaatattcagtgatgattgcaaatcagtaaattctttcttctggcggaaagcgtttcctattgctcccctcaccggacattcctggcaaaaagcatgggttccgcatccccctttggcagacaaggcattccggcattgcaacagatcacctacacgcttctctttaccgtccggactgagatgagtcagatcataataattagttttcaggactttgaaatcagaatcgattaccaaaacatacgcatgaatatgcgtcagaatcgcatcaaacagacaatttacattctccagtttccggtccgatgcagattgcattaacttaccttgtctcttttcccacagaatagctcctaaaaaagccacacataccagtgataatacaatctgccacatcatagtttataattccttgattaatgttttgttgctacagacaaaggtagtgctttattaatgaaaaaagaaaaaataaatgaacaatacgtccgatacttttgttatatttgcataaacttaaaaaaagagacgacatgaagtacatttgcaccgtttgtgatttcatttacgatccggagataggtgatccggaaggcggaatcgaacccggaacacagtttgaagatattcctgatgattgggtatgccctctgtgtggagttggaaaagaagatttcgaaccgtataatggctaaacgattcattaacgatgaacgataagcgatgagcactctcaattacacgctttatcgttcatcgttcatcacttttctcaagacgctttcttttcttttacgtcactgctcgcttctactacatttactacatagtcaccgagtttttcacattcggcgataatatccatgtaataaacgcccatctgataatcatattctttattattcacatccaggatattctgattcttcagttggttacgatagttattaatttcattctcaatattgaatgacttattaacatcgatactctgatgttcgggtttctcgaccacgacaatcatttgcgacagagcatcattggtcagtttcatcatgaaatgaatgtgctcatattgcttctctgtgaaatcctgattggtctgacgcttccggctgatggtacgtgccaggttatagcaactgtcaccaatactttcaatctcggttacctcacgaagcatggcacgtatctgaagcttactttctgagctcaaacgcccttcagatacctgattcaagtaattggcaatctccaattccatattatcactgatattctcgtatttctcaatccggctgaaaagtttattgaagtcatcatccttttcagtatgcaacagatcttgtaccataccaaacatacgatgaatacgctcggaaaacagatgaatctccttacgggcctgaagtatggataattcggccgtagaaagcatacctccggtaataaagcgcaagcgtggctcttcatcttcttccttgggacgaataatggcacacacggtacgctcaatcagtttcactccccaaatcagcagacagacgttacatatattaaaaatagagtggaaagcggacaacttataagaaatagccacctctgcacttcccggatggaagaaggtatcgaccacccaattgacgaataccataaaaggatggaaaataatcagcacccagatcacaccaaaaacattgaaaacaaagtgagccaaagcagcacgttttgcttgtgaattagcagtcaaggcagccaggttggctgtaatagtagttccgatattctcacccaagaccaatgcggcacccagttccaggctgatccatccgttggcacacataattaaagtaatagccatcgtcgcggcggaagcctgtacgatcatagtgagaatagtaccgataaataaaaagagcagaaccgagaaaaatcccatatctgtatagttctgtacaaaagccagcatttccggattggcattcaggtcgggggcatttgctttgaggtacgaaagccccataaagaggaaagaaaaaccaaagataaattcaccgatagacttacggttacttttacccgaaaaaataagaggaagggcaatggctaaaagaggaagggcaaaagcagccatgtcgactttaaacccaaaaatagaaatgatccatgcggtgactgtcgtaccgatattagcacccattatcacactaatggattcggccaatgtcagcagaccggcatttacaaaactgaccaccatcaccgtcgttgccgaagaagattggataagggcggtgatcaacacacctgttaaaactcccgttacccggtttgtagtcattgctgtcagaattcctcgcaatctgtcacctgcgactttctgtaagccctcgctcatgatcttcattccataaagaaaaagtcctaacgagccaatgagctttaaaaaatcataaaaagaatattccatctataattattttagtggttgtttgtcttcttagcaattatgtgatatatttatccgtactattcaccccaaaatgacgtgaaatgaaacagatgttacaaatatattgcaaaaataataatatttctaaagaattccctattgggagctcacttttggatatttattacggctttaatcttaattttccttatcaggtagtcagtgctaaagtaaataatcgctctgaaggactcaattttcgtgtatataacaataaagatgtagagtttctggatgtaagagattcttcgggaatgcgtacgtatgtgcgttctctctgctttgtgctctacaaagctgtcagcgaactctttccgaatggcaaactttttgtggagcacccggtatccaaaggatacttctgcaatttgcggatcgggcgccccgtcacacttgaagacgtgtcacaaataaagaaacgtatgcaggaaattatagcggaagacattacctatcaccgcattgagtgtcatacaactgaagccgtacgtgtattcagtgaacggggcatgaatgacaaggtaaaattactcgaatcttccggttctatctatacctattattatactttgggaggtactgccgactattattacggtaatctgctcccaagtacaggatttatccacttattcgacctcgttaaatactacgacggactgttgctgcgtattcctaacaaagaaaacccatctgtactggaagatgtggtaaaacaggagaaaatgctcgatgttttcaaagagcacctgcgatggaactacatcatgggattgaacaatgtaggagatttcaatattgcttgtgaagagggacatgccacggacctgatcaatgtggcagaagctctgcaagagaagaaaatagcacaaatagccgatagcattttccaccgcggagaaaacgggactcgtgtaaaactggtgttgatttccggaccgtcatcatccgggaaaacaacttttagtaagcgactctccatccagttaatgaccaacggcctgaaaccatatcccatctcactggacaattattttgtagaccgtgaagacactccattggatgaaaacggcaattatgactatgaatccctttatgccctcgacctggagttattcaatacacaactacaggctttgttgcgtggcgaggaagtagaactgccccgctataactttatgttgggaaaaaaagaatataaaggtgataaattgcggatcgacgaacatacggtattgattcttgagggaatacacgcccttaatccggaactgactccgcaaatcccggcagcaaataagttcaaaatatacgtctctgccttgacaaccatctcgctggacgatcataactggatcccaacgacggacaaccgacttttgcgccgtattatccgggacttcaactatcgcggctattctgcccaagagactatctcacgctggcccagcgtacgcgccggagaagataaatggattttcccttatcaggagaatgccgatgtgatgttcaactccgcccttttatttgaatttgccgtgctccgctgtcatgccgagcccattcttaccagcgtgccacgtaactgtccggaatatgctgaagcataccggttgctgaagtttatcaaatatttcactcctgtacaggataaggagattcctccaacctcacttttgagagaattcctgggaggaagcagttttaaatattagatagagccatattccaaatcattatcagacatagactttacaaataccggcttcggagagagccttatttgtagaatctatgcctgaattatcaaattttatccacctttcaaccaaccggtaatgcccgccattcctctttgaagaagaatcaaagaagaaatgaaaaataagagggggaaatgagaggtttctacaaagattttttaactttgtcactgtttaaaaccaaatcgcatgaaaatatcgactttaatcctgaccatcctcgtttgttttagcacaatcgtcgatgcacaaggcacacaaaacagagcaaatgaactgatgaaacaagcgcagagtagtctggaacaaaaagaatacactaaggcgcgttatcttttcatccaggcctatggcgctttcgcaacgcaggaaaattatccgaaagccgtggaatgcggaattcagggagcagctctgtaccatcgtgaaaattattacaaagaggcattcgacctctgtagaggaatggatcagctagtctgggccggtgaacaaaaacagcagaaacaattttacccgctacgtttccaaatcaccaaagagagactgcagatgtacatcggactaaagaatgcggcgcaggctaaaattcaattggataagctggcagaaaccgcaggcctggccaagaacgattcattaagcgagaacctactatatacacaggcaagttattactacacattcgggcaaaacactcagggagacgcgtgctttcagaaattaatcaaccaatataaagcccaaaagaattacgataaggtcaacgaatgctataaaaacctgattgccatcggacgtaaatctaacaatgcctcactggtggcccgcacttacgagaacttcatcgtctggaccgattcggtaaaagcaatgacggcacaagacgaactgaacgtactgaaacgcaagtatgacgaaagccagcagatcattcaggagaaagaagacacactttcgggcaaacagtatatgatcgtcgggctgtgcacactggtagtaatcctgattgccggtctgatatttgtggccatcgtactgcttcgtttcattgccggtaaccggaaactgaaaaagagcgtacagatagccaatgaacacaatgaactgaagacacagtttatccagaatatttcagcacagatggaacctacgctggatacactcgcctcttctgccgccgagctgtcggacaaagcacctcaacaggcacagcagatgcaaggacaagtagcagccctgaagaagttcagcaatgatatacaggaactttccacattggaaaactctctgactgaaccttatgaaatgaaggagatcaacgtaaatactttctgtgaagctaccatggataaggtgaaagagtttgtacaacccgaagtttcgaccgtagtcaatgctgccaaactccagatcaagaccaatcctgaacaactggaacggatattgattcacttgctgaagaacgctgcggaatataccgaaagcggaaagatattccttgatttcaaaaagagaggcgcacatacgcaccaattcattatatcggataccggtacgggtattcccgttgagaaacaagagaacctgttcaagcccttcactgaaatcaaagacctgacagaaggagacggtttaggactacccatctgcgccctgatagcaaccaaaatgaacggcagcctgacactggataccagctataccaaggggagcaggtttgtgctcgaattacatgcataattaaataaaagaagtgaatgtgccgcaactaaagtgagcactctaaaaagttacagactgtaatccataaacataaaagagccatatcattactcaaaaatagagtttgacatggctcttttcattgttcataagggcaggcaaatttcaaatgagaaactctccctttctaaatcaggatttaaacacatcctctcccgctatttttttcggggggagacgttatcagacggtaagctccaacaacacttctcctttggtattgagtactttcaccttaagtatgtccttcttcttctcaatcaccattaccgttgcacttttcatgctataaccgccaccgataatcaccgggaagttattgccaaggctgcctttgggatgataggcatattcatgtgtatgcgcgttaaggctgatattgaaaggtgctttctccagaagtttaccccaaagcccggaacacagattctcgtagtcgtttccgtaaagcggaatgtgatgaatcagaatccgcttagcggctttcttaaattctttggaagcgagctcacgcttcaaaaatcctacctggtcattacgcagcttcgtaaagtcgttgagtccgtagtatacccaatgatcatccggcttatcttcaccgcaatcgagcattacgatacgggtatctccccagttgaaggagccgtaagtcttatcgcctacataatcgaacaggctgtgcaggcctaccgaataggcattccggatctcgtgattgccgcgcataaagaagacaggtacgcggtcaccctccacgccttcggtcagttcgctgataaaggctgttgcctgatcgtgattggcggggtcgtctacacaatcgccgttgaacactacaaaatcatagtcaatcccctttatctgttcgcacaatgcctgaaacgtcttcgattgtttatgcaggtcgttgaacaccacggccgtaaaactgtcatcaccggctgcgggcaacgtgaactccctgagttctgtacgggctgtattgccaaacacctttttgtaggcctggtaaagcaggatctcctgcgaacaggtacgataataatatttctgtccgggctgcaaactatcgaggcgaatcttgtgaagagtattgccacaaacaacttgaccatccagaagggtacgtgcgcgcttcaggttggaagggtccgtgccgtactccacccagcaataggccggcacgttggtctgccacatcactgtgattccacctcctacgggattctgaagatagggtttggtacggcaaatccgattctcgggtaccgccatccgtacttctaccaacaaaggacgatgatcggacgccagaggctcatcgatcacccgggccgagttgacaacaaaagtaggcgtttcctgtttcagagcaatcaggtagtcgagcgtctccttcggttcggaagccggataagtgggttgcttcgggttggaaagtatctggaatgtactcttcaaatctttgataaagccggagtcggcatccgagttgaagtcaccggcaaggaagaaagatttccgggtatcggctgcaacggacttcaggatttcgagagacttcatccgatcctcttcggtcagagagaggtgcgtacacgcaaagacatactccgggaactcggcgacaagcagcgtgcatgcctcttcacgtcccggaagggcaaaggtttgcacacggagcggagtctctttcgaaagtataccgatgccatactttcctccgtcataatcaatggcaggcgcaaagcagggatgcaattgagtgcgttccgccagttccttgagaacatcggtccggttgcttcgggcagtcatgctgtccagttcctggatggcaacgatgtccggacgggcgttgttgatcacattggctacacgctgataattgcatataccgtccatgccattggcgttacggacgttgtaggtcatcaggcgcagcacatcttcagcctgggctgacagcacaaaaagtgctgaaaataagagcaataatagttttctcataaggattcctccctaaaagatgtcgcggaagcctgtttcaccacagagctgcataggcagagaggcacaggagaggagctctacggagcgtgacctgcagaacgggagtatgccataactcaccacagagtgatacagaacttcacaggacgaacttaatctattgatagataacagtatccatctgtatacattcgtgtaatctgtggtgaatgcgagtttcgacacatcctctttccacgaatcaccgcttatcgtttggagaccgttccgccggataccggcctatgtcctctgcgggcagctcccgctacatcttcattgttatattttgagttattaaatctgaataatagcacatatactgtctcttcctgtcgaaaagagggatcagggaagaggttttctgtacaccagcgtcagcccgtccactgccccgtactctgtcatcagttgacggaaagcggcataatccgccgggcgaatcatctgtttcttcaacttcaggctccggatcacttgtgttttcgctccttcgggacggatggaaacggttaatgtacctacggcattgtccatcttcttctccatcggccgagtgacaggttccatacctgcaggagtatctacggtataggtgaaagattcatccgccagtccgggcaacaaaaggtttgaagtgcgcttgctattgaaccggacgtactgggaatcggccaggctgccacgctctacggggagggtgaagaccagatagccatctttggcatttgccgcgtcgggctgcaatgcatagtcttttctcagggtaaccggtggaagattcagttcaaacggctgcgttaatgaagctacataggcataatctttctgccaggaaacggctgagggagttttgcctttcagtgacagagcctgttggctgcctccggcgtcggtccacacaaacagttcgcggatgctgcctactcccagtgatgccgtattctcggacggagcgcagaccgcccctatcccggctttcagtccggccgctttcagcaatgcggccatcagattcgccttctcggcctccgtgccgtatgccgaacggatcacctctgcggcgggacggatgcgataaccgctttccgccaacgggagggacgaatagtaaagattatcaatcacatagtcacgtatcgcggttactttttctttatcgtccttcgctccggcagtcagttttccggccagcgcacgaatccctgcatctccttccggttgccattgtgacgtcagaaacgacaggggtttctcctcagtcgtggcagtcagcagaggcaaatcaccgccgatcaccgacacctgcggctcacggctgagggcgggcagattcttcagggtccagctgacttgcttcatcccttcggattcggttacggaagctttcgccttgtggttgttaagggcatattccagatgttgcccccggggaacggtgatgctgatctcgtactccttcaccggcgaagagtgctccagcaaccggcagatctgaatccccggcaaatatcccggtttggttgtaatggaatagtccagatagatggtagctccgagttccagcccggtgtgtacgactaccatctcgcgcaaagcattgaatgccggcgcattggctgctgccgaggggagcacttcgaccagagcattggcgggagtcttgatgatatttccgtctttctggcgggtatacgactcgtgaatctgcaaagtctgataacggggatcgtacgtaatgaacgactccccatacgtgcggttcatggccgtgtgagtgtacagcgtcaggactttcgactgacgataaacctgcgtaccatcagcctgcagggtccagctttctttgattttcttaaattccgcttcccgggcggtgaccggaagagtcagcgcaaacaggcagaggagcagaagggtatatattttagtcatgtgtgacgatcatctttttagagtttaacaatcaaataatccgcaaagcttttgtaggcattcaccgcagcacggaatccttcccagtcggctgcccgatagatgcgcttcttcaaggcgagtttctgtttcagcaccagtttgttgccaacctgctgcaacgagccttcgaagtcggctgccggagcggccttttgttcgcagcgcggctctcccgccagacgatatccccgaggcagggcaatcgtttcgtccaattcgaccagacgagagcaagcatcacggaagccgtattggcgggtttccaagccggtatcgatgcgcaggaacgagagaacgctcgcatagaggttgttcatcaccatcggtttcaacaataattcccggtcaccgaccagcgcatagtccggtatctcgtaacggaacgtgatgcgaatggggcctgtctgataatccttcggcgcctttccgtagtccactccgagcatacgggctttgggagatacgttgagcaactggctttccatcgtgctttgccattcggtctgccagccctgcgtaaagatgcggcggatgctgctgtccgactgaccttcggcggtgatggtaaacgaacctttcagcgtgccctttgcatcgattttgttatcggcagtgatgcggacataatgattctcgggagccgaaaccggagtcaggcacaggtcggaacctcccggaatgccgggcagatagttctgctgctgctcggcactgctccacaactcgcggcagaaaggaacccaggtaggatcgaggggcatatacgtcccattcgccagcttcaccactgccacacagtggttaaagtgatcggcagggatgctttcgatgcggcttcccgccatcgtcatggccggataggcctcaaatcccgccatacgcaggaaagagatcagcgtgccggcaatgtccttgcatactccgcagcggtcggtgtagttcatcttcgtattatggagcgtaaagccctcgccttcgcccatcgtgatgcccgcataacggatattatcggctacccaatgggtcaatacggcgattttctccatttcggtcttttttccctttatcagttcgtccactttcttctgagcctcgggcagtgcggcaaaactgccgtatgcctcgttcaagtcgtgaaaccagagcgacttatcctcccatttcggggtagacgacatcatcagcttcggggcttcgtcaaaaagatccaccatattgggctctttccggaaaggaagcacttcgtccacggcaaacgtatatacctttcgcccgtcctcataacgcattgacgaggtacaggcaccgttatagaactggaactgaagctctttttccatcggcatactgacaacgtataccttgcggcgggtgggttcattcacccaaaaaggaacaatgtcgtagaactgcccgcgcatgggcggaatgaaacgcgcgtcatcatcttcagctcctgccagcagagcataagtaaagcctttcttactgatttcgtaggaaacgacatctcccggctccaggcgtccgagttcgagcatgatctgacgggctccccaataaatagcccttgccggagcggcataatcgcaggtcttggtcacgtccacctgcatggtttcgccgttggcacgctgcacggtgacttgcttgaaacgggcaaaggccgtcagcggatcataatcatacttgatcacatggttattcactgcccctttgggagtctgtactttaaacgatttgtacacggcaaaacttccggagccgtttggctgcacggttaccgaggtactgtccagcagggttacgcagtcagcttcgctccatgcattctgcccggcggccgggagacacattaagattgaaaaagcacagcatgaagatgcccggaggacattttttaatttacgcatagtttatgaattgaatatttgtgaatggttttatcgtttttctgtctgtaacggacaaaagtaatatatcgatgggtaaaaacaaaagtaatcgaaagaagtatttaaaaataaagtatgagaaagaagaagagcctgtttacacctgtatccttttaatacctatttataggagaggataatatatacttattttaccagaagcaagaaattgttatttcaatctttaaaaatcgagatcgagacgatgattttttgtcatctcgatgacacttttctgtagccctgagaacggcatattgatatttcccagtcagattaccgagaaatcctatttgtaataaaaaagccgctgtttccagcggcttatctaaagttataaataaatatttgatactatttatgcagtgggatcatctacgatatcacctcccggatccttttctttaattacatcgtttaagtttgtcaatgagacacttcgggttaatgcacaacggctcaacactaagtcagtctcttctttagtagaaaagcgcaagttgatggcctttatctgtgatgctttcgcctcatcaagcgtttttacgccggtactgctcgccgttaggttaaaagtacccaaatgcggaatatccacacttcgcccgtcttgcagataattgataacggctgcgcctaattttgaaatcattgctaagcacaaggcctcttgaaccccggaaatctggctcagataattgacaaatgtttcctggtccaccattcctctgttttttaaaacacaataatacagtttttcagattctttatttcctacatcactgtttcgcaacgccaagttataatacaatccactcatgtttttataggattagtaaaggttagtattagaaaattatttaattctcccaaaggtatgcccttaaaattttaaaaacaactctttcttctctttttttcaagaaacaacaaaaaaaagattgcccggattcacatccaaacaatctttgtcaattagaaaaattcattaatattatcttattataaaagagatctgccaccccgattcacatctaagtgacatcataatgctatgaaaaaaaaaagttaagttatctccgtataatgtcttatcagaatcagtaacattcttatttcgtaaacggcaaatatccgtttcaatgactaaattccacctaagacagtaaacgattcagattttcaacaaaagtatcttattaaaatcagaaaaacaatcctttcctgattttatttaaaaaaatcgataaaaaaaaagattgcccggattcacatccgggcaaccccatattaacaaaatttaaaataaatcgaccggatcactatccggacataataaaaacttaatatgtattacctggattcacatcttagtaatacttcaactaatgaaaaaaaaaaaactatcttaacgcttccacctcgtccggtgtcagcggaatcttctttcctaaacggcgggcgcctgtctcggttatcagataatcctcctcattgcggatgcctccgaagtctttgtaagtctccactttatcgtaattgataaagtcggtgaacttcttctggcccttccaaagatctatcagttcgggaataaagtagatgcccggctccacggtatgtacaaaacccggctccaacggaatggccagacgctgcgacttacggccgaactgcgtgctcttgggctgtccgttatagcccacccagagttcacccagattctccatgtcatgcacgtcgagccccatcatgtgtcccagcccgtgaggatagaacaaagcatgtgcaccctcgcgcacagcgtcttcggcatttcccttcatcagcccgagtcctttcaaaccttcgaccatcacacgtgccgacaagtcgtatacatccatataaggaatacccggacgaagtgctttcaccgactccaggtgcatggcgttctgtatctcgtaaacctcgcgctggcgccgggtaaactttttatcggcaggaacggtagacgacatatcgcctgcataacccatctccgtttctgcgcccgcatcgatcaggaacagatcgcccggcttgacgatattgccatgataatggttgtggagcgtctgtccgttcaccgtagcgatggtagcaaacgaaaggtcaccccctgcggcatgcgccacggcttccatggctgccgatacttcccactcgcgcatcccgggacgcaggatcttcatggccgtaatgtgcatatccgccgtaatgtcgcaggccttctcgatttcgacaatctcctcggccgacttgtagttacgctgcgcgatcaccgcacggataaacggcaccgaaccctcctgacgcgcgggaggcactcccagccagtccatcaacttcagtttatgctctgcacggtagggcggcaggtaatggatggcctgtcccttctgtaccgccttgtgcagatagctcacaatgtcggccgaaggcatggtgatgtccactcccacccgctcactcttttccttcagtgtgggctgagtccccatccatacgatatgatcgatggtcagttcatcaccgaatataatttccttatcttcatcaatgtcgattatagccgaaagcccggcaaacgaaaggccgaagtagtagagaaaggtagaatcctgacgatagcggaacgtattgtcctcgtagttcaatccacactcgtcgtttcccagaaacaacagtactccggagcctaatgtttttttcagcagggctctgcgctgcgtatatgtctctttgctgaacataatggtatatattaaagttatgatggcaaagataggaacaaaggatgaattgacaaaggagataaagcaaataagattcacagcagagcaataaccgtcccgccatggaagaggccgggaatatctttccggaacaccccctccatgtcttccccgctccctccggtttttcctttaactccttttatcggataaatcatttcgctatatcgaacaattcattacttttgtagcgagaaacaaaaactgtaaagcattaaacgtatggcacaaggttcccgtcagatacaatcgcaggcgcagcagcagatacaaacgctctcaccgcagcagattctggtagtgaaactactggagctaccggctgtggaactggaagaccgtgtacatgccgaactgctggagaatcccgcccttgaagaaggcaaagaagaaagcacctccgacgagaccacccctgccgaaacctccgaaggagagacggaaggcgatacggactatgactcgctgagcgactatctgaccgaagacgacatccccgactataaacttcaggaaaacaaccgctccaaaggcgagcaggcagaagagattccgttttcggacgcgacgtcattctacgaaatcctgagagaacagctcggcgaacgcaacctgaccgaacatcagcgcgaactggcggaatacctgatcggttcgctggacgacgacggcctgctccgcaaatccctcgaaagcatcggtgacgaactggccatctacgccggtatcaacgctacggaagaggaactggaggaagccctgagaatcgtacaagatttcgaccctcccggactgggcgcacgcagcctgcaggaatgcctgctgatacagatccgccgcaaaaaacagtcccactacacagatcctctgctggagacggaagaagaaatcatcagtgaatgttacgaagagttcacccgcaagcattgggaaaagatcatcaaaaagctgggactggacgaggaacacttctataaggcacttgaagagatcaccaagctcaacccccgtccgggcgcatcgctgggtgaagccatcggacggaacctgcaacagatcgtccccgatttcatagtagacacctacgatgacggaaccatcaacatcagcctcaacaaccgcaatctgccggagctgcgcatgagccgcgacttcacggagatggtagaggaacatacgaagaacaaggccaaccaatcgaaagaatcgaaagaggccatgatgttcctcaagcagaagatggacgccgcacaaggcttcatcgacgccgtgaagcaacgccagaatacattgatgaccaccatgcaggccatcatcgacctgcaacgccccttcttcctcgaaggcgacgagtcattgctccgcccgatgatcctgaaggacgtggcggaacgcaccgggctggacatctcgaccatctcacgcgtcagcaacagcaaatacgtgcaaacgaattacggtatttatcccctgaagttcttcttcagcgacggatacaccaccgaagacggtgaagagatgtcggtacgcgagatacggaagatactgaaagaatgcatcgacagcgaggacaaaaagaaaccgctgaccgatgacgaactggccgaaatactgaaagagaaaggatatcccatcgcacgccgcacggtggccaagtaccgccagcaactcaacattccggtagcgagactgagaaaataaaaaagcataataaaagaaacaaaatggctgaagaagagaagatagagcaacatatcatagctgacaggacactgatccgtacggccagaatcatttcgggaatactgactccattctctatccccttcctggcttttctggtattgttcctgttctcttacctacgcatcatgccgttgcagtacaaactcatcgtattgggaattgtctactgcttcaccatcctgatgcctaccatgaccatcttcctgttccgcaaagtgaatggctttgcccgccaggacctgagcgaccgtaagaaacgctatgtaccgatcctgcttaccatcatctcgtacgtattctgcctgatgatgatgcacaagctgaacattccctggtacatgacgggcattatactggcttcactggtggtgctggtcatctgcatcattgtcaatctgaagtggaaactgagcgaacacatggcaggtatgggcggcatcgtgggcggactggtttcgttcagcgcgctgttcagttataatccggtgtggtggctatgcctcttcatcctcgtggcggggatattgggttcggcacgtatcatcctgcaacatcacaccctcggcgaagtacttgccggctttaccgtcggtttcgtctgctcactgctggtgctccatccgctcagcaatgttttgttccgtatatttttattttaaacatagtatcaatcctaaaaactaatcattatgaacttcccacagaatgtaaagtacactaacgaacacgaatggatccgcctcgaaggcgatgtagcttatgtaggtatcaccgactacgctcaggagcaactgggcgacatcgtatttgtcgatattcctactgaaggcgaaacactggaagcgggagaagtgttcggtacgatcgaagtagttaaaacaatctctgacctcttcctgcccgtagccggtgaagtggtagaacaaaacccggcactggaagagaatccggaattagtgaataaagatccgtatggcgaaggctggctcatcaaaatgaaacctgccaatgcagcagaccttgacaacttgctggatgccgaaggatacaaagcagtggtaaatgcataaaggctttcccgattcattcattaccacttgcttagtcttgaatggtctcaccacagattacacagattctcacagaacttttaatcttattatcgataaagtaaatcattaatctatgagaatctgtgtaatctgtggtgaagttgattcattccatctcgttatcaatcaatctcaaaagtagaataaatatgactccaatcgtaagcattatcatgggtagcacttccgaccttcctgtcatggaaaaggccgcacagttgctcaacgatctccatgtaccgttcgaaatgaacgccctctcggctcaccgcactcccgaagctgtggaagagtttgccaagaatgcccgctcacgcggcattaaagtaattatcgctgctgccggtatggctgcccatctgccgggcgtgattgccgcatcgaccccgctgccggtcatcggtgtacccatcaaatcgtctcttgacggaatggacgcccttctggcgatcgtacagatgcctccggggattcctgtagcgactgtgggtatcaacggcgcactgaacgccgccatccttgccgtacaaatgctttcattggaagataaagaactcgaaacaaaattcatagcctataaagaaggactgaaaaagaaaatcgtgaaggccaacgaagaactgaaagaaattaagtacgagtttaaaacaaactaaaaagatggatttattcaactactcccgacgggaaacttcggaagtgaatattggggccgttccgttgggcggccccaatcctatccgtatccagtcgatgacaaatacccccacacaagacaccgaggcttgtgtggcccaggcaaagcgcattgtagatgccggcggagaatatgtccgtctcactacacagggggtaaaagaggccgaaaacctgatgaacatcaatatcggcctgcgcagtaccggctatatggttccgcttgtggccgatgtacacttcagcccgaaagtagccgatgtagcggcacaatatgccgagaaagtgcgcatcaatcccggcaactacgtagatcccggacgcactttcaaacaactggaatataccgacgaggaatatgccgccgaactgcaaaagatacgtgaccgcttcgtccccttcctgaatatctgtaaagagaatcatacagccatccgtatcggagtgaaccacggctcactgtccgatcgcatcatgtcacgctacggtgacacgccggaaggtatggtagagtcgtgcatggaattcctgcgcatctgcgtagacgagaagtttacggatgtcatcatctcaatcaaagcatccaacacggtggtaatggtaaagaccgtacgcctgttggtatcagtgatggaacaggaaggcatgtcattccctctccacttgggtgtaacggaagccggcgacggagaagacggacgtatcaaatcggctttgggcatcggcgcattgttggctgacgggctgggcgatacgatccgtgtctcgctgagtgaagaaccggaagctgagattcccgtggcacgcaagttggtggactatattacaagtcgccggaaccatccgtacattcccggcatggaagctccggatttcaactacctttctccggtacgccgtaaaacacggccggtacgcaatatcggcggaaaccatctgcccgtggtacttgccgaccgcatggacggacgtatggagacccatccgcaatttacaccggattacatttatgccggacgtgctttacccgaacagacagaacccggagttcaatacatcctcgatgccgacgtatggaaaggagaacctgacacgtggcctgccttcaattatgcacaattggagttaatggaaacatgcgcagccgaactgaaattcctctttaccccttacatggcgcttacccgggaagttgtcgcatgcctgaagcaacaccccgaagcagtcgttgtctcacaaagcaaccacccgaaccgtgtaggcgaacatcgtgccctggcacatcaactggcggtggagggattacagaatccggttatcttcttccaacactatgccgaagatacagctgaagacttgcaggtcaaagccggtgcggatatgggagccttgatctttgacggattgtgtgacggaatttatctcttcaaccaaggcaaactgagccatgcagtgattgatgccactgctttcggaattctgcaggcaggacgtatccgcaccagcaagactgaatatatttcttgcccgggatgcggacgaacactgttcaacctgcaaagtacgattgcccgcgtcaaagaagccacctcccacttgaaggggctcaagataggcatcatgggatgcattgtcaacggaccaggcgaaatggcagacgccgactacggttatgtaggagccggacgtggcaaaatcagtctttataaacagaaggaatgcattgaaaagaatattccggaagaagaagccgtagaaaagctgatagaactgattaaagcaaacggggactatgaagagaagacttcttccctgtcctctcccaaagaaaaggaagacaaatagttcttgcggacgatgaataaccattacctcaaagagagtgtatcatagttcaccacagatcgcacagatttacacaaaacgatttttaatctactgacaatcaataatatttatctgtgcaaatccgtgttatctgtggtgaatacgaattttgacttcctctttaaatagtatacttaactataaagttctttatctcttacgctgagcaaagatccactccatgaatccgggatagttgaaagccggattccagcttccatgattacaaccgggaaactcaatatattccacttccgctcccaagttcttcaacgctttataagccccacgcgagccttctacaggcactacattgtcggcatcaccgtgaaaaatacggaaacgaacatttgctgcatcggccaaacgcaccggattcacggtcccgcagatgggaacggcagcagcaaacgtatcgggaaaacggacagcaagatcgtacgtcgccatgcctcccatagaaagaccgaccacatagatacgattacgatccacctgaggcaaatcaagataggtatccaacaactcttttactgcacgcagtacaggagtgatctcttgtcctaccggcatctccgaaggaataaaggaagaggggcgggaggtatacgcccaatagtctttttcgggacattgaggtacaaggacaaatgccggatacttctctcggttcaccggattgagaaacatctgaccaccatgtgtcaactgcttctcgttatcactcccccgctcaccggcaccgtgcagaaagagtaccaaaggatattgcagtcccgtcttttccacctcgggacgaagtagacggtaattgagagaatcaccccgggaagagataaaaactttcttttgatacatctcttgcgaacgggcacccacgcccaaaagaaagagactgataaagaaaaggacaaactgtttcatggttattcggtattattctacatatttagtttcggaaggtaaagatacaccattttcgttaaaggcttccacagcaaaataataatcctgatcgatagtcagcgatttcatctccagctcattgccaccgtacaccatccacgaactgtataacttatcaggggcgatcccccacaggacgttgtatccctgagcccctttcaccggctcccagcgaacggtaacatcacgacggtcggtgtgccgatccagagccagcttttgaggtgaccggggagccttgccgaacccgagtccgaatacacgcagttcagaaatagccagattcggagtaggtacgtctatattcttatagcggatatagcgtgcggtagtcgggacttcaagttctacatagtcattcggcgtatccttatagctgctccggcgatcgaccagtatattccaggtctccccgtcggaagagccctcaatcacatagcggtgacgcaatccgggaatccgaccgtatagattactccgatagtcgtgataattcacctgtacggcacagacacgggcaggtttctccaggtcgatcagtacccactgacgttcatcatttgcttccgccagccagaaagacttggttctttcatccgtcaatgcatccggtccgaactcacctttcgcagtagatgctgtcaccggtttgcgataagaaaggagcatccatccacggaactgccccttcttgccgggtacggccggagcatagcggggataatcaccgaagcgggtgtccacgtacataataccgtctttatcgaatccggcaggaaacatgcagagccggcgttcccagttgacgttgatggaaagagccatcgaagcaaaatgccaatactctccgccgggcccctgaaccgtactgccgtgtccggctccgttcatatatccccccggtttgtatgacacgggattgtgcttctgataggtgtaaggccccatcggatgatcggctacataaacaccgtcggcatagacattgaattcggtaccgggagcaccatactgcatataatacttcccgttgtgcttggtcagccacgggccttcgatataccctcctaaaacggtatcgctatgattctcaccgaaacgttcccagccgtggcgcggcatgtcgagattgaaaagctccttcacttctcctttcggaaggaaccggtgattcttatccagttccataccccggatgggataaacattggacgaaccccagaacatataggctttgccatcgtcgtcgataaaaagatcggggtcctgcaggttatgaaggatggcgggtgtagctttccattcgccgctcttgggattgtcggaatagagaatactcatagaacccgaaggatcaccggtgacataaagcactgagtctttatagttatgagcggccggagcgttgctcccctgcggataccagtctttgggagcgataaaatcccagtccagcagatctttagagtgccagtatccattggaacgagtgacgaacatataatactctccacggaacctgaccactgccggatcggcacccgagcggtaggaaatgtccttgtcggagttatagatcatataggtataatctatgttcagcgggttgcaataagtatcttgccgcatgtcttgcgcaatggcaagggtgggagaccccaaagcgagtaaaagaaggaatagttgtttcatggttgtaatctatggtatatcttattcttctgagccgaaccccagtcttttcaatcctctctgtacatcgggatgactcatgaagagtttccatatcaagcctgagcgatagttttcaatcatcacaataatcggtccctgatcgatggcgagataagaggaagcaaaccagttttctgtcaggttgaaggcatccttaaagccatattctccccacaggcggtcgcccaattcttcgtagaaataacgcatagcctccagagaatgttccggagtataaggaatggaagagatggctgcggtcggggtaatcactcccaagtcgttctgcgggcaatgtgccgagtaaccctgatgattgtcgctcgctgtcagtccccagcatttgcggccgtatcctttatacttcttcggattatcgatgcaataagcacggttgatcagggtatgtgctttcatctgctcaccgtagtcggcataactgtctttgagtccgcgcggatcgagtccgagataggaataatgtgtaaagaagagagggccgccaaagtcggtgcccaggggcaagcggatgccgtaatattcttttccgttcttgaatgtaatggagttggcccaccccttatgatacaccgattcacgaatcggataagtaggcgaagaagccgccagaatataagtgatatggcactcgttctgccctttcagctgatggttcatcgcccatccgttattgggtgaccaatgccaataaagcacatcttcacctccacgggtgaaccagtcccactctgcctgatgccacagggtattgatcagccctcgtatccgattctctgtcggattatcgtgagtgaaatactggtgtgccgccagcagtccttcgaacataaaggcagattctaccaaatcggctccatcgtctttcctgctgaaaggaatggtctttccggtagccccgtccatccaatgtgcccagataccatgatagctatcggctttattgaggaactccactattttgagcagccgctcagcgccttgctcacgggtgatgaacccacgttccacaccgactataattgccattaccccaaagcccgaaccaccgatggttgctatctcgaggcggtcattgctgcgctcacgggccagaccggactcgggatgggcaaaatcccaaaagtaacggaaagtttgtttctggacaagagtcatcaactcatcatcggtcagtctcggctgtttgcctgtagcggtggcttgcaacgtacaagcacagatcataagaagaaataaaagggtatgtttcattgttgttgttaattcaagattttatcccccgagagggcgtgtcgagactcatatctggtgaataatgacacgccctcaggtggctgcacggcagagacacggagattccatcgtgcagtggggatagcggcttccgttgccgcaaagggcaatcggaaagacgctgtgtgtaatcatggaattgatattattggaatgattctattttaatgaactggttatacatgtttcatatcagtttttgaggactccctgcgagatatccacctgcttctgcgggatgaagaacgttgcatgttttgctatcgagaagtttgtcttcccgtgtgccttcatcatcttctccgcatagcccggcaccaccttgtccgcacggatcaggtcgaagaagcggtgtccctccaaagccagttcgatgcggcgttcgttccagatgatctcgcggagcttctctttaccggtttccgtaatctcgggcaatcccactgtcatatccgccggatgcaccgttctgcgggcacgggcgcgcaccatttccagcttgtcgagtgcttcccggctttcgcccagttcattgcaggcctcggcatacatcagcagtacatcggcataacgcaggaagatcaggtgacaattctgtttggcaaacgaattctcgttccagtaaccggtaggccagatggtctttttgttggcacggggcggcacttctttcttgaaatgaatctcgccctttccctccaatgtctctccatcgtagaaaatggttgccgtgcgtcggggatctcctgcttcataggcttggtcgagagcttcggaaggagagaacatcccccagcccatctcaccgcgaatgccctgccatttcacatattccgactcgaggttgcgttcggtcgattcgccccaaaggtattggtcggcaagcatcacttcgtccgaatagtaagagttcggattgaacaggtcgcgataatcccggtgcaagctatactcgccgcgggcaatcacctgaccggtgtatttcttcacgttggcatagtcctggcggaagagatataccttggccagcaatccttcggctgttcccttggtagcgcgtcccgactctttcgcaccccactcctgacgggtaggcagatgctcggctgcataggtcaggtcttcaatgatctgttgatagacagcctcctcggttgcacggggctgattgtattcgccgggctgcaacaccttggtcaccagaggcaccccgccgaaggcgcgtacgagattgaagtagaagaatccccggaaaaaacgggcctgggcgatgcacttcacccggagttcttcgttcttcaccgcacccagattgtccagagccacattgcatgaagcgatagctttataattgccttcccaccagccgttgatctcggaggtagaggcgtcgtaagtaaagtcgttgaactggttcagacgtgccacactaccgtccgccagttcgctgcctgtatcggagttatcaccgggtagctcggtgatggcaaaccatgagaatccgatgatgtcccacgcccggagttgggtatagatggcgttaatactcatcaacgcgccttcttcttcgccgaagaagacatcttcggtcagctttccctgcgaatctacatcgaggaaatcggcacaggaagaaagggtcagtgccgaagccagtaatattgaatatatctttttcattgtaatggttttgggttcaccacagagtaacacagggtctcacagagtttaatctcatagaatgtttaaaaggaaatcatctctgtgagactctgtgttactctgtggtaaatcgtattcatgtctatatcatttaatattagaaagttacgttcaggccgaagcggcaggtagctgtcaccggatagatctgacggtcgatgccgcccagcacttcgggtgtgaagccgttatagccggtgaaataggccaggttgttgccggagaagtagactctcagattctgcacggataccttctgcatccatgatttcgggaaagtatatcccagttccaccgtttgcagtttcacgtacgaaccgctctctacgtagcggctcgacacctgatagttattgccttccagagtcattcgcggtgtcatggtattcggattttcgggtgtccagcggtcgaggaaggagcggtcccagttgtccgaaccggagaaacgttccacctgcttggcattgaatatcttgtttccgaagttgccttggaagtcgatagagaggtcgaatcctttccaggaagcactgatgcccagaccgccgatgaacttgggagtgggactgcccagatccttgcggtcgttggccgtgatgtatccgtcaccgtctacatcttggtatatcaggtcgccgggacctacgttgttctgatactgttgtccggcatttccggtggcagcggcggcacgctcgttgtagtctttgatctgtgcctcgttctggaagatgccgatcacgttgtagccatagaaatatttaatcggctttccctcttcggtcatctgtacggattttccggcgccgatgtcaccgctggcgatgcgtttgccgcccaggctgatgacttcgtttttgatggtcgttcctgtcagacggataccataccggaagtctttcagcgaatcttcccatttcacggtaaagtccacaccgctgttgcgtaccgcccccacgtttgtttctaccggggtgaggcctacggaagccggtacatccaccgtcaccagcatgtctttcgtgtctctgcgatagtagtccagttcaagtgaaaagcggttgttcagcagtccgaggtcgaagccgaggtccatctgctccgaacgttcccaatggacgctccggttggagagtgacgtgatggttccgccgggatagaacacgccgccaaacacggcatcataggacggagagatattggcgagcgcccggtatttgtcgttacctattttatcattaccgatctgtccccagcttcctctgagcttcaggttgctcagccactgcacgcggtctttcaggaacgcttcttcggagactctccatccggcagctactgaggggaagtaaccccaacggttgtcaggaccgaacttggatgaaccgtcggcacggaccgagacagtcagcagatagcggtccatcaacgcatagttggcacggaagagataagacatcattgtttcgtggtatccgttgttagccaccgacttggagccggccgaagcttggtcgagataccagtagttttcgttatcggagaagaagtcgcgtccggtgccttccagcaactcgtaaacacgcttctgcgccgtgatacctcccaagaggttgagccggttcttatcattgatcttccagtcataagtcagcaggttctcccacaaccaggtgaagtcgcggtcccaggttttggagaggctgttggtttcgttcttctgtgtttccgaaacgtagtatttcggcacgaagttgcggcggcgtccgttgatgtagtcgatgccgaggctggttttaaagtcaagcccgttcaggatattccagttcaggaaggcgctgcccacgatacgttctttccagtcgtcattgtttgtataatggagtgtggcgacgggattggcagaagaggcgctttcggaatccataaaactcccgtcttcattgtagggacgcttcacgggactgatggtataggcagctttcaccaccgcactgttttcgttcttcttatggctgaaagaggccgacagattgtgcccgagggtcagccgtttgctgatcttgtagctattgttggcacgcagggtaaagcggttgtaggtgtttccggtgatgatgccgtcctgctggtaatatccagcgctgaggttgtagcgcaccttctccgatccgccgctgacgctgagctgatagtcgcgtacggaagccacacggaagatttcgtcgaaccagttggttcctttgcccagtgaagcagggtcgtcaaacttgggttttccgcctgtgttgaccagtgcttcgttcagcagtgtcgcgtattcggtggcattggccatctcgaagctgctgttgttgaactggaatccttcgctggcggtgaagttcaccaccgcttttccttccgttccctgcttggtagtgacgataatcacaccgttggcaccgcgcgaaccgtacatggcggtcgccgatgcatctttcagcacctccatcgactcgatgtcgtgtgtgctcaggaaagagatgtcgtccataaacattccgtccaccacataaaggggattgctgttattcgttgtgccgataccacggatacgtacttcgggcgagcttccgggagcaccgttagccgagatatacacaccggagacacgtccctgaagggcattcgccacgttgggagtggcaactttcgtgaggtctttgctcttcaccgcacctaccgaaccggtcaggtcggacttacgttgtataccataaccgatcacgacaacttcgtctatcaattggttatcttcttcaagagagatatccagcttcgaggaggcagtcaccttgacctcctgcgttttcatgccgatataactgaaaacaagagtggcgcccgaaggaacattcggaatagaatagttgccgttaaagtccgtaatggttccggacgattgacctttcagcaggatactggcgccaatgataggctcccctgtctttttctcggtaacaacacccgagatggtcagactgccctgcgcaaaagaaagcatggagagcagcaacatcatacatagggtaaacagattttttttcatcgtttggtactgatttaaaattctgctgcaaacttagacggtaaattgatgtaagtcaaaaaaaggggtactacaagagtaccatgcagaaaaaaacaagatttccgcactacttcatccctactgcaaaggaatataattaattaatattcaataaaataaaaaatagattctgaaaggagaccggaatatgactacttcatctgttctactcctttccgtcgatgaaatatttgctttaaagactccggagaggaaaaaagactttttagattctgcactccgggatgaaaatatcagaaccggttggtgcatgaacaggactttttccaaaaggaaaaaggagaagaaaaaaagctaaggacataaggtagttttgtacaaataaagaaataggattacgccttatttaatgttcgaactaattactaaaagctatataagagtatttcatccattaaaaattgagatctcgacgatgatttttcatcatcgagacgatgtctctctgtcgtctcgatgacagcatatcggtatctgagcgacaattttcatttttttgaattttgtataaaaagaaaaccgctacttgtagcggttttccgtataatatataattatttatgatttagtatcagattctcttttccgatcatgttttatcgtaacggggagtacattcggattgattctatggttctacaaagataggacaataaatcaaaaatacaatcttattttctttattattctcccttcagaagaaatcgtgctttttttacatcccggctgtttccgccaatcattacatcgaaatcacccggttcgcagacaaactgcaaatcgtaattatagaacttcaacaattccggcgtgatgctgaagcttactttacgagactctccggccttgaggaaaatcttctcaaaacctttcagttctttcaccggacgggtgacgctgcccaccaggtcgcggatgtaaagctgaaccacctccgctccgtcacggctgccggtattggtgacggtaacagtcgccgtcagttcgccatcagcactcatctccgtgctgctcaggtgaatatcactgtaggcaaaagtcgtataagataatccgtagccaaacggatagagcggctcgttgctcacgtcgaggtaattgctgcggaacttttcaaaccaacgtccctcttgcaacggacgcccggtgtttttatgattgtagaacaatggaatctggcctacattttgcggaaaagtagcggtcagttttccactgggattgacatcgccgaaaagcacatcgctgatggcataagcggcttcactccctccgaaccatacgttgaggatggcaggcacgtgttcttcttcccaggtgagcaccagcgggcgaccggtaaaaagcacaagcacaacgggctttccggttttgagtaattcctgcaacagcgctctctgtacatccggcatctccaggttggtacgcgaactgctttctccactcatttcggacgactcgcccagtgcggcgacaatgacatcggccccggcagccactttcagagcttcgtccagaagttcgcgatccgtacggttatcccggtgcagttcacgtccgaacatggtggcgcgcttctcatagtcggcatcgccaatcagattacttcccttggcggttaccacttttgctcggtcaccgactacttccctgagtccttcgaccaacgagggagcgttatccagcacagcagctacgctccaggtgcccggcatgttggaacgggtgttcgccaacggaccgactacggcaatggttcctttcttgctgagtggcaacacaccttcattcttcagcagcacaaagctctccgaagcagtcttacgggcaatggcacggtgttccttggtgaagatctgcttcttgggacgattcacgtcgcaatacttataaggatcgtcaaacagtcccagcttatacttcgcttccagaatacggcggcaggcggcgtcgatggcagctgcggatactttgccttcctccaccgacttcttcagagtgccgctgaaggcatcgctcaccatatccatatccaccccggcattcagggcgagggcggcaacagtctgctggtcacccatgccgtggtctatcatctcgttgataccggtatagtccgttaccacaaacccgtcgaagccccactgcttgcgcagcacatcggtcatcagccacttgcttccggtggcaggcacaccgtccacttcattgaacgaagccattacgctgccgacacctgcctcgactgcggcctggtagggcagcatgtattcattgaacatacgctggcggctcatatccaccgtattataatcgcgccccgcctctgatgctccataaagggcgaaatgcttcacacaagccattatctcatcattccggctcatatcctttccctggtatccacgtatcatggcacgggcgatggctgcgccgaggaacgggtcttcaccgtttccctccgacacgcgcccccaacggggatcacgactgacgtccaccatcgggctgaatgtccacgagataccgtcggcactggcttcgacggcagctatacgggcggactcttcgatggctttcatatcccaggtacacgacaggccgagaggaatagggaaaatggtttcgtatccgtggattacgtccataccgaacaacaagggaatgccgaggcggctctcctccaccgcctgccgctgtacttcacggatgcgttccactcctttcaggttgaacagtcctcccacctctccgttacggattcgtttggctacatcgctgcttttcgcctgtccggtagtgatctctccggtcacgggcaggttgagctggccgatcttctcctccagcgtcatctttttcattaactggtcgataaagcggtccatatcccggggagccttctgtgcctgtaacccggcggccactacgaccaaagaagcggcaagcgcctgcattcttcgtacaaaatgtttcatggtctttacagttttagtatctatttatgaatgttctgactttccggatgcaaataaaacaaatctgcggcaaacagactccatttacccatacggcaagaatactgcaaaccgggaaaaacaaaaaaagaagtactgcattggtacttctttccatatcaaacagttcattgccaactatttgaacgcaatcataaaatccgtcaggctgctctccggaggaaggcccagcttcttgcgcagacgatagcgggcagcatcgacacctctcacggagatgttcatcagcttcgcaatctcctttgtcggcagattgagccggagcaatgcgcacaaacgcaaatcgccggaagtcaggtcagggaacttctctttcaggtttcggaagaagttctcgtggatgcggtcaaaattggactggaacatgttccagttctcttcatccgaaaccatattctggttgatcattgaaagcagcttatccaggttcttgcgcgtatattgccccgagagtttctgctgttgcaactcctctttgagtgaattcagaaattcctgatgcgcaatattggtcatcactacacccgaaagctctttgcttttgaaacggaggtcggcctcgagttgctctttctccagttccatgatcttcttctcctgctgctctatctccgcttcgtgacgggcacgttgccgctcaatgacggcatcttttttcttcttggtgtatacgtagactccatagagcagccccagcagcaaggctatcccggaaagcgcatagacagcgacagccggatacgaaagataccagggcctcaaaatgcggaatggaaggtcgacagaggaaatcactccgttctcgtcgtatacctcggcacggaaacaataagagccaaacggaagacgggtaaattctttctgcaagtccggaaggccttcggtccacttaccggaggcggacagcccttcaagccggtagcgcacgttcagcgcaaaatcgttgtagacaggataggccagggaaatgctgatattattgaaagctgaagctatctcgtcggtaccggaaacgggcagttgtatccgctctcccgtctgctcgtcggatgccgaaaaacccgaaacccacaaagacggcttctgacgtgacttgtacaaaccggtgctgtcggcagcaatgcgggcaaaagagttgttcaggcagaggtaggagcagtcgttccgcctgtcgtataccatccgtgccagtccttcgatgggaaggttgccgaacatagagaaaggtattctcctctcaactttaaagtcgctcacggtacatctcaccagataggcttcgcggtcactgagaaaccagtagagatctcccttcatgacgtcgacggtatgaatgcccctgagcgttgccaactgttcgttcatcgctttgtaggggatgatggaatccgccatgtcatcgtaagtgtagaagttccgcccatccgagaaagcgacacgcccgttcaccttgaacaaataacagtttccaccctgattgccggacaaggaatcatactgtttcaggtccgtcacctgcttcagctcttcatcgagacgtagccggtagagcccctttcgcatgtgttgcacccagatattcccatgagcgtccacttcgatattcttcgccatgtgactgaagttgcccaccgagttagcgaagtaccattcgccggcagcactcttcttgtaaatattcaaaaaggtataggtgccctgtatcaggagttgctcgccgttgatctgcgcctgccgcatacacatagccccccgcacatcggaaagaagccgggcttgcatgcctttaatctggaaagtacctttattatgaccgcaaagcacctggccgccccactctccaatggtccatgcctgctcttcaaggcccggaaccaactccagacgggtatcttcaagccggtacagcccttgattggatgcgatgtaagcgtccttatcgcgtaccagcacatcataaaccatcccgactttgcggcgaaccggctcgaaatggtaaatcagcgaattattgcggacataggcaataccattgtcaagggctgtccagatattattgtccatatcacaatacaggcccagaacggtattattctccaactggttatcagcattctccttccaaagcaagtgtccttctttgctgaaagcatacagcccgttggagatagtgcctatcacgtaacaagagtcttttgtcattaccgcgcgattaacagtatgccgcttcagttcttcatcactatccgtgtgccaggggcggatgccggaagaagtatggatatatcctccgctattgcgggtcagcaacaacattccgccgggataaggcaaccctgccagaacatcgctatcacccaactcctgacgagaaatcaggggaataaacttatcgcctgcaaaagtacagacgcctccattgatcagttgggaatacagcgtgtccccgatccggaaaaggttcaggggaagttcagggcaacggactcccttcgtccccttaccgtcgtatataaaataggatccgaatgactggaagattatattttctccctgctctacaatggtccatatctcgtcattatggaaatcgaatccttttacctgctctttcagagaatgatactccagcaagttcaggtcgttctgttcaaaataaccgaactcttcgaacgatccgacatagatccgcctgtcggaagccacatagaccgcacgcacaatacccgaagtcggcagtggaaacagcttccatcggcttccgtcataccggagcaatccactgttgttgccaaagtacatcaccccgcgttcatcttgggcaaccgcccagttttcatttccggcattatagtcaagaacagaatagttgcggacaatgggtgagaaagggacaggattccccaggcaagaaaaagaaaaggtacaggcaaaaactaggaacaataacagattcttcatcagtcagtcgtctttagaaaaattctttgtgcggaaaaagcagagctacccaatcgaacgttgatagtttgttttcaccacagataacccggatgcacagaatgtatgcttcctaaaggaacttctgcgaaaatcggagttatccgtggtgttctgatccggccggccggatatttatttctttaccggagcactcaaggtctctttatatttcaccggatcggccaatatcttaagagcagcttgcagcccgtcgtcatcttttaattgctggatgatgccgccacgtgtgtagtagtaacgcttaatgatttcatcggcgatcatcgacctgatatctttagagaaatagtcgaggtcacggtccaagttatgagtcagcttcttctccaatgcctttatctcttccgaagcctcatccagataaccttcgaacttggcagcctcttttagcgtcttcataatcttctcactttgctgatcgtacttgaaatcagctttcttcaccatcgctttaaagtcgttataatcggcatcggtcaccttgaactcctgtggagaaggaatactcggatgcttcaggcaatactgcgtcgcatagtcgaaaatcaggttatcacgtaccagatagaaaagaatattaggcaatttctcctgcttgacttcgatgtccggcatcactcctcccccatcacgaacttcacgaccggctgccgtatggaacacggtagtcagactatcggggatagtacctacactgccatcttcattgcggtgtttatagtcgatggcctgcacacagcgtccgctgggaatgtaatacttggaagtagtaagcttcattactcctccataaggcaatgggcgggtggtctgcaccagtccttttccaaacgtacggctacctacaatcacagcacggtcgaaatcctggaaagctccggaaaggatttcggaagcggaagccgtagcaccgttcaccagtacagtaatcgggatatcgagatccagcggttcacgtaatgtcttataggtattgctggcctgtttggtctttcccttcgtcgttacaatcactttaccacgaggcaagaaaaaattagcaatctctaccgcttcttccaagcgtccgccaccgttaccacgcaggtcaatcaccaatgaagtgataccttctttcttcagtttcagaaaggtcttcttaaaatctttcgaaggagtgccggaaaaagtactcagattgatgtaacctacattcttattaaaaatagtatcataaggaatcatcggagtctggatggtttgacgcacaatatcaaattccaatggtcgtgtccctcctttttcgtccggacgctccactttcagcttgaaactggtacctactgctccccgaagcatctggctgacttcctggttatttttccctgccaaatcttttccgtcaatctccatcagtatatcaccggccttcaatccgaccttagctgcaggagttccctcaaacggttcggctatcatcgaacgtttcagcttttgattgtacgtgatcaaagatccgatacctccgaacgaggcattcaacatttgctgcagttcggcctgatcgtcctccggatagtattccgtatagggatcgagcgaagacaacatatagtcgatcccttcacggaccgtcttattcggatcaagcgtatctacgtaaaacatatcgagttctttgacgatagaattaaaggtatccagatttttagcaatctggaagttacggtcgtcaccgctcttgaaactaaagaatgctacagcaaccaacactgctgccaacaggacaccatttcgtctattcagaaactttttcatacacttttcgttaaaatgagacgtaaaagtaactcattgcctgcttactctgacagaacttcgttaatatttaactttatttcatcccaacgctcaccgggaatcgtggttccaactatctgtataacatttccggagagaattgaaccaatcttagcacacttctccaaagaatatccgcaagtcagtccgtacagaaatccggatgcgaaatagtcgcctgctcctgttgtatcaatcactttcttcaccggaatagcttctaccttaatttcttcagtacccttacgaatataagaaccattgccgcctacctttacaatggcaatactgcatttcttactgatcaactcaagagcttctttcggatcttctttgcccgtaaacgctttcgcttcttcttcattggcaaaaacaatatctacatatttatttattaataaggtgaagaattcaagatcacccgctacgatattataactggccatatccagacaaacctgcaatccggcctcttttgccaactcgatggcatgaagaatcatatcatgatcctgtaccagatacccctcgataagcagatatgcataccctttgaacatatccagcgttaaatcttcggctttcagcgtagaggcagcaccgagataagtaccgaaagtacgttctccgtccggagaaataaaagtagaagcaactcccgatggcagatcagacactaataatttatcttcgatgccatttctttgcagatttgcccgaaaaaagtttccgtaagcgtcatttccgatttttccgataaaaccggtcccggcacccaaacaagcgagtccgaggatcgtatttgcagccgctccaccggttgccaagtgggttttcattcggctaaatcgttcgttaatctgctgtaacttagcatcatcaataagttgcatgcttcccttgggtaatcccatttcatcaaggagtgtatcatctttcagggttgcaagtacgtctaccagggcgttgcccaatccaattattttatccatttcactaattttttttgcaaagatattgcatatttcaaaatatcctattacttttgcatcgcaattgagaaaaacaaaacattcttccttagctcagtcggttagagcatctgactgttaatcagagggtccttggttcaagtccaagaggaagagcagatattcacattctcagttatttaaattcttccttagctcagtcggttagagcatctgactgttaatcagagggtccttggttcaagtccaagaggaagagcaaaaaaggttcgtcaacaagacgaacctttttttgtttatacaccctagaaaaatagagaaagagaatgttgcctctgctgcacaacactctctttcctgctgataaaaaagaacctactcaaaccttatctctgaaacacctattgattttcctttctgaggttctataagaatacgaacggattccacttcaagactaccggatggatgtactacgttgaaccgatcggtacccatctgataagagtccgtcacatagagttcaaggggagtccaaccggcatccgacttatattccaccgaccaaccggacggaacagttattttttcttgatcatccagccaatacacggaaagtgaatttagtaggaatggctctctaaagtctacctgcacccattgtttacccgatccctcagacacccactgttctgtaagcttgtctgcagaagattcagatacttttccatcacaaagtgcacgcacggagatattcttccctccggcaacagatgaagcattcactccctttacattacgcagataagccatggtctgctgaccgatactggctgtagaagcctcttcgtttagccaaaccagcattgtacggttatctccccgattacaccaagcataataaggaatcatcgtaatctctcgtgaagtgattcctccgaccttcttttccattccgggcaaagtaatcctctccaatccttgcagcacgccggaagagatgtttgctaccttagcctgtgcttcgttcgtatcccccagatagagccgctgaacaggtcccgcattatctacctcttccgcacaatagaccaatggtccgcgagttacagcagttttacctatattttcactgacttcgggaatacaatcaacaaaacgtacgggcatcggtatgttaagttcaactacgtcaccgggcttccagtcacgtttgataacggcaaatcctttctccatcttgaagtcggttttctgcccgttgacactcaattctacttccgcctgcttgggctgcttgtagggataaagtcctcccggcacaaattcgtcggatcgtgcccacgtaggaatacgcatacaaaccgagaatttgcttccattttcaggttgtaccatcaagcgcactttcccatcaaacggataagcagaagtttgctccagtttcacacgggttccttccagaggaatagttgtctgactgccaccataaagggtcaggtaaactctgtctttactgtaagcatacatataacccggcacttgcagaatcaaacgagaaatattaggaggacagcaggcacacccgaaccatttggcacgtccgccattcccatgattaaaacgtctcactccatctgcttcaagaggattgacatagaagaaacgatcaccatgcagattgatccctgccaacgaattgttgaaaagtgaaagttccgctatatcgagaaacttagcatcgccactatccagatacatgccataattaaagaagacatttgctactgccgcacaagtttcattataggctgttaagttaggaagttcgtagggagctccaaaaccttccattccttctacagccccgagtccacctgtaatatgcatgcgggtcgtcaccagatttgtccaaatggaattgagagccttggtataatcgttcaatccggtcaaggcatccacctgcgccatagccgtgtacaaataagccgcacggaccgcatgtcccacagcttccgtctgctccttcaccggtgcgtgttgctgtgcataagtgggtgccatcactccttcaccctcaggacgataggtcactcccctgatctccagaaacttcttcgccatatcgaggtatagcggatcattagtcacccggtatagtttacaaagtgccagttcaatctcttcatgtcccggagcctggttaataggtttacccccattataattcggatcacctccttcaaagaacactttattcacatgcttggcacttttgatagcaacgttcagtagtttatctttacctgtagcttgatagtaagctactgcggcttcgtacagatgccccacattataaagctcgtgactatgaaccacccatgagtaaggcttctcacccatctcacgaggatcgggattaccacaaatatgtgaaatatataaatatccgtcgtctttctgcgaagcagtgatcaggtctgccactcgatccatgaactcttccaactccttatttggttgaatcatcaatgaataagacaccccttccatcaccttataaagatcagagcttataaaacgatgagtttcaggaagagcggtagagtctcctgccaagaaagcggcacaacgccggaaacgctctactgccggggcactttgttcgacagagaacggtactgttacattgatttccgtctgcatcctattcttccaaaacccatcggtcaaagttacctgattaaaaggaacgggtgttattgtctgcggctcctcctccgagcaagctgtcgcaaggataagcagaaatagccctgttagtacatttttcattctaatttgtttttaaaagtttcacttgggtatgtttgtccgtaacgggtacctctatataataaggatgatgtgcattacccgcctcaatattgaatgtcgttatcattttgtgatcggtcatgacagtatatttaccttcaggcattccctcagcccggatagttgtgttatgaggtttatcagaacggttttccatgcagaaactcagttcttccgtccctctcagagtgatcgggtaatctttccggaatccgtcttgcatcaactcgaccgaaaaacggacaggagtcatgatacggacctgacgacgtactccgtcaaaaggaatgatactcactgttccatctttatccattcggacatttcctccataaccgattaatccgaaatcaggatcatcgagcagataaactcctgaaccgtgaatacctccggtaagcccatggtctatctcaccatcaaaccgccagggagcacgccccactttgatataattcatataggtacgtgagttctgatagggtgaaaaagcccagcctacagcaccgtcattttgttctccccgataccaatagccaaaatctgtctttttagtcccggtattcatcagtgcccacgaagccaacaaagaattatatccataattaatatacctatccggccggtccgaaaaccggtaagcataatcgagtaatgccactccgcccatttgggtcatataatccagatttacatattgtccactccatgctgtacccagattagcataacctggttcaaacaaccctctcaacgccaggtttccatccaactgattctgcatgaaacgatcaatcatcgaaatgtcaaacgaagtatacgagtaccattttttccgattcttatcataccagaattgttcttcgggcttaatgggatttaactttgcatactctgccacataataggaggactcaaaagctgtacggtcaacaaacatctcggatccaaaaggccagggatcttcgtaaaccatataagttaccttcttctcccattcacgacgcaacttggctgcatcttttaatctacctttctgttgcagggcattgataatatccagcagatatcgctcatgaaaattaccttgtttataggcccagtccgtccaaccatgaaaagcccattgtttacccatcaaaatattatagggtacttcaaaataagccatcgctgtccgataagcacgttccagatagccatcagcatccagataagataccatttcaggattatcctctgctatccggtagagattataatagatggcaaaatgagtggtataatcaaaagttcgccacatacgccccttaccggaacccccgtcttcatatccgccatatttcccgctgcggttctgataccagttttcactgccgtaaatgccatatggatagggatattcctcatccgtgcgttgcagcttgccccacacaaaattttcttcataatactccaaagaagcaatttcttctttattaggataaatgacattcttctcactcacatagactggtttactattggacggatcatcagatccgcctaccataaactcctcccgcaaatcgcccaagtggtcaggtgaaagtaactcggatttctccatatcccaaagactataaagtccattataccatttggaagaatcacgatgttgttgtttgtccacaatgaaacgcgcccgtttttttatcagggtttccaaaggctcggtcacaaagaaatcgagaaagcatatcaaatcatctccataatgaaccgtaatcaggttttctcccaaatgggagaaacggaacttatagatatatttatctccttccttttgtccaagactggttatctgtatctcctctggatattctgccactaattcaacaacaggcagtttcgattgcaaggcacaatagacctcaaactcaggagtgactaccataccgggagcaactttcacaaccactccgtgtttatcataaatcttcgtttttacctcttcatgatttccagtgagtgtgaagttgaaacctgtcatgtaatgctcgtaaggctgtacgttttttgaggtagacggtaatctccagctatcattggtacgatctacagcattcattgaatgcagatagtacttgccatcttgtgtagcatattctatcgcagttcccttatgcatagtcatcagcagaatatcaccttgccctgtcagcggagtccaataaaagaaagaggcatttccattcagagagaaatgacggttcaggttctgatgtgcctgaatagactcatccaaagcgcccacaggcagagcgaaccacatatccgtcaccttcaccggatgatgactgcgattaaaaaaatcaatctcccagtctacttcttctcctttaatagtaaaagtttggtaaagacgcacatccgaaggaagctgccagaatatctgtatcttatccggagtattcgacaagaccagaggagtaatatcagccaaagaaacggcataactcttccctcttacttcataagtcagactcaaatcgcccagatatttcccgtggtctacataattccgaacattgcccgcaccttgaaaaacgagcgaactcacacctctctcatccggactgacttccatctgtggtattacggcctggatagaagaaatattcagataaaaaaagagtagagataaaatacaatacttaagtttcataggcactattctttatattaataaagtaatctacagtagttgagtattgctgccttccacaggtcataaaaggattgtgcaaaaccccttattaatggataccgcgaccgggcagacactcaactactgatttacattctaccgaaggatactacggttttaccgaaaccttcacactgctaagtgctctcttatgactatagtcatccaaagaattacttctttcctcgctataatctattcctttataatctttatcacctacattggtagcaacagcagtaattgtaaagtcaccggctccggtgtaaatatacttataagttttctgaattcctccggtagtatatacagaacctaatgaaacaccggtattccacggttcatattcatcagttcccatctctataaaagagagataaacatctccctgaaaacctttgtactttgtatagtcggcttcatgtaccggaagaccggtagcaggatcgagttcacattcatacgattccaatactccgtctccgtccaaatcatatttataaggcgaatcatcagctgccacaaaagtcgaacgaccattcacgtacatatccacttgacgaagaatgattttttctccatgatccaaaaaaggctgcaagtaagtatcccggttgtacatatcacccagtttataaaatccttccgtaggacggcgggataatggatcgttagtctggaacgctccatacgaacgctcatcttggaacgtataatatttgtatcctgcactatatccctgaaagtcttccaactgttcggtatgtaaaccaaaataagcagctacccatgcatcattagagtatttacgtattgcacgatcagcatcacacgctacaaagcgactctcgataattgtattacccggttgattggcaagtcctccaaagatatgaatattcggcttcatccggatgcccgaaggaatccgccgatctgtcaccgtaaacttcaattgattcgtccctatatagctcatttccatcagtgcctccggaaagtctccttttttgtagggcactaactggatattatcaatcgctccgaaaaactcaaaatccttttttacgtcttctatactctgatagtccttaaaatatttataaaacaaggtcttctccccattctttgcataagagacccgataacattcttcataaaagctatcccaatcatgttccataatagctttaatacgcgaacgctcaaagttttttccttcatcacccgtaaaaagtgtcaggtactgagcatcggtattgatcgttaccgtcacctcttcgccgactttcggattttcgggggacacagagatactgacagacggtgtttctacatctgcaccaaatttctcacaagaaaccagtgaagtagctgccacagcaagcagccctataatcagtttatttgttttcatatccattcgtttttaacattaaaaatatcccggattttgtttcatttctgggaagaacgataactcggtaaacggtatcggcatcagcacacggtacactttctcttcattaaaaagatgccaaaggtattccccacgcgccggatcacccaaacggatcaaagaattgtagaggatcgcgataacggcagatatcagccaggtcaaccattgaaacatcaggaaagcgtgctacatcgagccatccgcaatcatcctcggctgccaattcgcgtaaacgttcatacatcaactctttcagtgcattagccggactgatattagtcggaatcatcataaccgaacccggttgataagtataaggagcatctccctgagaaacaaacatatctttaatagatccttgatggcaagcacgatcacggataatattcatcgttttcactccttccgaaacatggccctgcatgatttgtgcctccgctttcagcaagtaaatctctgccaaacgtaaaacaggatagtccactccaccataattaatatcaaaggttgaactcaactcactcggattcaggttacggaatttacctaattgccaccaattacagttccacaagttaggcttgttctgcccattcgtttcattcttccaccacgcccgttcatgactttcaagagctacatccattactttgagctgttcttcggtgtaatcgttcaccttacccggctcaatataaaactcggggcctaattcacgtccggcaggttcaaacacccacaacccgataggagctccaccactgttaggaccggttacccagcctttcaccgaactccacatacgacgggtaatatctccagttatggtgtactttccggtacgatcatagagattctgcaagtcataaggagtcgttccgggcttcggactttcggcattgaaacgatctacctggccatagtccatacacacgtccttgaaactgtaattatgttcccacatcggtatatcatacagcaacgtcagccacgaagtaagatttcttccaccggttgctccgtatttaccttcaccggcaaaacccataggtatcttgtttcctgtaccgactccttcttctgccaatacactgaacataatctcgttatttcgtttggtaaatacagcagggaaatattcttccaacttataagttccgtacacaccggcaatgatatcgtcacacaacttcactgcatcagcatataacgttgtcttatctacatcatcagctgttgtttcattaatcttgtttccatacatttctgcacggcggatataagaagcgtggaatattttcatttttgccaacataccggctacggcacctttcgtaacacgaccataagcaatgcccgaacggttatccaaacacttgtccaatgcataggccatctcgtcatagaggaacttgaacatctcctggcgggttgctcgcggcacataatccggcttcggtccggtaggctctataatcagaggtacaccgccataataacgatacaatgtaaagtaagcataagcccggaggaaacgaacttctcccatcagcatttcagtagctgatccggtgatcgtagctttatccaatgcagaatgtcctgcattctcatcaatcacctctttattggtttccagcctctcaagtatcagatttgcctgtgcaatatacgcataatgctttgaccacaaattcagtacgctacccgatgtcgaagtcaggtcgaacggaccttcattcatcaatgaaggcatcataaaccggtcactggtcataattccatcattgacatgccctgcattagcatacaatatagctacattacgtaaagcagcatcataggaagtatagaaagtttcagacggaagttctgttttcggtaactggtcgaaatacccctcacacgacactaaggcgcaagaggttaaaagggctaataatatttttttcatggcagtaccttattagtatttaaaattaagtgagaatatatgagaccgggcatacggataagccgagatatcgactcccggaagaatacgattatttacagagctgccactacgtacctcaggatcatatcccgaatagttcgttaaacagaaaacattgttaatcgtatatgtcagagccaggtccttaattttccaagcctttaatatatttttcggcatacggaaagttacagccaggttattcatcttcaggaacgaaccatcttccaccatttcagagttggaagcagcccacatatacccggaccaatcaattgcaccaggacctgtaaaagtaccggtaggattattagcaaaccaagcatctttatagtatacagccgacttattacgaatatcgccattgttcatcagattgtatacattaccattgattatatcatttccgtatgaccagctgaagtccatagccagttcaatgaatttccagcgcaaacgggtgttcaagccaccgataaataccggattcacatctcctatcacgacacggtcactcatatccactttcccgtctccattagtatctgcaaaagatgggaatccgtatggcatctctctttcagtagcataccaccaaggagaatcagcactgcctataccattatagtcagaatgccaattactgcgaatgccttccatttgcagaccatagaacagtccgagaggatatcccttttttatcaggacattttccgaacccgaagcagaacccaccggacgcccttccaacatctgtgtctcagcacctagactcagtactttggactgattggaactaaagttcactgttgcattccacgtaaagtctttcttatcaatcagcacaccgcctacactgatttcaaatccacggttacgtaccgaaccgatattcctggttacttttccaaaaccggaagtacgtggcagattctgttcaagcagcatatcacgagttgtcttggtatagagatccaatgaaatattcagccggttattaaacatatctaaatcgagaccgccgttaaactcttccgttacttcccaactgatttcggggtttgccatacggctggtgtacaaggccggaatagctccgtcaccaaaaatggcttgtctctggctggaagataaggtctgtgcataagcatacggagcaatctgatcgttacctacctgaccatagctaaaacgtagtttcaagttattaacgttcttctccaaccaagatacattcttaaaaaattcttcttctgaaactctccaacccaatgctccggacgggaaaaatccccaacgattatcagggctgaatttagaagaaccgtcagcacgcatagatgctttcaataaataacgccctttataagagtagttagccatcaatacccccgaaagcattgctatcttctcgtaagatacaccgggagatttcacatgattaccactttttgcatcataaataccttcccatcccaaatcggtattaaactgagaatattcctgattaaaggtttcatacttgttggtattagcctcgtatacggcatttaccgagagactatgtactttgttgaacactttattaaatccggcctggactactccacgcatatttaatccactttgcgtagcgtatgtggccaatccgttgttatcgtagcctctctgaatggttttcgggataaattctttcacttcacctttgggtatacgcacaccaatacctccttttacaaaccagttatcattgatattgtaaaccaactctgcctgaccgaagaaagtattattcttgttagagtaatcaatatcttttaattttctataagggttatccatcttacctgtatagtaaaggttatcatctatctcctgaaaagtccattctttaggaacaagcggagagaaagtctgtatttcgttaaaaatattcccttctgtccagaaagcaccgctacgaatattgtgttcatatgaaagatttgtgttcaaagtcaattgcggaagcaatttaatgctattattcgtttggaaatagaatcgtttaaatccggtattgatggcaataccgtcttcattcatcaacgaaaagattgtagagttctgtatgcggtctgtcccccctctgtaagaaacttcataattctgtttagtaccattctgcaaacaaagatcgggatagaattggaaacgggaaggattggtattccatatctgatctttatattcctgatagaaatcagcattttgccagcgtccgctcataatcatatcacgcatatacgcacgcatatagtcttccgcacccagcattggaatagaatttgccagtttactgataccgtaagtagccttcacagagatttcactcataccggccgatcctttcttcgtagtaatcaacacaacgccattagccccctgtgccccataaatggcagttgatgatacgtctttcaggatagagatactctcgattgcatcaggagagatagtagccaaaggactttccagaggatcgtccgaaatagggagaggaaaaccatctatgacatacagaggtgaactacctgccgtaatagaactggctccacgaatcttaatcgtaattccaccacccggcgcaccatcattgttcattacctgcacaccggatatttttcctttcaaagcctgctccagacttaacgggttggtttgcatgaactgatcggaactcaaactggatacagatccggtcaagtccactttacgctgagtctgataaccggtcactaccacctcgtcaatcaatactcccgcatccatcagtacatctatccgattttggctacctacagttttttcaaccgtattcataccaatcattgagaaaacaagtacttgtcccggagatacatttttaatcgtatactccccattctcattagtaatcaccccattgtgtgttcctttcacttgtacagtggcaccaataacagtttcattactgcctttctctctcaccgtacccgaaatgctctttgtgttttgagcaaatccacctgcagacaccagcacaaacatgcatattaaaaagacggcttttatcctgccttccgtatctgctctaaggttgttcagatcttttagattcataatattagtaatttagtcattaaaaaggattcatacatttttagtttgtttgttaagtcccgaagtcggatcaggacgagtccattttgtgtggttccatactgagttgttgtttcatgcatattttactgtttgttgtttcagcaaaagtaagcgaaaagagaaccgaaccgtaaaacaatagattattcactgatacgcatattcatatttacattaaatatttctatagtgaatataaatatcagtttgtgaccataagtatctttttgattcgtttttatttcagacttttgtgttgtacgtaattaagagacgaatgaagaagagcacttttaccctgattttatttttttcttctgttatcctatatgcacaacagaatgaacttatgttccactccctgggtagtcaacacggacttacctatagtgccgtacgggatattctgcaggattcaaaaggatatatttggattgcaaccctcaaaggactgaacaggtatgatggatacaacatcaaacaatattataagtcagatgacggactctcttcaaactgcatcgagaaactgctactcctcggtcaggatactctattgatgggtaccaatgaaggactgtgcttgtatgatatgatgagagagaagttcaccactattgttccgcaaaccaaggccccactatatgtattggacatggcctacgacggacgttcagttttcattgcgtccgattccgggctatatgcatatagtaagacagagcaaagtatgccactactccataagggattgattgtaaaagtaacgctggatatgaatggaaatgtatgggcagtgagtccaaatacgatttattgtttccgcccaaacggacaaatgaccagaaaaatcacagctactgaggtttctccggattatcctgtcgagtttacttctatttataaagattcgcaggggactctatggctggggacgaccgaaaacggactgtaccgatacaacaagaactataatcaattcgtatccgtggagttcgcttcacaagacagaaaggatatgcgttatattcgctgcatccaagaagatatgcgtggaaatttatggatcggaaccgaaaacggacttttcatctatgactatacagataacagctacatacaatatcggcagcatgcaaaagatgtccaatccggactgaccgataatgcgatctatactatttataaaagccggggtgacattatgtggatcggcactttcttcggaggggtcagttacaccagcctgaccgaaaataatttccactacctgatagcagataatgggaaacaatacctgaaaggaaaagcaatcagcaacatcattaaagataaaaacggagctttgtggtttgcatccgaagatcatggaatttctattctttacccggatggtcacatcaggtatttaaacaaatcgacacacccgtcattaaacggagataatgtccatgcattagccgaagatcactccggtaatatctggattggcaactttatcgatgggttgcaaaaagtcgatttagcaaaaggctatattcgttcatataaaaacatagcagggggacacgcgggactatccaataattcaatctataaactttatgttcataatcctgatactatgtttataggaaccagccaaggtgtcaatatctatcatttccggaccgattcattcactcccttccttccggatgtattccggcttatacgtattgacgacatcacacgtgatctcaaaggaaatatctggttttccacacatttcaacggtatttttcggtatcatattccgacccatagtatccatcgatatcaaaaaggagtgacaggctgtaaaacaatgaccagcgataatatttattgtagttttgttgactccaaaggagaggtctggttcggtaccagcaacggaggattgatgaaatacaatgcacgtgcagacagtatacaggcattcggaaaggagaatgaactccggcaaagagatatttattccatacaggaagatagctttggctatttatggatgagtacggataacggtatcttctctttcaatccggaaagtcgtagttttgcccattataaagtatccgataatctggtttccaaccagttcaatgcctgtccgggctataaagatcctgacggtacccttttctttggcagtatcaatggggtatgcttcttccgaccggaaggactgaaccataacagtcctacaaacgatattcatctgactttctcggatttcaggattttcaataaacacgtacaaccatcaccggacggcattctacagaataatatcgacagcacatctgccattcgcttacctcacggcatgaataccctgacttttgattttctggtgatcaactataatgaaaattgccaatcacaactttcctgtgaatactatctggaaggtatggagaccgaatggaatgcaacacaacaaatcccacaatcagtcacatataccaaccttgatccgggcacctaccaatttcacgtacgggtcataggaaaaaacggagttgtattcgaccgtcggaaaataaccattaacattcgtcctcactttttgctgagtggtttcatgatcactatttattctcttatcggacttcttatcagttttataattgtccgcttctaccaagtgcgtatgcgagacaaaatggatatccgcatcgaaagaatggaaaaaaacaacctgcgcgaactgaataaacacaagctgaattttttcacttatatcacccatgagtttaagactcctttatctatccttatggctgtattcgaagatatatcaatcggacgaaacaatacaattaccggtgaagaaatgaaaatcatcaatcggaatatccaacggcttcaattcctgatcaatcaacttttggaatttcgttctgtagaaaccgaccatgcacgcatcgaatatgtcaaaggagatattatgacttatggacgcagcatcttcgaactgtttattcccgtcttcagacaaaagcagattgtttttcaatatgcaacttcagccgactcttattatacggtattcgatagagacaagatagagaaaatcatcagtaatctgctcagcaatgctttcaaacattctgatcctcaaagtgaaatcaacttcaggattgacgtagacaaagcttccggacaattgattctctcctgtcataacagcagttcatatattcatccggaacagcgggaagctgtcatgcagccttttcacaaaaccgattcatccgatcaaaagtattccaatacgggtattggactggctttggtgaatggtctagttcagctgctttcaggaacagttgagatagaaagtcatcaaaatagcggtacgacctttaaagtaaaattacctttggtcgaagactctaaggatatgattgcaccggacgaaactttggatatcgttaactcacccgacgtagtggcagatactgtatacctgctcaataactccggactaaaagaggatatgaatgctgcaaatgccgagaaaaagatgactgtacttttggtggaagataatccggatatcaataacattttaaaaagtaagctactccgtttatataaggtgaaaacggcttataacggacaggaagctgtagagttgctaaaaacacatatcatcgacattatcatcagtgacattatgatgccttatatggacggatatgaattgagtaaatatattaaaacttctcgtgaatactcccatatcccggtcattctcatcacttcacagccttcgaaagaaaacgaattgcaaggtttatctgcaggagccgacgcctatatcgaaaaaccattcactttcgatgaattgaatcttagaattaccaacttgcttaaagccaaaaataatatccgcgaacattatcacgacatgaaaatattccaactcaatgaagaactcaacaacaaagacgaggaatttatcaaatcattgacacaattcgtcatcgaacacattgaggacccggaattgagtgtcgaccaactgaccactcacatgaatatcagtcgaactcaactatacaataaactgaaaaaactattaaacctgagtgcaaccgagtttatcaataaaatcaagatcgatgttgctaaagtaaagattataaagactaatctgactattgctgaaatctcatggcaactcggattcaataatcccagctatttcagtaagacattcaagcgtttttgtggagtgacacctaatgaatttaaaaacggtaaaagccaatagacagaccgttttgccattttattcggtccattacgccttaacagtgatctgagacatccattatttgtaaatgtcgaataatcgtctttactcccataaacattacctataaaggtaatttgagctattaatattcttaatattatatgaatatatgctcaacaacatacataccagttcgtacctgtttaaaatattatgtatatatttgccattgttaatccaaacacaatgaaaacaggaacaatattcagtgtcgaggaatttgccatccatgacggaccgggaatccgaacaacgatatttctcaagggatgtcctctacgctgtgcatggtgccataatcccgaaggtatatcgccacagccacaatacatgattaaaaaaggagtcaaaagtatttgtggatatcagatagctgtggaagaattggttaccatgatcgaaaagaaccggtccatttatacgctcaaccggggaggagttacactaaccggcggagaacccttatttcaaccggattttgttatcgaactgctccgacaacttccggacatacatacggctatcgaaacaagcggatacgcaaacactcacattttcaatgaggttacttctttagctgatcttattttattcgacatcaaacatacggacccggaaatgcaccggaaatatacaggagtggataatgcgattatactggaaaatcttgctttactctgtaattccggacgagattttatcattcggatacctttaatcccgggtgttaatgatacccgggaaaacatgagtgccattcttgaaaaaatcaaagatgccaggaacctgatacgtgtcgaaatccttagatatcaccgtacagcaggtgccaaatacgcaatgatcggagaaacgtatcatcctccgttcgataccggaaaggcgccacaaatctataatgtatttgaagaaaataatatcaaaaatctaattgtatgaacgaaagaattaactatctaaaaacgtatattttagataaacgacaccattcacaaaggagaacaccgtcaagtatcgggctggacaaattgaacacaatttatgcccaacaaggtttatctcctgtagaacgtgctacagcctgttttgctgctttgatgaacgctgaactcccggttatacttccgggtgaaaagatcgtttttacccgtacccttacgcaagtaccggatatatacacccctgaagaatggaacgaaataaaaaacaaatattacatccacgaaaaaggtacggtatgtaatatctcccccaattacgcttataccattcaacacggactggaagcgagaaaacaggagatccgaaagcgtcaggaaaatccctccttaaatgaaagagagagagtattcctcaatagcatgtaccaatgcatcatatccatacagaaactaattgagaagtatgaacaatatgcactgctcaataacgagacagaaattgcgcacactttacataccataaagaccgaaggcgctcaaaacttcagacaagctctacagcttttgagaattctccacttctccatttgggaagcaggcaactatcacaataccctcggccgcttcgatcaatatatgtatcctttctatcagagggacctggaaaatggaacactcaccaaagaagaagcattcgatctgcttgaagaatttttccttgtatgcaataaggacagcgacctgtatccaggtatgcaacaaggtgacaatgggcagagcctggttttgggaggacgcgatccggagggcaaatacttattcaacgacctgtcccgaatgtgcctgcaggcaagttacgaattaaaactaattgatcctaaaatcaacattcgtgtagaccaagagacccctgacgaaatattcactttaggttcccgtctgaccaaaatagggctgggtttcccccaatacagcaatgatgatatcatcattccgggacttatacggaaaggctattccaaagaagacgcatacaattacgtagtggctgcctgctgggaatttatcatccctaaccgagccatggatatacctaacattgatgccgtttctttaatcggatgtgtagaccggtgccttgaaaaactaaatacctgttcggactattcatccttttatacattggtggagcaggaaatacaaaaggaggtcaatgcgatctgcgagaaacaccgcaatctctacatcatcccttctccaatgatgtctttactgatggacggcaccatcgaaagagccaaagatatttcggaaggttcctactacaacaactacggaatccacggaacaggcattgcaaccactaccgatacccttgctgccctgaaaaaatactatttcgaagagcaaagcctggattatacaaccctgcttactgccataagaagcaacttcaaaggctacgaagagttacaaaaaaaattaagagaagaagcgcccaaaatgggacaggataatgactatgccgacttgatagccaaagatcttctcgactcttttgatcggtcattggccgataaacgaaatgaacgcggaggtgtttaccgggcaggtacgggtaccgctatgtactacattttccattccaatcaattacgtgccacccccgacggacgtaacgatggcgagatgattcctgctaattactcccccagcctgtttttaaaacaaaaaggtcctatatccgtcataaaatcttttaccaaacaacatctggaccgtgttgtcaacggtggtcccctcaccctggagttcgatcaatccgtattcagcaatgacgaaaccattgaaaagctgggtatgctcgtgaaaacctacatcgttttaggcggtcatcaactacaactaaacacagtcagccgggagacactgctacatgcccggaaacatcccgaacaacacaaaaatttgattgtcagagtatggggatggagcggatattttgtggaattagacgaatgttaccaaaatcacgttatcaatcggatcgaattcggtctataatacatctgcattatgaaaaatacagcaaagaatttcatgttttacgttgccttcgtggcatcattgggaggattactttttggattcgataccgcagtgatatccggagccgagaaatccatccaggtggtatatgatctatccgacttcagccatggcttcaccattgctatcgctttgatcggtacaatcatcggagctttcgtctgtagtaaaccggtagaaaaacacggacgtctgaaagcactgaaaattattgcttttctctactttgtttctgcagtgggcagtgctgccatcatcgattggtattcctttttattcttccgttttgccggaggtttagctgtcggagcctcatccgtagtcggtcccatgtacattgccgaaatatccccctcgcgttggcgcggccgttttgtcgcattcttccagtttaatattgtactgggtattgtactggcttacttttccaactattggattcacggcattgcgcatgattggcaatggatgttaggagttgaagccattcctgccatcgcattcgctcttctattatacaccgtacctgaaagccctcgttggctggtaaagcaagatcgggaagccgaagcccgacacgtcataaagaaggtcagcaatgcagatattgaacaggaaattcatgaaatcaaagaatccctggtaacaataggagccagtggcgaaaaactgtttcagcataaataccggaaaccgatcctctatgctttccttatagctactttcaaccagttatcaggtatcaatgccattctctattatgctccgaggatttttgagatgtcaggtgtatttaccgattcagccatgatgcagtctattgttatcggactgaccaaccttactttcactatgatcggaatgatcctgatagatcaggtaggacgaaaaaaactcctctatatcggttccatcggtatgaccctctctttggccttagtagccaaagggttctaccaagacgcattttcaggttactatatgcttatctgcctgatggggtttatcgctttctttgccatttcactgggtgccgtcatttgggtattaatctccgaagtcttcccaaacaatgtgcgctccaaagggcaagtattaggcagcatgacacattgggtgtggtccgccctcctttcatggatgtttcccgttttcatccgtacaggaggtaccttcattttcagtttctttgccattatgatgttcctaagcttcttctttgctctcaggctacccgaaacaaagaacaagtctctggagcagatacaaaaggaattgaccaattaacaacttacgaataataaactaaaaatatgaatcgtatgaaaactaaactgatcattttattaatactcacaaccatgatacacacaaacaccgtaaatgcccaacattcacaattgaaaagagccgattttcaacaaacaattgacggaaagcaaaccgatctctactttctgagaaacaaaaacggcattgaaattgccatcaccaatttcggaggacgagtcgttgaattctggactccggataaaaaagggcattttgaagacatcgtcctcggacacgatcatgtggacaaatatctccattataaaggtgaaagatttttgggagccactatcggacggtatggcaaccggatcaacaaaggaaagtttaccctgaacggacaaacttaccagttacccatcaatgatacacccaacagtctacatggtggctttaaaggatttgatatggtagtatgggatgttgaacagccggacagccagactttacaactcacgtatttatccaaagatggtgaagaggggtatccgggaaatctccaagtatccatgagttacaagcttacggataaaaacgaatttattatcactcaccaggctcaaacagacaaagaaacggtcatcaacctcacccatcattccttcttcaacctgcacggtgcaggcaataaggatatcaatgaccatatactcatgatcaatgcggataagtttactcctgtcgatcagaccctaatccccaccggtattctccaggatgtagaagggaccccgatggattttcgtcgccctacacctatcggaaagcgagtaaatgattcgttcgagcaactggagttcggtcacggctacgaccataattgggtattgaatcgcaaaacctccaacacccccgaactggcagcaaccgtttatgaacccgcctcaggaagatatcttgaagtatggaccaccgaacccggactacaattctatggcggtaacttctttgatggtacaatgaccggaaagcacgaaaagaaatacaactaccgggcttccctcgcattggaaacccagcactatccggatagtcctaaccaaccggaattcccgtcaacaaccctcttacccggagatacttacaaacatatatgcatctataaaatcaatgtacaatgaaaaccacaaaacatttatctgtcgcagcagtactaaccgtactgatgcaaatggggtgtcagtctcacacagacaatacccggcaaacactccacttgcccgagctaaacgaagtccggatagaagatgctttctggagtccgaaactcgatatctggaggaaaataaccactaatgatgtattaaacaaattcgaagggaaatacactccttttcccggatcgaccgacacgcgtaatgctttccggaatttcgatcgtgtagctgaagggcagagagatatcaaacagcacgatggtcccgaatggtatgacggactcgtttatgaaagtatccggggtatcgccgactttcttgcaagccaccccaataaagaactggaaaaacgaatcgacggatatgtagaccgcatctatgccgctcagcaaacagagccgaccggatacatcaacacccatacccaacttatggaaaacaaccatagatggggagacaatgggggactccttcgtggacaacacgatgtatacaatgccgggatgctgatcgaagccggagtacattattatcaggcaaccggcaaaacacgtttgcttgaaattgcaacccgctttgccaattacatggcagattatatgggtccggaaccacgcaagaatatcgttcccgcacattccggccccgaggaagccgtaatggcattatactggttgtataaaaacgaaccggaactgaaagataaactttccataccggtccgtgaatcagattattataatctggccactttttggatagaaaacagagggcatcactgtggctttccattatggggaacgtggggataccggaaatcggaaaaatggattaaagacgcttgttatcaccaagctgaattcggcacacactctcgtcccagttggggagagtattcacaagattcgatccctgtactcgaacaaaaaacaattgaagggcatgctgtgcgagctaccttgatggcaaccggtctaaccgcggccgcactcgaaaaccaatcacctcaatacatcgaaacagctaaacgtctttgggagaatatggcaggcaaacggatgttcatcacaggtggagtcggtgctattcacgaagacgaaaagtttggtccggactactttctgcccaccgatgcatatctggaaacctgcgcagctgtcggagccggttttttcagccaacgcatgaaccaattaacttgcaatgcccgctatatggacgaggtggaaagagtgctttacaacaatgtactgactggcgtttctttgtccggtgataaatacacctatcaaaatcccctgaataccgataagtccgacaggtgggaatggcatgtatgtccatgttgcccaccgatgttcctgaaaatcatggctgccatgcccggttatatctatgcctatcagggagataatgtctatgtcaatttattcataggaagtgaagtgcgaattccggtcggtgacaacagcgtccgattgaaacaattaacctcttatccctggcacggcgctgtttccattcaagtcaatcccgacaaggcaagcaccttctctatgaaagtccgtattcccggatgggcacaaggtacagaaaatccatacgacctttaccaatcgaatctaaaagcaccggtcaagttaaaagttaatcaagaggatgtacttttgaggatcgtagacggatatgcagaaatcaaccgggaatggaaaaaaggcgatcacattgagcttgaactacccatgcaacctcgcctgatcactgcaaataaagcagtcgaaaacttacggggacaagtcgcattggcgtcagggcctatcatttactgttttgaggatgccgataatccggaactgcagacattcaaacttcaggcacaaacacctttggaactctcccatgacagtaatctgctcaatggagtcaatatcatcaaatgtcagggtgatattccggcaaaagccatcccatattatgctgtggccaacagggaagagagccatagctataaagtatggattcctcagaaataagagccagacgattcctataaacaaatttattcaagatgaaaaagaaagtatcaccatttatacgtaaatttgcggaacgagaatcatcttaattatagattatcattatggaaaagaaaacaatcgtagcacgtgtagaagtgctacccggcaaagaacaagcatttctacaggcggctgatgctctaatcaaaggtacaagggcagaagaggggaatattagttataacttatatcaaaacccgtcacaacccgtagctttcattttctacgaagagtacaaagaccagcgtgccatggatatacatgcggcatccccccatttccaggcttttggaaaggcaatcaaggaaatgctggcatccgatttgataattgaaactttttaaatagatacgagggtgcttcaatgcaccctcatatttatcacttcatttattcggccacggccaatgtcaacacactgatccgtactccttcaacttcaaaaagcgtagatgcacaggccacagttgtagatccggtagtcagcacatcatcaataatcagtacatgtttcccctggaaacaggctacatcacacaatttgaaaataccttccacattttccgagcgttcaaaagtcgatttacgggtttgagtctctgtattcttttcccgtatcacgcttttcgcattcagcggaatccccgtcacagaagatataccacgggcaatccattcactctgattgtatcctctcagcttctgttttttcttatgcaaaggtacaggaacaatcacatccacatgatcaaagaaaccataagaaattaattctgccgccatatagcgtcccatcacttcgcccagttctttatatccgctatatttcagcagatgcaagatacgtctgaaatcactacctttacgataaaagagaaaggaagaagctctttcaagaaccggaatacgtccccagaaaagacactcaaccggattatcctttcgcagatgaaatccggtacggggtaagttcatattacaacgaatacacaagcactcctcttctttcgacagcggagctccacaaaccacacaacaacgtgggaacaaaagagaccaaaaagagtcgaaccaagtattcatgtgatgtttttcagtttaatcaatacccggaaagttacatttccagtggaggcatctctttcagcagccgttgaaagacaggatgtaaagggccattcgtcgcaatgatatgatgtccttcaataaaatactcacttccaaagaaatcagttacttttccgccggcttccaacacaatcagtgccgcagccgagtaatcccatttcccgataaaagcttccgcccaggcatcaaaacgtccggccgccacataacaaagagccgatgcagccgagccattcatacgaattcctcctaccactccatacagttgtttcagtaaatattccgcagtccgtttgtattgccgatggttataaggaagttcagtgattacaaacgcctcttctatgctttctattttcgagacatgcagttcatctccgttcatccaagccttcccacctttccaggcgtaaaaacattcatccctgcaaacttcatacaccactcctaaaagtaattctgtacagctcctcaatgcgatactgacacaataaggagcattgtcatgaatgtagttagtcgtcccgtccaacggatcaataacccagcaataaggctcattcttataaacggcagaaccttcttccgcaataaacccggcttcgggcagcaacgcagacagttgtgccactaacaagcgttcagattctttatcaacatacgacacatagtcatgcgcatgcttttccaccacacgctcccgactaaagctcctccgttcttttctcaaaaaattcccggcttcagttgctatccggcatacttcagtagtaagttgttgaagatccagttccatattcgatttttaacgtatttcggcaaagataaatgattcttttgaaaaaacattgcagcattcggcatatctctgcgtctaaaagacataaaagacttaactatgcaaaaattcagattgacaatgctatttatcatttgcggcaacggatttgcttatgcgcaaacattcaacgaaacgcccatacctgcctttacactgcacaaagaaatgaaaacccctcaaatcttcaaactacccgaaataaagaatactttgtcagaaaccaaccctgctttcaataacagtatgccgttagtcaaacaatacgaactgagaaaaaaattctcctatctggatcccgtcttcaccggttattttaatcagcaacagtaccgactgttcaattcccgctatttcggatacgaattatacggttccagttattcactccggggagtaggtacacagaatatggcaggtggcagattggtatatcgtcttaacagacaactggctatccggataggtggcaatgcctatcaataccgctctaacggacggatgtttaatgattttacccttaacgcagaccttacctatcgtctgaataattggctgaccgcttatatttacggacaataccggctggactgtaatcccaactccggtgtacaaggtttcccgttatctccacaatcccattacggcgcttcattccggataaacctcctggaaaggaaagaatatggtctcgacctgaatctgggtaccgacagaagttacaatgctgctacccggcaatgggaaaatacttataagataggcccaaccatacgattaaaataaccaacccaatataaacctgactatgaagaaagggctatccggtaccgccaattttaccggatagccctattttataatcaatcttatttacatataaacactttacactcaccgggagcaagctttacgatccatccggtagaagcctcagccacaaggctgccttctataacatcatatacccgatccaatgacaatccttctaccgtctttacattcaactccacgtctacgggtccggatatccggttcagacaagctattgctttgcttccgtcactcaacggcttcacccagacatcataatgatcggcacgaatggcacgctctgcctgaatgcccagcggatcctgattgatagcaatcagatccttattcaaaagtatttgtaacgtactatcattcatctgccgtacatcattgccacagagtaatggagaagccatcatgcaccagagagcaaagtgggactgatattgttcattcgtacaaccttccgattcataaccgatactcttactttttccgccaatccccacaacaagcatatccggatcattccatccgccgggtcttgcatattcactaagcggtgcatttatttcaagaatgttcaaaatgccacgtaaacctcccttttcgtctgtcgaacgattccacaagtcgccaatatcaccggatactcgccataaatgtccgccgactttcttcgcccatttccaaggttcacgctgtccccactcacaaattgaaaagacgatagaacggtcggtcgctctcaatgccctccccatcttctcatatctttccatcgcttctactcttccggcaggtgcattgcaatagtcatacttcaaaagatcaacaccccaggatgcgaaatcccgtgcatcaatttcttcatatccataactgccacaaaccccaccacaagttttatcagcggcatccgaataaattccaagtttgaatcctcgctcatgcaagtaatcggccacatatttgatgcctctcgggaactttgttttatcaatttggatatgaccgtcggctcccctttcaggcaactgccaaaagtcatcgatattaatataagcataccccaaatcacgcattccgttttctaccattgcatctgcagtttgcaacagtagctcctctgtcaggtgacgtccgaatgtattccaactgttccaccccatcggaggagtcagcaacaactcatctcctatattaatcagtagttcctgtgtatcggttccaagggcattctcagctttcagcattactttgtacgttcccttttctactacttttcccttgattatccccgtttctttatccagcttcaatcccttgggaagattttcagcatgccactttatcggtcgttctccagaggtgggaatataaaacaaaaaaggggtagcaggatagtttcccaccacatgagggggattaatacacggtttcccctcaaaaatagcggttcgcacttcgctcgcctgtactgtcggactcgccagcatcagacataagcaatataaaaaagaaacataacttgtaattttcatacgtttaaaaagaatttatatagattttattttaatgttacaacaaccattaccggattatcctcttcatccaatcggtttatcaattcatccagttctttttttctttccggcagtaaagctttcgaatagcgtttacctttactcagataacctaccatccgggcatttgccaactgatttcccaaccctgttccgggaggagtaaaatcaaatcctgccgccaaatcatcttttataatcacatttgaaaaactcttcttctgtttatcatacaatcccacaaagctttcattcttcaggacataaagcacaaagaaataacggtctgactcaaaaacctgttgtactgcaattgattgaaaacgttttccgggatctatttcattggcagatacatccacatccttccccgaacaatcaaatttccatgccaatgtcttttttctgttggcatcaattttataaatcagattctccaacgcaggtttaaagtaaatatcgcccccataacaatacattacatcgcgggtagataggttaacaccatatttctttccaggttccatatatcctttccagatctttagtttcttcccattttcatcgataaggaacaattgttggggattatcctttctcataaaataattattatcacaatagagaatagatccctgaccgtctacagctccggtacccatattcaggtgaggagccggtatacgacggagaaatttaccattgaagccataacagattatatcctggaaatcctgaacatacagtttttggttatcagggtcagtaaaaaacaataatcctaccgcatattcttcaggcccctgtccttgccggcctatcttattcataaacttaccatttttatcgaaccgataaaaacttctggtctgtgcgtcacccgcaataatcgagtttccggcataaataatactacattcattccccagcagacaattatcagtagtctctaaagggaaataacgtacatcagatgccagttcactcattaataccgtcttaggactttgtgtaacagcctttgccaaattcagcgtgacggcagctgcattcttctgagcaaatagtggaaaagccaacacatgggctaataaaatgcaaaatgtaaatgatttcataatacctcctatcttttaaatgtataaagaatcactaccggattggcttcatccccgatattcaatacatcaggagcctgctttagatatcctttttcacgtaaagctaaaagaatatcagcattcaccacttgtgcgcgtcccccatccgccattacatactccggccagaaaggtatccctccatctatatcattatccatgccaattacattgccgcctggaatggcagcactacattccaaataatcatccggaatacgctgcgatttcagttcaccggtcttcttatcgaatctttgtataaaaatagcatctcctttgtacagacgcaagtaaagatagtgaggagattcgaacagatcatagactccaataatctgatccgtttcaactgtattatccctgaatttattaatattagcaatatccatataatattcagtcgggttttcccgtttcagaacataagccggctctattccattagcataaatcccggccaccgtatcattgcatgcagtaaacagcagtaccccttctgtagaaggagaaaagcagatttctttcatgaaacaaacgtcttgagagagtccttgtggaaaaagagacttagactttaacagcaaaccatcagcctgttgcaatgcgcctgcccatggtgcttgttcaaaaggcttcatgaccaatcctttcaatgctctcttcccatccgcaaagacatacattccaccggcctgcttcaccgttgtatcattccgtagaaaagttccgtcatacgaatacaccaatgcatcccctccatactggaatatagataattctttattgctatcatcaaccgcaagttcacttatcatactatactctcccggcccatttccctggcggccgacccgacgtatgaacttaccctttcgatcaaattgcaacacttcttcagtctttccgttatacataaacatgtaatccgtcgtcacctgcagattcagcagattgctaatcaggcatgagtctgttgtttccaaaggaatatattgtatgctcaccacatcttctttcatggagataggtgtctcttcctgcaaagcagagcgtacattgacaatcgggcattcggataaagaagaagattttggctggcaggccaccagcccgagcagccataaaccgtttaacaataatattgtgtttttcataatgactgtctctcaatatttatttttcagggatatgtatacaaagatacattttcaatttgaaaaatcacttaaaatcaatcatttttatccctatttataaacccgacaatcaaataccatataaatttagtgtgatcagtccggaaaggttggttgttcaagccaccttagcatctccgccttactccttccgcaagtagccagcaatgcttctaaattacgtttatcccgttcacccatatcaaaccccgaattgatgcccctcggatgatgaagatgatataacggtccttttacacgtgcaatgggcaactctaatatctccagacgcttcactctttcggcatcttcgggaccccaaccataaaacgcttcattctctccgcctgcccgcagataggcaaccctgttcacaagaaaagctcctcccaccgaaggtctcatccctattgaagtagcatccaccttttccaacactgatacgtccttgcggattctgtcactcatagcttcattcagaaagataaaacgcccgtcatacgggaaacacatcacacagcccgaacaaatcctgccgaccgcttctctcaactgaaccggcggaataatcacatccgtatcccagatacctgcaatcgggaacttagccgatcgcaacaatatatttaaataacgtgtccggtagaacaccggatcatcatctttcacaaaccgatagcgtaacctctcacacgtctcagacaaataaaaacgttgctccgtatccgcctcaagaatatccacagacacctctgtctgctgtagcagcaaagaaaggataaaccgaagattctccgccctctccggattatctacccgcaaggggatgacaatgctaacccctcttgtcagatccataccgcctcctttccagatataatcatgcccttctcacagtactccatcaatttctcgactttagcattgaacacattcaaccgatgcaacaggcaaagaataaaaaacacctcttcgaaaagtgaactttccctgactccgggcagcgagtctgctatccagtcaatcaggtaaattaaatgctctttcattcgtagcaccttgatgtcttcctcacctttcctccgggacaaccggtaatacagataataagcgagaccacaaatacctttcccgatgcctaaagttccgatcgccctactattaatcgtgttaaataccctgcaatcgatctgccatagaatctcgtcggcatccccttccacaaagccctcctgcaacagatactcaattccgacacctactccgcacaaaccgtcaccataagtcaccggaagttccaaagaacaattctccatcacctcatccagcaacacttctgctttctcttcccactcttcttcagccgtctgccgataaagacgatagaatccgatgattttccccatttctcccatcatccccggattttctatccctcttacgctttccatattttctttattgacgtaatcaatcattttattacaccgaccaggcaaccacttccggaatttgcctttcctcttccgggggaaacgttctataatctccataacaacgggtcagataagcatcgtatcctgacggaaccggaaactccactccttcaaatcgtgcagtatccagatattccacctcatccagccgcaaatgaatacggctctcactcaaattccgctcaaaactgttcgacaaagcattctcatacttaccatcccaatcataaatgaaaagatccaactgtaatccaccgaactgcatcggctcggccggagtctttttatccggaacataccggctgtgccgatctctcaaccgcgcctcaaccaaccagctccatggagccatggccggttctgtttccggagtctgaaagaaaatatcctgaggcagttccggtacacccttctccaaaaagagtgcataatcactccttaacatccccacatccgtatctgtatcccaaggaataaacccctgatgccggatagctcccagcagtgtaccataatcgagccaataatcaatatcgtgcttcttgcagacagtatcgaaagactgcaataaataaagcatcctccgatgtgcctcctttatatctatattcataatttatattttaatattccggccaaataccggttttcctctttactcctgatagcaatacgaatatactgctttccatacattcccctcttcaagctacagtcttttaccagaatatcatgctctctcagcaaaacttccgcaagctctcgggcgctgtacttatgggtcacttcacataaaaagaagtttgcttgtgaaggaaataccgctaaatagcctacctcctgaagttcttcaaaaaagagcgttctttcctctctaaagcgggcacatgcctgacggtagtcgattgtgtatttgtccagaatctgtaaatagtactccgccaaagagtttatattccagaccggaagtttctgctgtaattcatccattaatttatggtcaccggaaacagcaattcccaatcgtaatccgggaattccatgtgacttagacaggctctttatcaccaccagatgattatactccttcagtatcttgtcaccaatcagagaagtttcctctcctccctccgagaagtcaataaaagactcatccacaatcagccgtatcgaacgctcctgagtccatcccgctaatgaaatcaaatcctcgtaaggaatactatttccggaggggttatccggattcagcaacagtaacgaagtcactcccttatcctcaaaaaatattttcaggtcgcttacggtatagcgataacctggccccaacggcaagaaagtctctatccggtcatcacgcaccagatattcttcaaatgtaggaagaatcacccccattctaccgggaagcagctccatcagctttcttatcaactctgccgcgccattccccaccgcgacagcctccgcaggaatgttccagtgcttcgccaccaatcgcctgtttacataactccccgaagggtattgcctgagcagtttatcaaaattagctttcagttcttccagcatcctttctgtcgggaaatgtggattcaccagataagcaaaatcaagcaagaaagggaagcgccaataccctccataacgtttctggtaaccgggcaaaagcccttctttcttaccaaatagcgtttcggcaatatctaaatcctgcatgtcatctatctcataccacttttcaccctcaagcggcaaagccttcagcccggctttatccaacaaagacaaaacggccagtatttgttcgtaatatgcactattatcaaaacatttgcaataggcttccagaaaaggtacgtacttacctacagaaaactccttactaaaacgatagatattcaccgtcttaaaataagtagaagttttttcgtacgaaaaagtatgtttagatacaaagtccacaataaactgcttttcatccacagtcaccatagtcccgtccatccaactcttataacggtctactactgcaacatccggatacggttcttcgagcactctttcaagtattctcttctcaaaaacaatatccgattctaacaataaagtatcatcagacgctaagtggtgccgtgccagaaacagagaataaatattattggtatgtgcatagtaagggttttccagataataaataggaattccgcaatattcatttcccagatacgcccgtagtttgtcaccttgaaaaccaatcacaagcacaatcctcgatagtcttgcgactgccaggtttgccagtaaccgatctatgatccggataccgttcacctcaatcatacacttagtgtcgtaccgggtcaattctcccagacgcctgcccattcctgctgccaatataatagcctgcatatctgacccctttcagctccctaattcaatacttattaattcaatagctgggaaaatatagattataaaatcaaacttacgatatacatagatctattactctatgattactcaaattttaccttacaaagattatatctgccaataaccaactcatagttcgaaattgaggggcataggctcttattgatacattggttacacggcttttcattactacgcacctttaaccacgcatttccttctgtcaattctttataaacaagttcttttagcgatgaattctgtatattcccaagtgccggatagtttacattcgcatacacctcgcccgacgggaatatagtcaatttaccgaaaaaaatatcattcaatgccttatgcctgaatattgttttcctatcaatcggaacggcaagtatatcctgcaaatcagtgaaaacaaaatcctgaaaaaaagataagttatttcccgaataaaaaggacagacctgaataagtgcttcttccgggaaattccagctatccaaacattccatatccgaatattcagaaacaattaaattccatttgacagtatcacatgaatagcgtcgcatactttcaattatccgttcatctacctctgtcaaatggacctgtacttccagaattaaattcgtttgctgcataaactcaatgtattcatcagacagaaaactaaaatccaagtagagatgctttttaaaaccagattctgcgaaatccgatagaagttgacgcacatagctgttctcaagtggatctcctccccccgacaaattcacacgctgaataccacaggtatgaaactgatgcagcaaacgagtataatcagtctgattcaatatcccctcacgacaaattgtacaatggttgaactgcttacaataagaagtacatgctgtacagttacggctacaggaagctggcaaatagaccgttacctcatgaaggttctgcaaaattcgctctcctaatgaagttttctctttttcctgttttatacggatatccgtatttaaaaacaagtcgggtttgaacaaataaggcttaggccgttccgaatcatattccacacagtcacctgcaaaagattctctgacagtatttacaaagtcttttaccaccccgttttctaagtccttttcagcaagcacagctccataaccattacctgcattttcccattgctctaagatttgttccactacagcatcgttgggacagagtaaatatgctgaattaagtgtgttgtagaccactgttttgtgttcattgcggaacatgaaggtgtaaggctccaaataaaaccaatagttcataatgtttgaataatgttaggcaacaataatagatgatagtagtctctcgtaatcacccggattactttctgcataagttaaaaatgcagaaaatttctctcgcaatttagcgtctgtttcaatgcccggacatatcaactgtccattcttctctttcaataaaaagaggcactgtccgcagcttttcttcagattacagtgaacgcaactttttattatcttcttatacaaagagctataatacttagcaactgcagaacaatctaagtttaactttccatccgacaatcgggctatagcacattcttgcccaattctttcacaaggcaaaatttttccattaaccgtcagaaacagtttccgctcaaaaggtcggcaagttcccgttggaacatacttcccgttccgatccgaatcaaataaatccacataatcagaatatcggttcccaccataattcataatcatgaaatgataagcaagcgaagcatcatcttccatctcaaaatcgtctttgatatcagggtcatgagtcagtgcagtcttaaaactctctgttttatcattaaacatccgaacaaactcttccactctttccggtataataccattcgtatttagttccgatacgcggggtcttttaccgaataatccatgaattgatttataacacccctctactgaatttcggtcatgcaatacggcattgaaatgcacatttttctcaaaaaactcaggataggtatcttttagtttctgtatatttcccacaacatgagtaaaagaagattttccatgtttatctacccgataaccagattgatattcatctccatccaagctgattaaaagcgtaaaatccttttcgactaaataatccatatatcgacctagcagcatggcatttgtagtcatgttataactaaaccttaaattgtctatatgcaaactttctatataagcaattgtctcctgtatcaatttcatatttagtagaggttctccaccataaaatccaacagtaaccgtattgttatgggatacattataatcagatcgccataaattggccagataatctatcaatactttgacattatcaaatgtctgattacaagtttcccgccgatcataattagaataaaactcaccataaccacaatatttgcatttgagattacatttatccgtaacttctatcaacaattgccgtaggcaagccatattttgtttgaccaaatcttccgtataatctgtttgaaaagtgattacttctttatcaaagaagtgatttctttg

SEQ ID NO: 5028 - DNA, 206 bp, Unknown
  gut microbiota DNA sequence
accaccgacaacaaagaagacaaaatcctggtattggaaagcgccggaaacctgacactatccgatgtactggatgaaatgaagaaagaagataccggcttgcgggcagagactttaaagcatgccgtcgatctctttcagcgtacggtatcggaattggtactgaacggatactctgtcaatacggggctattccgtgccgtacc

SEQ ID NO: 5029 - DNA, 5155 bp, Unknown
  gut microbiota DNA sequence
gtgtttataaattcaattactttttcacaatatcggccatatactatagagttgaaaataccctaataatattatcagaataatttcctaaagtctataaaatgtgtgtgctctgctttcagcaggagaatagattaacaataaaaagccaactgatttattgtcagttggcttatattgatggtatttaaagaatatttctaagtgatgtcttcaatttctcacttatcataccctagtgtttgttccaattttgggtcattatttaatgtattgacgtctatcggccacaacaacttatgggcttcactttctttaattaatggaactctttcatcaggagtctcattgttgggataattagctgctactgaaaaagctaatgattttccgtttgcatcgtgcatacgtactacatcaaaccaacgtttaccttcccaaacaaattctttatcacgttcatgtaaaatagttaactcattgtcagcataacttccatcagtgtatgcgaattgtggatgccagttcttaccataagcccgcttacgtacttcattaacgtaatttgcacattttcctgaaagggcattttctatttctgccatcatcaatagtacatcggcataacgatatacaataatatctgtatcaaatatacgctggttgttagaattgacagaaccgataccctttttcatagcaatgccaaatccttccttttgggcactaccataatgatccatgaaagtagcgtcgcgtcgcatatcttcatcatcatatgaatcccaaagtgccttcttatattcatgaaggaattgccctactgtccctttcaaatctaaagtatcctgcattaatttgccatcacggccatagcgttgcccttcgaatatattaccataataaataaaaggaccggcccaattagttgcttctccatctttaaaacgaatggcaaaaataatttcatcatttgcttttttagagaagacctctgaaaaattatctaataacgagaattggttgattaaaggctggagagctgtctgagcaattgccaaatcactatttcctgtggcttgatgatcgcctgtagtcacttttgctgaccacatgtaaacttcagcttttaacattaaggttgcatattttgtccacattgctctatctatagtaacattatttccaaaatttaattcagaagcctcaagatcacttttaataaatttgagtattgtttcaggagtagaacgttccgtataaagggcatctgcagatatctttcctccttcaagcactttgacatcagtaatcaaaggtacgccaccataagttttatataacataaaataatacaatgctctcaaaccgtatgcctgtcccaagtaaaatccttttttactttcacttaaaaaggaacatccgtttgacacctccgatataaaatggtttacctgcataattctaccatataaatcataccaattactaataccggtattgtctttagtcaacatattgtttttaataggatcactataagacatagatgtacccaacgaagatgtgccataacgagatgtacctccacgagcttccccaagtacataaaacatggtataggaacttcgtaaattattgtgtaagccattcatatatccttctacttgagcttctttagtccaaaagttaccactgccgtaataatcttctggcgaaagatctaaagcgtcacatgaaacatacagcaacgctgataagaataataaaatagatgttatctttttcatatttgttacaatgttaattttttaaaaggaaacatttactccaaaaataatagttcgtggtaatggatatcctccattattactactgctctcaggagagtgcatatgctcagcttctgtcagatagccaagattttgtccagtaatagagaaggaaacatcgttcattccagcttttttaattaattgtgagggtaatctatatgctaagctaagttcacgaagagctagataattaccattgaaagtgaacatagaactactacgtgcataattacgttttcctaactgatcagcccacgtgtaagttggatatttggcgtttggattttcaggtgaccatgtatttttggtatctgagattgtattataagttccctgcatattacccatgatccaaggagtcttccaatcaattacagtaaagcctaaagcataatcaaaacgtgctgataatgtcagatctttccatgatacagtcgtattgaagccaccagtccatttgggcgttgtattaccgactttcacttgatcatatacgtcaatgacgccatcattattcacatctttccactttacatctccaggttgtataggtaaacctttacttttttcctgatctgttaatttagcccatgcttccggaccatacaaaatcttattgtttgagctgttatttcctgtagacttatcgatcaaatttcctggaatttcggattcgcttctgtataatccttctgctttgtatgcatagatgtcacctgggcgctgtccttcctgataacctcctacccacatcttctcatagctgccatcatccaatttgcgacctgtatacacctccatggcattctgacgatttctctccagtccattgtatggcaattccagaattttgtttatgttataggcagcgttcagattgatattccacttccaatcacgtttctcaagcactttaaaaccaaattccagctcaagtccttgattctgtaatttaccgttatttgaggttataccagaaacccctgatgaagatggcaaaggaatagtggcatatttatcttccgttctacgattgtaatacgtcatgttagtattgattctgttttcaagaaaacttaaatccatacctacttcaaaagtttgtgaacgttcccattgcaaataaggaatagggagagaacctaatagatacccagtattgccgttatatttattacttccgtaagatccctgcactgtgtaattaccgacccaatctttatttacatttccattcaatccataacttgcgcgcaatttggcaaaggaaactacttgttggagggattccataaatttctcttttccgaaaacccatcctgctgaaattccgggaaatactccccaacggttgtcttttgctaatttagagtagccatcctttcttaatacgaatgataccaaatatttgctttggaagtcataattcacacgcccaaagaaagacataatgcgttggcgactatgccatgaatcaatattacgttttccttcttcattacttgtaaattgaagatcaccaaaatcgtcagtcggagcacccgatccagaagcgttaaatcctttttgataagcatcgtagtattcaaaacctaacattgcagccagataatgatctttcgtaatttgataatcataatttaaaaccgcattgtaggtctgattgagcgttctatcaaattctgctgatgtagaacgagatgtattcatgttattgggacttgacaagtagtcttgattgaatgcttcatatttagcttcatcaaagtaccagtttgctgtcaactttaaattcagtcctttcattaattttatatcgaaggattgtaccatggtaaatttgtcggtgttgttatcacgcttaaacttacttaaattgaatgactggttcccatcagaagaattaggacctaataacatttcaccatcagcgttgtaaccacggaatgtaggaggtaatgaaagcattcgattgaaatattccacttcacctctggaaccaggagaaagtccataccaagtagcatctgcaaaattaaacgatgaactggatgtaagccaaggtttgattttataatcagcattaaacgtaaatgttagacgtttataccaattccctgtagctgtaccatctgtattattatatccgattccagcataataatttcctttatcgttacctccagaaatactgatattgtagtcttgagaaagtgatggagtatgtaggttgaacgaggcaggatctgtattcttataaattatttgatcaccatatacaggatctgtcatggtttgccaaccttgcttcaataaaaaagccagatcatccgtatatttcattgtactccatacggcacgcacgtctttatttccatcaagtacggccccggtactaggatcaaaatagagattacccgtaccatagggagttgcattatttagactattcatatctgctgtaccaacccaattacctttggaatctttatagatttgcccagaacgttgatatgccgtacgcatccaatagatataatcgccggcattcataaattcataaggattattgtaatagttgataccgactttagcctttacactgacctcacctttaccttctttaccacgtttagtagtaactaagattacaccattattagcgcgagcaccataaatagcagtggcaccggcgtcttttaggacttccattgactcaatatcctcaggattgatatcactcagacttccacggacttgtccgtctactaacactaatggagatcccgttccgttataatcggtaccaccacgtaggattatagtaggagtagctcctggatcacctgaggtctgaagaacacgtacacccgataccgccccagacaaagcttgtgccggattggaaaagagtcctttttgtagaacatcttcctttactttgccaattgaattggtcactttggtacgcaactgtttgccaccatatcctgtgactactacttcatccaacatttcagagtcttctttcaatttaatattgaaagaatttttgccctttacatcgagtacctgaggctgatacccaacataagaaactttgatctttccattaggatcgaccattaatgtaaacttaccgtcaatgtcagtaatcacaccattggtggtaccgacctcgacaacactcgctccgatgactgattcaccgctagcatccgtaaccacacctgtgattgatttcttttgtgccatggctccaagagaacataaaatgcacaaaatcaagaagatggttttcttcataagtattgcttttt

SEQ ID NO: 5030 - DNA, 1446 bp, Unknown
  gut microbiota DNA sequence
ctgccttcgatgaaagcgggtcaccgcatctattatataatagggctgcttactttttccgaagttgctttgttgggttttgcacttcttccagttcctttgaaggtgtgttctatttttctgagcggtcttcccctgggtatgatctggggtgtcatttttagctatatcgaagggcgtcgtatcagtgaaatattgaatgtcgggctgagcgttgctttgatagtctcttccggtttggtgaaaaccttgggacaattcgtgatggataatttgcatgtgtcggaatattggatgccttttaccaccggtttgttggtataccctgttatgttgctttgcagctggcttctcaatcagattccggctcccaatgagcaagatatcatacagcgtaccaaacgtgctccgatggatggtaaagacaggcgtaaatttttgaggcaattcttttggggaatctgcatgctggttgttttttacggtgccctgaccgtgttccgtgagcttcgtgactctttcgctgccgatatttggaaggagctccatattgagggtgcaatgatctttactcagacagaggttcccattgccgtttttgtccttgtactgatgttcctgattgtgtttgtccgtaataaccgtttggctcttaatatcatttattgcatcgccgtcacaggcggttccttaatggttttttccacattgctttatgtgtacggttttctttctcctatttggtggatgattctttccggtcttggtctgtatatggggtatattcctttcacttacctgatagaacgtctgattgcttcccttagggtggttagtacggctgtttttattatttatttggccgattctttcggctatctgggcactacgggtgtgtttatggtcaagaacttcgtttctgctgacatttcctggactgtcatgctgatgcgtactgcccttttttcaggatttgtttctgtcctgtcgatttttgcgatttactgttatttcaagcaacaattgaattcacttatattaattccctctgaaattcatgattaaaacagcaatgatcatggctgccggtcttggtacccgcttcgggcattataccgagcttgtgcccaaaggttttgtggaggttggtggaaaacctatgattatccgctctatcgaaacccttctttcctgcggtatcgaacgtatcatcctcggtacgggttataaaaaagaggcttatgaagcccttcaggcggatttcccccagatagagacctgtttcagtccccgttatgccgatactaacagtatgtacactctgtacaatacgcgtgacgtgataggcgatgacagtttcctgctgcttgaatcggaccttgtttttgaacgcaaggccatcctctcgctgctggatgacgaattcccggatgtgatgcttgtctc

SEQ ID NO: 5031 - DNA, 383 bp, Unknown
  gut microbiota DNA sequence
agtttcctgctgcttgaatcggaccttgtttttgaacgcaaggccatcctctcgctgctggatgacgaattcccggatgtgatgcttgtctcttctctgaccaagttccaggatcagtattatgtggaatatgaccgcaatcacatccttacttcctgttcggtagacaaggacgcccttgaggcaaaaggcgagctggtcggtatccataaactttccaatactttctaccgccggatgtgcgccgattatgcgaccatcctggagtcccagcctaaactgggttacgagtacgaactgctccgcatgtcccgttccgtttcccctgtccgtgtgctcagggtggagggtcttaaatggtatgaaatcgatgatgaagccga

SEQ ID NO: 5032 - DNA, 693 bp, Unknown
  gut microbiota DNA sequence
gccgtttcaaggcccggtttccaaaaccaccggcttgtcctatataataatcaattccacttcctttctgataaagcacagtattggggtacatcacagcaccgttaacagtcacggtactgacatatttaggaacaaaaagtacgtcgccctcccgtaataccagatcttcatccgatttcggctttgccagagctttttcaagttcaataccgacagagtaagtctgatccacttccaaagaagataaagagaccgaatcttttccggttccctttgttgcaaaccgaactgcatcttgcttttgccggatttcatccgccgtcatcctgcgcatcagacgcgcacctttcgcataggcgctcttcgataaccctccggcttttgctatcaagtcactcagccgttcattctttttagtcagcgcatagtttcctgtaaatgtaacttccccattgaccgtcacatttgcctgcttttgataccctggacttctacgtacaaacaccatatcataaggttccaatttcagtgtattgctctctcctatcaacagtccatttttcaattctactgtaaagcttttccctatcacagtagaagaagaaacacttttaggatctttaattcgtcgtgacacatcgatacgaacagtcgaagccgattccaataatccgccagcttttaaaatca

SEQ ID NO: 5033 - DNA, 818 bp, Unknown
  gut microbiota DNA sequence
ggagatccgatggattgcggagtaccatcgaatcatccttgtcacgggcacggtcctctccgtccttcacactctttttacggccccccttctggctcttaccaccataaaggttcttattacggacttttagccgctcctccaaagctgttattttagacaacagattactgaccatcgctttataatcatcccgctctttttctgcagccatggcagccttctgcaaagacaacagctcgtcaaccttggacaacagttcgtctatgcgggtttcgtcacgccggatacgttcggcatcccgctcacgggcagccatcagctccattatcattttcgatttctcttcgggtgtcatatctgaatatgggtcttcaaaaggtacaggagtgctctcccgttccttcagcttccttgcggaagaaagcagctacatgcataaacttgtatccgggcctgaaacgtttctcaaacatgctgtaagacagttgatcataactgaataagcggatcagacgtaaatctttggacaccacgaaaaaacatcgccgtcttccggttcacgattcaactgctgatggatgatggacaaaaccttagcatatttacagcgcatatcgtggaaatcgcggacaaagaaaaagcggctgagaccggttatatttaacataggacctccagtttctctatcaggcttttcaaacctgcgttgcttaaatttttctgactgatatgaacaccattgctcatgtggatgtccaccagaatttgaagttcggtactctaagaaagccgggtgtccacttccggagttcttt

SEQ ID NO: 5034 - DNA, 72671 bp, Unknown
  gut microbiota DNA sequence
ggactgcttcacgcagcatacgggtaaaactttgtccataaaagatattatcgccaagaaccagacatacagaatcaccacctataaacttctcaccaatgataaatgcctgtgccaaaccgtcgggagaaggttgttcggcgtactcaaaacgtactccaaagtcagagccatcacccagcaaacgttgaaagctgggtaaatcgtatggagtggaaataatcaatatttcacgaatccctgccaacatgagtacagagataggataatagatcatcggcttatcaaatatcggaagcaactgcttgctgactcctttggtgatcggatataagcgagtgccggaaccaccggccaaaacaatgcctttcatgataatagattacaggtcaaatattaatcaatataattatttggatactgattttcctctatcatcttcagcatatctacagtctcctgctcatctatcgataaagttttattatcccagtaatctataattgcatgagcttcctttgccaactcttcttcaaaaacttctccataacaatatgtcaaaagctgacacttgagcaaagaagacgggagagactctaacacaagcaaggaacgatccagaataacctgtttcttagactccttgtcgccataatcatagattgttgcattgtagcccatcaagagagccaggcaaagtcgtgcttcttcttccggattttctcctttcaaagcaaacaaagcatcagatttttgaagcacttcagtgtttaattgacggaaactgtcggtatagataggagaaccgtcagtacccaaatacaataattcgtgagccacatgttgtagctcatgaatctgggtcataagagtattcattttatatgataaaatattactgattacggtgcgagaatgcgaaggtagcttttaggaaccttgacactggcagataaaacgccacgaattcggatagtgacataagtacgattagaaagactggccagttcaccttcaactccacaaaaatctcccttgatgacttgtactttggtaccaactgcgaaacaatcatcgttgaggataacagcagcaggatcgagattcatgacaaacataaaatctttcatctgcttatcgggaacaataagcatactcttagtgtcaaaatcacgcatatagaaaagacgcaccccgtattcattggcaatagcacaagcaaactctttggtagcatgtacaaaaataagattacgaatgacaggaacttctacacgacgccggcgatatttcaattgacgaatgacaaattgggtcggcaaaaaatactcgacacctattttctctaatgcgtcacgagtagtaagctcctgatccttacgggtacgggcagcgaaccaatattcttgttgttgagacatttagaaggatatattcctgagtgatttacttaagtccgggtatgcttcgcagttgggtgagactctttttctcagccaaactgcaagattttttatgacttattttaggtggaaacgaacggattcgatcaattgatgtttcaaaaaacgttcgtcttttgaaacatcaattatggagataaaagcccacatacaaaataagtaaaaagctgtttttattaccagattattatctgataatcagtacataaagaagtctatttagtttttcatctaaaaatattttgcacatcaaaatttagtttatacctttgtgctattaaacgaacgtcttttgaaacacattcactactgactatcagttaattacaagagaattcactctttttatccttttcgcatttaccacacaacagactgattataaacaaattacacaataagataaactcttcattattctatctataaagatttagaaactatatactcccaaaagcattctgtcacattgtattttgagtagcctcaggaatcccttatttacggaccactgactaagttgttataaaaaacaccgggattctattttcaccaaaatcatatctccaccaaataaatcaaatcaccagtcaaaagatcgataaacatgcactaatttcaatcagtaagcaacggaaaaggcatcctatacctccaaaataacattcaggaatgattcatattgacctatgctacagaaaagaattctatagtttttgttcaataaatgaaaccgccaggcaaaaagtaggaggattttcaatgaaaatgaatttcgtaactatacgaagttaacttcgtattttcttataactaacttcttcttcacaagaagttaatgttttgcaaagacgaagttaacttcgtatgaagagtacacttatgaagaaacgaattaaagacaagttaatgctccatcatttgctatttcatcactttctcaagacaacaaggtttttaaaacaagaaagaagccgacttaaagatatcagaatctctattttactatcagaataacagaagaggcaaacttaatgaggaatggaaaaagaagtcgacgagagataaaacccttacctctcgtcaaccaatactatttttatgatcgtgatacttggaatcccttatcagataacatcatttcgacaaaacgtgcccgtggattcggagcgttttctgtcagtatcttacgaatacgaacagcagcttgcggatctttcgctaccatatataagtacccgccaccaccggctcccggcaatttatatcccaaggtataatcttttatcagatcgataattgcctccacagccggaggatttgttccgctatccaatgctttgttttgttcccaggtttttcctaccaaacggccaaactcaacaaaacttccacgctgtatagcttcattcatatccaatgcatgcgccttcatttccgagagtaaattgagatgcaacgatgaattgaggaacatggaactgactatttctgccaagatcccttttgccgtacgagttataccggtataataaagcaagtgacagtctttgtattcaggatgcgtaaataaatgatcgggtagccaacgcaccaatggactttgagcaaagccggcctcggtctgaagaagcttcacaccctgcaacacacctccatactgatcctgccatccaccgccggtagtcagcaattgttcaagaacaagagtacgttgacaaatctcatttttatcccaggctaaaccacagaaatcgttaatggcaccaagtacggtagaagccagaatggaactggtgcccaaaccggaaccggcaggaatagcagctaataaagtcacttcaatacctgcaccgaaatctttaagctgttcctctaatgaagcataagatacagcagaaaacgcaggtgcaaagcctgccaatgacagagcggctttcggaatagagaaaggtgaaccgatcttcttataatcttgcaattcatcaaacgtagatactatttccatagcacccatatcgatagaacgcaggacgatatggaaatctttacacggcttcacatagacctgtaagggaggttgtccgttcaactcaatagccagattcaccacatttcctcccgaataaagtgaataaggaggagtatcggtccatccacctgccatatcgatgcgcacggggctacgtccccaaacaatctgatcggaatatacatccaattttggggtactcttacgattactgatcccgtccagcaagccgtcacgaagcaaatcaaaagcagcctgttcttccggacgataatctttcccgtctaatttcaaaatacgcgcccgcaacatccggttatggatgcgtgacatctgcagagcatcctcaggcaataattcaggcatatccaaaccaagacgtacaaaatcttcagctgcatcggccaaatcaagttgataaaaaacacttttttcatgattaacggccaatgctttccagtttccttttctgaactcttcacgttgtgcatacaaacgcttcagattggcacctgccgaaatttcgtccgcagaaaaatgttcggaacgtaaccagatattctttccttcctccagttcgggttcggacaacatccacctcaacaccaatcccaactcttctacagaattaaccatagggaatacggaaactgcctgtaaatcgtccgtacgtcctttcaaatctgtatatgacaaaccgcgtttggacatccattcaccaaaaggaatacccgtcagggttgttttggaatctctcaaatctcctttgaaaacatcgtccagaccgtatggacgggcaacaaagcccttatcacccatcggaaccacatctacacacactccggcaggcacagccaatgaccagtcattttccggaaccccggtaataatatgtcgtgaagcaatcttccactttggtccgatatgactgttctcgatccataaatcagcattctcggcacaaagaggtatccgcactacagcattttggacaaacatagccggattgggctttactttacggtgcatgatacgacgctgatcgtaaaccttattctgtacggaaagagttgaagatatcagttctttactggtcccgtaatgatagaactctcctcccggcaaaggcagaatagcaacggatagcgtattgacctcttcgtcttcaatacggggatgagttcccaaagctaatccaaaatcggaataaagatcataatactttagttcttcagagctttctttatgagaacgttttatcaagatttctacggcacggtcactcaaaagccatataccgatgtccatcaggaacaaatgggtcttcgataaagattccaattctgccaacgaaggcttctgaagcataaagtcgagttgttcgggatgtttgcgatcggaagcaaacacgccatgatgggtagccagagacggatctacccacagtccataacaaaccacatccgcttcgggaatactctgcaaaggtttctccgaacgaatatagacatcaccactcgcaatcagtgtatggagtttatccggagccaaagacatgattttttcatataggggaagttgcagagaaagcagattttgtcccagatgttgccctctctcccaccggaacacaggaaccggagtgagaatctttccagaaggtgcatagccgggtaaacgacggctttgcccacccgcatgaagaagaattcttttttctttttcaagccactctccaaaagtagcaccatctgaatattcattataacattcttcaagcagccaggatgttccaccaccggaaccaagtttcttacctaccgggtcggaagtacaaaaccaatcggtacggttcaccctctccagttcatgaaaagactgaaccagattgggcggtaaagatagtagtttttgcatattgtcagagtttaaatatacgttccatcattttccacttctcatgtgacgcttgtccgggcaatgaacgctgaaagcgagacatataagcctcccattctgcctgccggggaagtttagccaagcgctcgttatcttttatccaatcgaattcatctaccgtatcgacaatcataaagagtgtatgttcgtggatataaatctgcatatcgagtatcccgacttcacggataccggctttaatttctggccacacatgctgatgttctgcgacataagcacgaatcaattccgaatcattatataattcgagtgtttggcaatatcttttcatggtattataaaattaaataaatatctcttttaaaaaggcagaggtccgtcatttccacctccgaacggattactattctgaggggcaaattcagcaggaggcggaggtactgttccggtattattcattcgtgatccaagcatggccccggcatcaggcaacggaattaccatatcgtcatccggattctggaaacgggtatactcacctttaaatcgtagcagaacatcgccaaccgcaccattacgatgcttagcgataataatttcggccattccacggagatcgtttcctttatcatcctgaaatatcttgtaatattcggggcggtgaatgaaacacaccatatcggcatcctgctcgattgcaccggattcacgaaggtcactcaactgaggacgttttccttcaagcccttcacgactctcgacaccacgattcaactgagacagagctataatcggaatattcaactctttggcaagccccttcagcgaacgtgaaatggtactaacctcttcctgacggctgccaaatgccataccgctggcgttcatcaactgcaagtagtcaatgatgataattcttactccatgctcacgaaccaatcgacgtgccttggttcgaagctcaaatacggacagagagggagtatcatcaacataaagcggtgcatccagcaaatccttcaatttataatcgagctgttgccattcataagctgccaattgtccgctcttgattttttcactcggaatttcacaaacgttcgagatcagacgattgaccaactgaacgttactcatttcaagagaaaacaaggctaccggattcctgaaattcacggcaatattcttagccattgaaagtacaaaagccgttttacccatggccggacgggcagcaataattatcaagtcggatttctgccatccggaagtcatcttatccagtttggtatatccactctccaatccgctcagaccatcggtacgtgcagcggctttctgaatctgttcataagcctcggcaataatcggattgatctgcgtatagtccttcttcatgttccgctgtgaaatctcaaagagtttcccttcggcctcttgcataagatcgtctacatcgagagtttcgtcaaaagccttactctgtatgttacttgtaaaagtaatgagctctcttgccaaatatttttgtgcaataatacgggcatgatattcaatatgggcggaagatgccactttactgctcaattgagtaatataaaacggtcctccgacttcttccagctcaccacgcttactgagctgctccttcacagtaagaatatctaccggtttttgattaacggcaagatcggtaatagctgcataaatcaattgatgcctatgttcgtaaaacgattccggacggagaatctcactcaccagcgaataggcatctttttcaatcatcaaggccccgagcacggcttcttccagttccggcgcttgcggttggatgcgcccgtaatcatttacgggttgcaccttagacttagcagtactgcgggtatttcttctttgttcggccatctgtattttattgaaatatagaaaatgaatagtggatggctgcgcacatccacaaaatgtaggcaaagataattctctattatcaattttccattatcaaatctgaattatttatttaactttgcgtccattagacagcattaatcattaatcacgaatcactaatagcccaaagacatgattacatttccgaatgccaaaataaatctgggactgaacattaccgagaaacgtccggacggataccacaatctggaaactgtattttatcccatacctctggaagatgcccttgaaatcacaatattaaatgactcgaaacaaaaatttgtcctgcaccaatccggcctggaaatcagcggggagccggaaaccaacctggtagtaaaggcatacctgctgctggaacaggattttcaattacctccggtagacatttatctatataaacatattccttcgggtgccggtttgggaggtggctcggcagatgctgctttcatgctaaaattgttgaatgaaaaattcaatttacatctggcagatgaaaaattggaagagtatgctgccatattaggagctgactgcgctttttttattaaaaacaaaccaacctttgcagagggtatcggcaacattttttccccagtcgatttatcattgaaaggatatcagttggtacttgtaaaaccggatgtctttgtctcgacccgagacgccttttcacaaataaaacctcattacccggatcattcattgaaagaaattataagacgtccggtaagcgaatggaaaaactgcatgttcaatgactttgagaaaagtgtctttccacaataccctgtcattgaagaaataaaaaaagaattgtacagcaaaggagccatatatgccgccatgtcgggttccggttcatctgttttcggattattctctcccgaagaaaaaataacgaaaatagattttgaagcagcattctgtttccaaaccgaattgaaataatctgatcataaaatataataccatgaaaaactacttaataacgtatggttgtgccatgtttctattagcctcttgcggatctccatcccaacagcccaaagcaccgggacagatagatattgccggaaaaatagagagcctgacagaacttaaagcatctgattttattaaagagatcaactatgtggtattggaggctacagacagttgtttagtaaacgagaatcctaatatacaggttttcaaaaataacattattgtaaatacaaacaaacaatgtttggttttcgataaagaaagtggtaaattcctgcgttctatcggtcatataggtaatgacccgggagggtacagcgaagcaaccttctggattgacgatataacaggagaactgtatttcataggatggaacggtactcttatgcgatacgacctgcaaggcaactacttgggtgacgtcaaggttgccccaaacctgggagtaagaaatcccgcttgttttgttttcacagattcattaattgtcagtcaccaattgagtctcctgccaatacaaggaaatgaaaagaaatctcctttcctacttcttgacaaacaaggaaatgtgatagatagtatcccttctttactcccggttatacctgtcaccactaatgtagtacgattaaacatattaaaaagtgaaaaagcacgggagctttacggtaatataggagttcatggtatgatgacagcatactttaataatgatgacgccattgaatcaccacgagtgctttcaacactatggaaacataacggaaaagtacgatttaaagaggcatatctggacacaatctatactttatccgaaaataaattatctccttatctgattttcaatacaggcaagtatcattatccggcagaagaaagatatcagcaaaaagaaaatgacgaaagagtcaagatcgactatgtgatggaaagtaccactctgatcatcttccagttcagacaacgaggagaagtgtataccggtatatataataaagatactcaaataactcaaatagccaaaggacagaattttgtaaacgatatcgatcattttatgccattaaatcctcggaattgtaatactgacaatgaatatgtagatctcgttcaggcaaacactatactggaatggatggaagaacatccggaagtaaatccagatagcaagttctctttcatcaaaggaataaatgaagaatccaatccggtcgttatcttaatgaaatagatcataaaacaataacaaactaaatattttggttatttaactacatataatagtttaatcactaaaatatttagtttatttgtccttcataacaaacaacaggtattttacgacctgattaaatgataaaaacatgaagagacaaattgtatcatgcggcatttttgctatgctattgttaacctcctgcaatggagcgcagcaaacctctgaagtcgatctgatagatattgccggaggaatggagaaactgacagaactaaaagtatctgatctcgggaaaacaatccgatacattcctttagaaacaacggactcctgcctgatcggagattttcctaatatcaaacttctggatgataaaattatggtctataacggcaaacagtgtttgctgtttgacaaagaaaccggaaagtttatttgttctgtagggcacagaggagacgatcctgaagcttatagcagtacttgcggatatctgaattccaaaaaccaattattgtattttaatcgcgatcccaaccaattggtaaaatatgaccaaaaaggaaatttcgcaggagtcatcaccatcccttcgccggaaacttcaacgggcaatatacaaataaaccgtcccggaatgaatgggtttgtattctctgattccattattatagggcattatgtaggaggattagggcaaagatgtcccagttcggtattatatttctctgataaaggtaattacatagatacgatcccgaatatcattcccgaattaggaacaggacaggttggagacatcaacaacatttcggtacgcaagggattcggactgttagaaggcattattcaaatacagtataacaacggaaaacaaagtatctgtgtacccggatatacggcactgtggaagtgtaatgacgaaatccgattcaaagaattatttaccgacaccatctacacattgaaacacaatcagctggaaaagtacataatattcaataccggtaaatattactggccggcttccgaacgtacgcttacagacaataacagtgaccgaattatgatcagctatgcaatcgagaatgacaagttactctatttccagttcatcagagggctttatacagacaaacacatcttgtacaatggaatttatgacaaaaatacaaaagtgactaatatagctttagctgaaaataatttcgttgatgacttgacccattttatgccttttactcccagctttcttaatgaaaaaggtgaatgtgcctctttggttcaagctgctgacattcttacttggctagaggaacatccggaagtcaaaatagaaaaagaactaggcgtcctgaagaatttgaatgaagaatcaaacccggtagtagtattggtaaaataataacgactctcctctttgaaggagttcaaagaggagagttttttctatccaatagtcagacaaaataaaatctcatagataaaataaagtttataataaaaaaacagtaccacgactcacgtcgtagtactgtcacaacacaaacacaaaataaaacacgacaaaactactatgcaatcttacctgtctatgccggggaggcataagtactaattatggatattcacatacacataaacagcttcaggccgatttgcatcctataaacaaatgtataaaaacatttgttcatgtcttatatgttaattaaaacaatattcttatttattggatacctctttcacgaagtttcaactgccatgcccaagcagaacgcagtgtatcttccagagtttcctgagctttccaacccaattcattgttcgcataatcagggttagcccataccttttcaatatcaccggcacgacgtccaacaatctgatagttcagttttacgccggtagctttctcaaatccgttgatcagttcaagaactgaaactccacgtcctgtaccgatattgaaagtttcaactttatctttttgtttcttttcaagaatacgtgcaatagcaattacgtgtgctttagcaaggtcgactacattgataaagtcacggatacatgaaccgtcaggtgtatcataatcatcaccgaagacactcaatttttcgcgaatcccgatagcagtctgagttaaatacggaataagattttgaggtacgccattaggaagttctcctaacaatgctgtcggatgagcaccaatcggattaaaataacgcagtaaaattgcattaatcggagcaccggaagctactgtatctctaacaatctcttcattaatctgtttggtatttccataaggagaagtagctttctttatcggagcattctctgttacaggcaattcatccggttcaccatatacagtacatgaagaagagaatacaatgccctcaatgccatgtttaggcattaattcaagcaagttaattaaagaaacgaggttgttgcgataataaagcaatggcttttctacagactcacctactgccttgctggccgcaaagtggataatcgctttaatacctttatatttattgaacacggcatctaaaccgtcaaaatccaagcaatccagtttctcgaaaacaggacgaatacctgataccttttcgatattatctacgacatcagcatttgaattagataaattatcaatgatgattacttcgtatccactgttttgcagctctaccacagtatgagagccgatatatccggttccgcctgttactaaaattctttctttcataacgtgtataatggttagttttttcggtttacttgtaaagtgtttgcaaatgtaacaaaattaatttagataaatgcacaaaaaacgaatattatttcataacgcaaacagggattaagacaaaataacagaaaaagcggcggaagaactaccccaccggtagcctatccgccgctccatccttcagttgtttgtcgtcaggatttatacaactccggagaatcccataaatgccatagccagcaatccggctgtaattaaagcaatcggagtacctttcattccttcgggaattttcacaagactcatctgctcacggagtccggcgaaaagtaccagggccagaccgaaaccaatagcagtagagaatgcatatacaacacccgtcagtaggtcataatctttttggataacaagaattgccacacccaagatacaacaattcgttgtaatcaagggaaggaatacgcccaatgcctgataaagtgcgggagaaactttcttcagaataatttctaccatctgcaccaatgcagcgataaccaagataaacgtgatagtctgcaaatactgcaacccgaaggcatcgagtacaaacttctggatcaggaacgttacgatcgtagcaatggtaagcacgaaagctaccgctgcactcatacccaatgcagtatccaccttcttggaaacacccaagaaaggacagattcccagaaattgcgacaacacaatgttattaacaaagattgccgagataaatatcaatatatattccataatcgtttatattttaattcgctttcttaaggctgttaatcaacgcaatcagatatcccaatgcgataaacgcacccggagcaagcacaaagacaagcataccgtattcttccggaatgattgacaagttgaataccttgcctgtacccaggaactcacgaacagctcccagcaatgtaagggcaattgtaaagcccaatcccataccgattccgtcgaacatagaagaaagtgcattattcttggctgcaaatgcttctgcacgtcccaacacaatgcagttcacaacaatcaatggaataaaaagtcccaatgtagcgtacagtccgggtacatatgcttgcattaccatctgaagcaaagtcacaaaagatgcaatgactacaatgaatgacggaatacgcaccatgtccggaatcaggttctttatcaatgaaatcactacattggaacagatcaatacaaacatagtggcaagccccatgcccataccattaatggccgaggaagtcgtaccgagtgtaggacacataccaagcaggagcacaaatgtcggattctctttaacaatcccattcattaatactttaaagttattcatatctttatactcctttcttatttaatgactactgaatcgacaatcgcagtttcggacttctgcacagctttctgcgaagcaccggtcgtaccattagcaccgccatcgcctttataagcaccataggcagcattcacagcattcaaaaatgcacgtgaagtgatagtagaagcagtaatggcatctacctgtccgccgtctttacttacagtcagcggttgctcacccggattcattcccttaatgctgcctttgtttccttctttgaaccagtcggccgccttggaaccaagtcccggagtttcggcatgtgacaacaaagaatagttgtagattttaccttcagcatcaaaaccaacaagtactttcaattctccgccaaatcccatcgacttggcttctactgctgttcctacccattgatctccgtttttagccggataaatgataaagtcaacaatcttcttgccatctttctcactaaacacggtatcacactctgcgaccggattatttgtaaattcgggcaaaacttcttttaaagcttcattcaatgtcttcgcattcgcctctgcaatgggacctttagtcaactcattcacataagccagcaaagctaccgaaatagctgttactccggtgagtaccagcaacatatttttcaatgatgattctaactttttcatttcttcttcgctacctccccaaagcgttttggtttgcaatacgtattgattagcggagtgaatgcattcataatcagaatagcaaacgacataccttccggatatgcaccaaacagacggataacaaccgtcagcaaaccgatgcagacaccataaatcaacataccttttttactcatcggagaggtgacatagtctgttgccataaagatagcacccagcatcagacctcccgaaagcaactggatcaccggagaaacataagcttcgggatttgccagatgcatgataccggaaaatacaaatacagtaaccagaatggatacagggatatgccatgtaatgattctcttccataacatataaagaagacccaaaatcagggcagcagcactcacttcacccagacatccaccattgttaccaataaacagactccaagcatcgggcagttgaccaaaagccgagacatccccatgaatagcctgtttcatcaatgccaaaggagtggcggcagtagtagcatcggtataagcagttaactgaccgaccaccggccaggaagtcatctgtaccgggaatgacaataacagaaacacacgccctgccagtgccgggttaaacggattgttccccaagccgccaaatgacatcttaccgacaccaatagcaaacaaagcacctaaaataataatccatacaggtaagttagacggtagattgaacgccagcaacactcccgtgatgacagcagaaccgtcacaaatagtagtggtttctttcttcagcaagaacttaccgattgcccattcaaaaaacaaacaggctatcacagaagtagctgtgacaatcagtgcacccagtccgaaatatacgagcgaaacgataaaggcaggaatcagcgcaatcagcacaccgtacatattcttttgtacgctgtctccaccatgaacgtgaggcgataatgatacaattaatttattttccatacttattattttttagcttgacgtgcacgaatcatagctcctactttccccttacccagacgacagtagtcgagtaacggacgattggcaggacaagtgaactggcaagagccacactcgatacaatccatgattctttctgattccattctttcaaattctgtgttctcagccaaagcggaaagcagatacggctccagtcccatcgggcaggcactcacacactttgcacaacgaatgcagttctgtacttctccgcgttttgcctctttccggttcataatcaaaataccagaacttcctttagcagtgggcacatcagtattaaccaatgctttacccatcatcggaccaccgccaattatttttccggtatcctccggcaaaccgccacaggcatcgatcaactgctgcatcggagtaccaatacgcgccaaaaagttagaaggctgggcaacagacttaccggtcaccgtaatgacacgctcaaacaaaggcttatttttctgtacagcttgatatacggcaaatgcagtacctacattctgcacaactgctcctgtagagataggtaatgcgccgcttgcaacctggcgcttcgtaatagcatcgattaactgcttctcacccccttgaggatatttcactttcaaaggaacaacttcaataccggcataactggatgcgactttcgtcatcagttggatagcatcggatttattgttttcgatacctataaaagccttattgactttcaccgccttcatcagaatagccacccctaccattacctcctcggcatgttccaacatcagttgatggtcggctgtcaagtaaggttcacactctacagcgttgataatcacgcattctgctttaaatgaaggaggcggacaaagtttgacttgagttgggaaacaagctcctcccaaaccaacaatgcctgcatctgctatcttcttcacaatctcttccgaagtcaattcgcactcttttaccaattcaggactacgatcgatagactcttcccattcatccccgtctacatcaataaaaatagcaggtttagcataaccgctcgcatcgacaatagagtcaatcttagcgactttaccactgacagaagagtgaatggctgccgaaacaaagccattagcttcggctattttagtgcccaccttcaccacatcaccttttgccacaataggcttagcaggcgcaccgatatgctgccccagcagtatcacagcttttgccggaacctctgccgtaacaataggttgatgtgctgagagtttattttcgtgtggatgaacaccaccaattgaaaatgtcttcaacatacaattctgtattttatctgtttattactcgtttttttaagcttcggcagttttggcagcttcggcaacaggcgtttcctctttaggtttacgaggagggaaattcaactcgatgatagtgtgctgcggacaaacttcaacgcacttgcgacaagacttacatttattgtaatcgatgtaagcgagattgttttcaagtgtaattgcctcgaacggacaagttttgacacacttaccacaaccgatgcaacttaccgtacaggctttgcgtgcaacagcccctttgtctttgttgacacaagatacatatacacgacgcgatttcttacctttggcacgaagctcgattatcgctttcggacaggcttttacacaagctccgcaagccgtacacttttcttcatccacctcaggaagtcctgtttccggattcatgtgaatagcatcgaactggcaggcagccacacagtcgccacatcccaaacatccatggctacagccggtctctccgccataaagcgaagcagcaatagcacagctctttgcaccgtcatacatatttgtacgcggacggttcgtgcaggttccgttacatctaaccactgcaaccatcggttctgcagttccggcgtccaatccgagaatagaggcaacctgagacatcacaggctgtccacccaccggacaaaacttaccttccagcgaaccggctttgacgcaagcatcggcaaatccgctgcaacccggataaccacatccaccgcagttagcctgaggcaacacttcggatacctgggcaattcgtgggtcttcgtacacggcaaatttcttagaagcaacatacaatactgcagccaatacaagcgcaatagctcccaaagaaatcactgcaatcagaatcaaattcataatttttagttatttattggttttatagtaaaagaaaatttttgtttcaaccgagttctgttcaaccatattatataataataaggaataagcaccgccaaagcagcaaatgctccatatagttcactatgaagaactgtcttgaaaatgaaaaggccaaagattaaaagaaagagaggaatgagaaaagccagaagaaccgcttgcatgcccatggaggtggcaccaataatcgtcacctcgtcccctatcttccatgcagacgaagtatcggtaacttcaattaccttctccttgctatctgccgaagagcaatgtcccttgacactgcaagtcgagcaagccgatgtctggatgatcctcacaaaaacctgagaaccacttatgttttccacaataccttgatgagttattatattagtcattttgcaaactgcacattacaaattgcggcaaatttaagcataagtttgaaaattacgaagtatttgaatgttttttatagtgcaatatgaagtctttttaaagtaatttttgctctatcaatcgggtatggatacagaaaaagcaggcttttcacctgctttactaagaaaatgttatcatcttctgatatttttaaagaaattagaaacaaaaaccaattcttttatcactttctgtttatttccccttctacattttaagagattcattaatctcaatcatccgaatcaaattcgtccgctgaattgaaaaggtactgctttctttctgaacatattttagcaaggaaagcccatcctgacgtaatttggacttttgcaaaatatcagattccacctcgtccgaaactttcaataaagtcacggccgccaattctatcttccccattctattaggatctccttcataacagtcaatcatttcatccaggctcatacttaacaattcctcttgagaaactcctaaaatctgtctcgtcaggcaatcatattcagtccattcatccttacggaacttctttttattcaatatcgcatttacaattaacgaaatgatttcctgaatcatccgtatcagatagtcttgtttaatcataatatcctctttttgaattagaacttacttaccacggggagaattaacctcaccggaaagaagagagccgactgaagattccagtcggcccctatttcatatatttacattatgtcaattattcccgattaccatttataattcagaccaaaacttagcaactccttcagctggaaataactgctgccagtagtcggcttcgcactgtcgtcaaagcgtgcatgtacaaatagtttggtagaaagataacggttcaatacgaagttgaaagtattctcccactctacacgcacccatttatagttcgtcagatagttcaaacgggaatcgactacaatagacggaataatagtccatgaaatagtaggttgaacctgtgcaccgaagtcattcttcgagcatttgcctttatccaatccaaacttggtttcgtccacgtttttgttacctatataacgaaggttataagtcaacggagacatgaatacagaaagattgaattttttctttttcaacttatagtccataccgacactgactatcacatctgcaggagcaaggaaagcagctaccaactcttcactgttagccttatatccctttacgaactgggttttaaactctcctgtaatagtatagtaccaattattggcagcctgaatacctaatttagaatacaaacgcaactggtcggtattaaccaggtatttatgatattcgtctgacggagaagaattgaatcctaatttagcttcgaacagattttcaaactgtactttttcacggtcattgtagttagcgaacaactgcagattggccattacggcattattgctctcacctcccttgtaccagttgtccgaaatatagttctgggtaatctgaagcgaaccgttacctcctgtcacccaccaattgggcttggagatcaccatttccgcttcacccacattgtcttccaccttatccgcacggaacaggcttttcacttctgttttcgggacttcaatcttcttatcgccatgatacaacttacggctcatgatatgatcttcggtattaacgactaaattaggatggttcagatatagatccatcaaagcaacattcaccagccgggaagctctctcagctttagaaaactgcaatgtgtcatacggcggcaataattgcgaagaaagggagggagtaacaaaaggttccttaaacttccagtgcatggtagaatattccgcgatgggagagttataataagtcagcggtacaaacagtcggtagtaatccggatccgtcttaatataacgcatgggtacagaaggatcattaagatattccaactctcctatatacttattatataagatggacaccgtatctatcttaggcttcggaccatccagattcagtttcaggacaaggtactgttgaagcgtctcggaaagtgtatctgctttcacttcactctgcactgtttcagaaaccggtttgttcgtcttctgcgccatcactgacgaagaaaacaggatcgcaaatgctaatgttgagatgtgactagtcttcatttttataacaaatttggggcaaatttacattaaatagtttagattacataaaatttgctcgattttaataggaataacctatcaaatgaatctatacaacaattcagttgttttattggaacgtgcgttatctctcagaataatacagatcgaactgagaaccgccttcccccggctcgatagtgcaagttgaataaaggcgtgcttatatgccggcaaacatgtgactgtttgtcgttcaaacatttcggtacccggaattgcattttttaataaatttgttttgtagaaagcatccgttcttccccatttttttgtaattttgcggtttttaagattcaaatcaaaggatttagaaacaaattattaaaacagttatagctgtgggagaaacaaagtatattttcgtcaccggtggtgttgcctcttctttaggaaaaggtatcatttcatcttccatcggtaaattgctgcaagcaagaggttataaagtaactatccagaagtttgacccgtacatcaacattgacccgggaacattgaacccttatgaacacggagaatgctacgtgactgtagacggccatgaagccgatcttgacttaggacactacgaacgtttcctgggcatccagacaacgaaggccaacaacatcacgacaggccgtatctataagagcgtcatcgataaagaacgccgtggagattatttggggaaaaccattcaggtgattcctcatatcaccgatgaaatcaaacgtaacgtcaagttactgggtaacaagtataagttcgactttgtaatcacagaaattggcggaacagtaggtgatatcgaatctttgccttatctggaaagtattcgtcagttgaaatgggaactgggtcagaatgccttgtgtgtacacctgacttatgtacctttcctgtccgctgcccaagagttaaaaaccaaaccgactcaacattccgtaaaagagttgcaatcactcggtgtacagccggatatcctggtgctacgtaccgaacatgacctgaataccaacttgcgcaagaaggtcgctctgttctgtaatgtagccgaaaacgcagttgttcagtcaatcgacgcttcaactatttatgaagtacctctgttgatgcaagagcaaggcctggacgaaaccatactccaaaagatgggtctgcctgtaggcgaacgtccgccgttgggtccttggaaagacttcctgaaccgtcgtgccaatgcaactgaaacagtaaccattgcaatggtaggtaaatatgttgaattgcaggatgcctacaaatctattctggaatccttgtcacaagctgctacctacaatgaccgcaaagtaaaaatagaatatgtatcatccgaacatctgactccggacaatgtagacgaacaattgggacatgtaaacggagtagttatctgtccgggattcggttcacgcggtatcgaaggtaagttcgtagctgccaaatacacccgcgaacacaacattccgacattcggtatctgtctgggtatgcaatgtatggctatcgagtttgcccgtaatgtgttgggttatgccgatgccaactccattgaaatggatgaaaagaccaagcacaacgtgatcgacatcatggaagagcagaaagccatcaccaatatgggaggtactatgcgtctgggagcttacgaatgtgtattgaagaaagactctaaggtatacgaagcctacaaagaagaacacattcaggagcgtcatcgccaccgctacgaattcaacaacgactatcgcaaacaattcgaagaggccggcatgaagtgtgtaggtatcaaccccgagtccgacttggtagaaattgtagagattcctacattgaaatggtacatcggaacacagttccatccggaatacagcagtaccgtactacacccgcatccgttgttcgtgtcgttcatcaaggctgcaatcgataagtaaaaatcgttatcgcatagattattaatcattaatcacttaaaaaagagaatggataaaaacaccatcacaggcctcgttttaataggtatattactggtaggattcagttttctgagccgtcccagcgaggagcaaatagccgctcaaaagcggtattatgactctatagccgtggtacagcagcaagaagaagcactgagagccaaaaccgaagctgcgctggctaacgaaaaagaagaaacagcagccgactcagcatcgctcttcttcaatgccaccaaaggtaaagaggcgtttactactatccagaataatttggtagaaatcactctggataacaaaggcggccgtgtttactctgccctgttgaaaaactacatgggacaggataagaaaccggttgtgttgttcaacggcagcgatgcttccatgaacttcaacttctataacaagaagggggccctccagacaaaagacttctattttgaagcagtcaataagacagatagcagtgtaacgatgcgtctagctgccgacagtgccagctatatcgatttcatttatacactgaaacctgataactacctgatgagctttgtgatcaaagctacgggaatggacggaaaattggctgccagcacaaactatgtggacatctcatggtcacaacgtgcccgccagatcgaaaagggatatacttacgaaaaccgtttggcagacctcacctacaaatacaccggtgatgatgtggataacctttcggcaagtaaagacgacgaaaagtccgtttcggaacgtctggactggatcgctttcaagaatcagttcttctcttccgtattcatcgcagaacaggatttcgaaaagactacggttaaatcgaaaatggagaaacagggaagcggttacataaaggactattccgccgagatgagtacgttctttgatccgaccggtaaacaacctaccgatatgtatttctacttcggcccgaaccactacaaaacgctgactgcgttggataagggacgtgaagagaaatgggaacttaacaacttggtatatctgggctggccgttgattcgttggattaacaaatggatcaccatcaacgtgttcgactggttgtccggctggggattaagtatgggtatcgttctgttgttactcaccatcatggtgaaaatagtcgttttcccggcaacatggaagacctatatgtcatcagccaaaatgcgggtgctgaaaccgaaaatcgatgagatcaacaagaaataccccaaacaggaagatgcgatgaagaaacagcaggaggtgatgggattgtacagccagtacggtgtaagcccgatgggtggctgtctgccgatgttgttgcaattccctatcctgatggcattgttcatgttcgtaccgagtgctatcgaacttcgtcagcagagtttcctttgggcggatgacttgtcgacttatgacgcattcatcactttcccgttccatattccattcttgggtaatcacctcagtttgttctgcttgctgatgactgttaccaacatcctgaatacgaagtacacaatgcaacagcaggatacgggtgcccagccgcaaatggctgcgatgaagtggatgatgtacctgatgccgatcatgttcctcttcgtcttgaacgactatccttcgggattgaactattactactttatttcgactctgatcagtgtagtaaccatgatcatactgcgccggacaactgacgaaaacaaattgcttaccgaactggaagctaagaagaaagatccgaaacagatgaagaagaccggatttgccgcacgcctggaagctatgcaaaaacaacaggaacaattggcaaaagaacgggctaataagcagaataagaaataagagataggaatcagcttaaataccgaagagccggacaagcagtgtatgtttgtccggctttcttttcctttattgaacagattacaacatgactactaaatacacatacaaagaaatatggattatcgcctaccccatcctgatcagcctaatcatggaacagctgataggcatgaccgacactgcttttctgggacgtgtgggcgaagtcgaactgggagcctcagccattgccggtgtatactatctggctatttttatgatggcattcggattcagtataggtgcacaaatcctgattgcccgtcgtaacggtgaacagcaataccaggctatcgggcccatcttttatcagggtgtctactttctgctttcactcgcagtggtagcattcactctttcgctgtgcttctcaccgcacatactgaaaaaggtcattagctcggagcatatatacgatgcgtccatcagctacatcaactggagggtcttcggctttttcttctcctttgtcggagtaatgtttcgtgcattcttcgtgggtacaactcagaccaaaaccctgacactgaactctgtggtcatggtattatccaatgtggtgttcaactacatactgattttcggtaagttcggtgctccacagttaggtatcgccggagccgccatcggttcgtcactggccgaaatggtttcggtcatcttcttcgtcatctacacctggaaacggatagactgtaaaaagtatgccttgaatcatctgcccggattccggccggagatgctgaaacggatcctgaacgtatccttttggacaatgattcagaactttttctcactgtccatttggttcatgttcttcctatttgtcgaacacttaggcgaacgtgcactggccataaccaatatcatccgtaacgtatcgggcatcccgtttatggtcaccatggcatttgcagctacttgcggctccctggtgagtaacctgatcggtgcgggcgaaatcaagtgtgttcccggaacgatccgccagcacatccgtatcggttatattttcgtgctgccgctggttatactcttcgcactgtttcctaacctgatattgagtatctatacggatattcccgatttgcgggaggcctccatcccttctttatgggtactatgctccgcttatctgatactcgtacctgccaacgtctattttcaggcagtatccggaacgggcaacacacgtacggcattgggattggaactctgtgtactggccatttatctgatctatatcacctatatgattctctatctgagagtggatgtagccgtctgctggactacggaacatctgtacggaatctgtatcctgttcctttcatacctttatataaagaaaggaaactggcagaaaaagcagatttgacctgatttttgcttatcttcgcagcactattatggaagagaacacaagtaaattactaattattaaaataactatgagacaagtaaacctatttattatgtcggcagcaatgatgttagcatcttgtggtggaaccaaagatgcaggcaaaacagatcaggcgctgatcggtaaatccgatatcaagatcgaaggaaagcggatgactcccgaagcgctttgggcgatgggacgtatcggcggactggccgtatcgcctgacggaaagcaaatagcctatactgtggcttattacagtgtccccgagaacaagagcaaccgggaagtttttgtgatgaacgcggatggaacggataatcgacagattacccacactccttatcaggaaaatgaagtgacttgggcggcagacggaagcaagctgctcttcctgagcaatgacaacggcagcagccaactgtatgaaatgaatccggacggtagcggacgcaagcagatctccaagtatgacggagacatcgagggatattccatctcaccggacggtaaaaaaatactcttcatcgctcaagtgaaaacagtaaagagcacggctgataaataccccgacctggataaagcgaccggaatcatcatcaccgacctgatgtataaacattgggacgaatgggtgaccaccgctccacatcctttcatcgccgactttgatggcaaatcaatctccaacatcatagatgtgctggaaggagaaccttacgaaagcccgatgaaaccttggggaggtatcgaacaattggcttggaatacgacttcggacaaggtggcttatacctgccgcaaaaaaacgggactggcttatgccatatctaccaactcggatatctatgtatatgacctgaataccaagaaaacagtaaacatcaccgaaggtatgatgggttatgatacaaacccgcaatattctccggatggaaaaagcattgcctggcaaagcatggagcgcgacggttacgaagctgaccagaaccgcctcttcgtcatgaacctggaaacgggcgagaaacgttttgtaagtaaagctttcgattcgaatgtagatgcattcgtatggagccgggatgccaagacgatctacttcaccggtgtatggcatggcgagacacaaatttattcactcgatctggctaacgattccgtacgccccgtcacttcgggtatgtacgactacgaaggcgttgccctcttcggagacaaactgattgccaaacgccattcaatgagtatgggtgacgaaatttacgcaatagctttggacggacaaaccacgcaactgacccaagagaacaagcaaatatatgaccagatcgaaatgggtaaagtagaaggccgctggatgaaaacaactgacagcaaagagatgctgacatgggtcatctatccgcctcaattcgatccgaataagaagtacccgacactgctcttctgcgaaggtggtcctcagagtccggtaagccagttctggagttatcgttggaacatgcagattatggccgccaacggttatatcgtcgtagctccgaatcgtcgcggacttccgggcttcggattggaatggaacgaggctatcagcggtgattacggtggtcaatgtatgaaggattatttcacggctatcgacgaaatggccaaagagccgtttgtggatagtgatcgtctgggttgtgtaggtgccagcttcggaggattttctgtgtattggttggccggacatcacgacaagcgcttcaaggcattcattgcccacgacggtatcttcaatatggaaatgcaatatctggagacagaagaaaaatggtttgccaactgggatatgggcggtgcttactgggaaaaacagaatccgacagcccaacgtacatttgccaattctccccatttgtttgtcgaaaaatgggatactccaattctctgtatccacggtgagaaagactaccgcatccttgccaaccaggcaatggctgcattcgatgttgccgtgatgcgtggtgtacctgccgaattactgatttatccggatgaaaaccactgggtactgaaaccacagaacggtgtactgtggcaacggactttcttcgaatggctggatcaatggctgaaaccaaacgaaacggcacagaaataaaggctgtgttgtcaacaaataaaggctctgtccctgccggacagagcctttatttgttgacaacagaagctctatttggaaggtaagaagtacccaaagtctacatccgcttcaacttcaccacctctcccagtacggggatatatacatctatctttcgcttcttggcttcggcagcaaaaaccagaggagggtcatgcagaggttcatcggacaaatcgaaagttccgtaatgcatcggaattgtgagagcagccttcatatcggtcgatgcagtcagagcatcataaggcgatatatgattgggttgcataaaccagcgcggtttataggccccgatacccaccaaagcataatcgggagctccgaaaagatcgggtatttcacggaaatgcctggagtaaccggtatcaccgctgtagtagagggaaataccatcggcctgtaccataaatgccccccacagcctgcgccctccatcgcgaacggaacgtttgctccaatgttgtgcgggaagaaacgttattttcagcccgtcatcttctatctgctgataccagccagcctctgtcacctcaaactcaggaaaccatcctttgattagctccccggtgcccagaccacaaaagagtttcatccccggattgttttttaccaaccgtgccacactttgcttatcgaggtgatcaaaatgatcgtgactgatcagcagataatcgatatcggtaaatatatcgggattggccggaaaatcactttgccgcttaacgaaaggaatatcaccgaaaacggggtcgaacatgatccgcttcctagctaactgcaggaagaaagaattatgcccgagccaaatcagtgaattgcctaccacgccatccagcgaacgcagataattcaacttgggattccacttcacactctttttctctttccgctgcggattgggcgaaagacgccacttcaacacactccccattccgggacgaaaacgatgctggcgattgacaaactttcctcttactacaggattgccccgccagtgaggattgaccgttgccagtctttcatttcttctgaaacatatatgctcgcccatatgatacgtattcttttcgatgagtaacaaacaaaaataacaaaagatttgcggttcgttgcacaaaaccgtatttttcttacaaaaaaaatgcctcccggacacactacgggaagcatttctatgatcatcaactaattggcatttcacgtcatccgacccaaaggaaaggataaggccatcccaggtaagagaggttgatgacaaaaataacgacagccagtatccatataatcaacagtgaccatttcagtccggatgacataggagaccaattgaagatttgccggagaatcacgaaaatgatggcggctaaaggaatacctgccaagacaactcctgcaatgctcccggcgatagtcatcatcggagaagtagagatcaatggtgaccagtcgaccgaaggcaacatctgataaagagcggctccacctccgatggctactgcaatggcagcaatcaccagagcaacgaaaacgatggcaagaacaaaaagaacagggctgcaaataatggcaagaaccaccaggcaagctttcaggaagaatccggcaatggacaccaatgcgtctcctactttctgcagaaagctacggggtttacctgagtttacgtagttgtttacaccgttggccatcctctcaaagccatcggtcaccgtcctgccaatgttctcgatagtgatatcctctccccgcatgttcagcttctcggctgccgtacgagcttcgggaataactaaccaacaaataatatagataggaatcaacacgccatatccgcagataagtaccacaaacatgataagccggagcaccgtgacatcccaattaagataagctgccaacccgctgattacaccacccagtatcttatcgtcaggattacgatataatctgcgccgaatggtcgcaccttgctgtgcccccgtttgtccggttgtctttttgggctcctcttcttcggtatcctcgccgaagtcttccggtttacccatacgtgcaatcacctcttccacatccgcaatcgtaataacctgcgaaccggctgacagcttttcggcaaaaagctcggaaatacggttctctatatcatttacaatctcctctgctccttcttgtttgcgaaagtgaagtctcaggttgcacagataattatcaagcaaccgataggcatcttcgtcaatatgaaaaacggttccgcctaaatttacggttaatgtttttttcatctttatttctttttaaatggattctctattagctatatgattcacggtttcattcagttctttccaggaagcctccagttcaccaagaaaagactcccctttcccggttagtttgtaatatttgcgtggcggtccttgtgttgactcaacccactcgtaactgagcaaatcatcatttttcagccgggtcagcaatggatataaagtcccctccaccacaatcagcctcgcctctttcagtttctgaatgatatccgaagcataagccggctctttatgcaacaataacatgatgcaatactccagcataccctttcgcatttgcgactttacattatctacattcataagttctatcttttagatgcagcaaatataggcattgctatggtactatgcaatacaaagtaccttatttttatactaattaacgcattaagtccctttcaccttattataaatgcaaattatcactatatttgccgtataaattgaaaaatacaacaaacatgtttactatccgaaaagcaacctcagatgattgcaaactgattaacgaactggcaaaccaggtatttcccgccacttacaaagaaatactttcgaccgagcaacttgactacatgatggagtggatgtatgcacccgaaaacatccgtaaacaaatggaagaagaagggcatgtatactttatcgcctatcagggagacgaaccttgcggctacgtctctgtccagcctcaggatgccgatgtgtttcatctccagaaaatatatgttctccccggctttcagggggcacatttaggcagcaaactatttgatcacgcagtgcaatatatcaaagagatacacccgtctccctgcctgatggaactaaatgtaaaccgaaacaacaaagcgctgcacttttacgaacataaagggatgaagaaattgcgggaaggagacttccctatcggaaacggatattatatgaatgactatattatgggattggaactttgatttatctgtaaagaaaaggccaataggagaaacgccccgttacatatattgttatcgaaataacaagtaatgtaacggggcgtttggtgtatagtcagtaacccgaaggtcttatgctaccttttcaagtttcttcatgatagagaagataaacagggcggccagcaaacagcatacgataagcacactccataccatccacaattgcatgcctccccacagataaccgatgatggcaaccaggtagttaccaatggcagttgcagcaaaccaaccacccatcatcatacctttgtacttgggaggagctactttcgaaacgaaagagatacccatcggtgacaagaaaagctcggcaaaagtaagaaccagataagtggagatcaaccagttcggagaaaccaacgcatccttctcaatgccactggcagccaaagcgtccggagtaggcagaccgatagagccgatagccatgatcaaaaaaccacatacggcaatcatcataccgataccgattttacgcggtgcagaaggttcttttccttttctggccagatagccgaacactgccagcgaaaccggagtcaaagcgatcacgaagaacggattaaactgctggaagatctgtggcaggatgttgattgtaggatccatagaagtataactccatcccaggcagaggagtgccaccataactactacaccggcaatcgttttcgactttccggttttaccctggaacagtgaaaacagtccgtagataacgatcagcaagaaggtcaggttcacgatattgaagcccagacggtcgagaccggtcacctcttgtgccgtatagtcacgagcgaagaatgtcaatgtcaacccgttctgatggaaagccatccagaagaaaataactacggcaaacacaagcaacagagctacgatacgttgtttagtctgttccggagtcaacttctcttctaccacgttggccggcttagcctgtttagagttatagtccgcatgtttaaatgtagaacggaaagctacataaataagcattgaaataatcaaggacacacatgccacaccaaatccatagttgtaagcttcggagagcttatcgatataagtagtacagaaagtggcaatgtcaccggtaaagttttgtgcagcctgcaaggattccaaagtagcctggttggcaggagtgattgttccatcgagatattgatgtgccaatgaaggaatctgagggacatacgacagacctgccttgcccaacatataattggttactttcgttgcggctgtcggagcatacattgcgccaatattgatagccatatagaaaatactgaatgcagtgtcgcgtttggaactatattcgggggcatcatacaaattacccaccatcacctgtaaattacctttaaaaagaccggtaccgcaagcaatcagggccaacgcaccgaacatcattattttgccggagttatcggaagtcgggatggcgagcagcgcatagccaataaacatgaccacaatacccattgtcaccatcttaccataaccaaacttatcggcaagaataccgccaaagaaggggataaaataaacagcagccagaaaacatccgaaaatagtagaagtttcagcagcagtgtaaccaaactttgcttgtaaaaacaaagtaaaaatcgcaagcatggtgtagtaaccgaatcgctcgcctgtgttggcaagtgccagagcatacaaacccttaggttgtccttcaaacataaaattagaatattagattattaaatagatattttttgcaaatatatactttttactgaaattaaacagtatataatacacaaacttccgcccgaacctcgtttattagctctttagggtctatttttatctgcaatcctctctgccctgcacttacataaatatacggaaagcccagacaggtttcatgaatataggtaggaaaatgctttttcattccgatgggcgaacaggcaccccggatatatccggtgacggacagaagctctttcatagggatcatatcgcaacttttattgccggacactttagcagcaagcttcaggttcacttcctgatctcctggaattacacaaacaaaatatcccgttttatcaccgtgaagtacgagggttttaaaaacctgattaatattctctcccaaacttgccgctacatgcacggcactcagatcgctttcgtctacctcgtaaggaataagttcataggcaatcttggccttatccagtagacgggcggcattggtcttattgattttcatagacaatatgtgtatttcggcagccacagaaaggagctgcccattagtaagttaataatgtaactttacgaagttaactccctgcaatcacgaagttaacctcggacaaatacgatgaagatgtgtcataactcaccacagatcacacagatttacactgaacgttttttagtctactgacagccaataatatttatctgtgtaatcggtggtgaatacgaattttgacatatcctcatcatacaatatgaatttttaattgattttcaattcctcgcgaagaaacttcggagtatatcctttgttgctcttcgcaacttcttccggtgttccgaaactgagaagttctcctcctcccttaccaccttcaggccccatatctattatgtaatccgccatcttaatcacatccaggttgtgttcaataacgatcacggtattgcctttatctaccaatttattcaggactcccatcaacacacgtatgtcttcaaaatgcaggccggtagtcggttcatcaagaatatacaaagtctttccggtatctcgttttgaaagttcagtagccaatttcacacgctggctctcacctcccgaaagagttgttgacgattgccccagtttgatataccccaatcctacatcttggatggtcttgatcttattcaggatctgaggaacattctcaaagaactctactgcacgattaatagtcatatccagcacatcagcaatagattttcccttaaaacgtacttccagcgtttcacggttatagcgtttaccatgacagacttcacacggaacgtatacatcgggtaagaaattcatttcaatcgttttgtagccgttaccggaacatgcctcgcagcggccaccggacacattgaaagagaaccggccgggcttataaccgcggatcttagcttccggcagtccgacaaacaggctccggatatcagaaaagaccccagtataagtagccggattggaacgtggggtacgccccaaaggggactggtccacattaaccaccttatctatattctcaagtccttcgatcgaatcatattccaaaggatcctgcaaagaacgatagaatttttgcgaaagtatcggttgcaaagtttcattaatcagagtcgatttgccactaccggaaactccggttacacaaattaatttacccaacggaaattccacatccacatttttcaggttattccctttcgcgccccgtaaccataaagacttgccgtttccgggacgtctcttagaaggtacttcgatagccgtttgtccgttaaggtactgcgaagtcagtgtactggtcttcaacatctcttcaggagtaccggcaaaaacgacttctcctcccaatcgtccggccttaggtcccatatcgatcacgtagtcggcagcaagcatcatgtctttgtcatgctctaccacgatcacggagttacccatatcacgcagttctttcagagaattaatcagccgcaagttatcacgttgatgcaatccgatactcggctcgtcaagaatataaagcacattgaccaactgagacccaatttgtgtggccagacggatacgctgactttctcctccggacagactgaccgagctgcgatttaacgaaagataatccaaccccacatccaacaggaatttcaagcgggtacgtatctccttcagaatctcggcggcaatcgttttctgtttatctgtcaggaacttatctactttcatcaaccagtcatacagctcgttgatgtccatattagagagttcattgatgtttttgtcatggatacggaaatgaagcgcctccttattcaacttcgcccccttacattcaggacaaaccgtagttttagcgaactgttccgcccatttctgagcagtggccgaagcgtctttctcttgcaacatctggatatacttcacaactccttcatacgttacaaaatagtcggaagaagtacctatcaatgagctttttattttgatacgttcatccgaaccatacagaatttcatcaatagcatcattgggcaggtcttttaccggagtcttcagtgacgcatcgtacttctccagcagagcaccgatctgccagaaaatcatcgcattcttatatttacccaaaggagctattgccccttcatagatcgacatctctttattgggaatcactttatccacatcaatctggctaactactcccaatcctttacaacgcggacaagcaccttgcggggagttgaacgaaaaattatgcggagccggctcccggtacgacaatcccgtaacaggacacatcaagcgtttgctatagtgtcggatactctctgtctgtgcatcgagaatcatcagcaatccgtctccctgacgcatggcggtggcaacactctgtttcaaccgtttatcatccttatcttctacgatcagtttgtcaacgactacttcaatatcatgattcttataacgatccagtttcagaccatgtgtaatctcacgaacctccccgtcgatacggacatacaggtatccttttttccggatttgttcaaagagttctttataatgtcccttacgcgaacgcaccagaggggccagcatatagattttcttccctttataatctttcagaataagttccaatatctgttcttcggtgtatttcaccatcttttctcccgaaagataagaataagctattccggcacgggcataaagcaaacgtagatagtcgtaaatctccgtagtggttccgaccgtagaacggggatttttgttcgtagttttctgttcaatggaaataaccggactcaatcctgttatcttatctacatccggacgctccagattgcccaaaaagttgcgggcataagccgaaaaagtttcaatatagcggcgctgtccttctgcaaatatcgtatcgaaagcaagagatgacttcccgcttccactaagtccggtaattacagtcaggctattacgtggtatttccgcatcaatgtctttcagattgtgtacgcgcgcaccatacacatttatatattctgtttcctgcatattctaacttttattgagctgcaaaattaatgtttccgcccgaaatatagttttaaaaaacacaatattattttcttaactcaatatattatgtgaatgtatgacattattcgtacctttgccgtaatcaattgagaattgaatagtaaaaattacaaattaagattaataaattgatgaaatcaatcaaacgaatcttctttctcctgtcctttataagtgtttcctatttaagcacctttgcacaagagaaccaatcctacttcctgcacaccattgaaaagggccaaagtttatactccatctcaagcatgtatggagtcagcaaagcagatattatccgactgaatcccggttgtgaggacaaaatctacgcaggacaagccattaaaatcccacagaacaaaactgctcaaaaaggtgaaacctttcatacgatccagccgggcgagacactctatcggctgacaacgacctataaagtttctgccaaggctatctgtgacgctaaccccggattaagcgcggagaacttccgcatcggacaagttatccgtattccttcggctgccgaggctatcgattcgaccgtagaagctgtagtggcagctccctcagagcctgctatgcaaccggccgtcaagccacgctgtaaagatatgcataaggtgaaacgcagagaaaccattttcagcgtcagccgtgaatatggcatttccgaacaagaactgattgctgccaatccagaattaaagaatggcatgaaaaaagggcaatttctctgtatcccctacccgtctgaaaaaccgacagtcactgtccccaaaacagatgccaacatcataccgccaagtgacagcgaattgttccgtgaaaacaaagaagttcctaagagcatttctactatcaaagcggccctcctgttaccatttgacgacaaacggatggtagaatattacgaaggtttcctgatggcagttgacagtctgaaacgtaccggaacttcaatcgacctgtatgtatacgattgcaataaagaaagttcgtcgctgaacagcattctggccaaaagcgagatgaaaaatatgaatgtgatcttcggtccggcacaacaacaacacatcaaaccattggcagcctttgccaagaaaaacgatatacgcctggtcattcctttttcctcaaaagagggagaagtattcaacaacccgtttatctaccagatcaatactccgcaatcttatctgtattcggaagtatacgagcactttacacgccaatttccaaacgccaacgtgatccttctggaatcagcggttgtagataaagataaagtagagtttatcaaaggtctgaaacaagaattgggaagcaaaggtatacccgtaaagacattgaaagaaaatgccccggtagaaactctaaaagcagctctgcacaatgacaaggagaatttcttcattccgacttcgggcaatgatctgacgcttctgagaatcattcctcaattgacattactcgttagagacaatccggaagcacgtattcatttattcggttatccggaatggcagacatatacaaaagaccatttggaaagtttctttgaattggatacctatttttactcgtcattctacacgaacaatctattaccggccgccatcaacttcactcaggcatatcgcaaatggtacagtaaagagatggaggaacggtatccgaagtacggtatgctgggctttgacactggatacttcttccttaaaggactgtctaaatacggttccgaactggaaaagaaccttccgcaaatggatttgactcctatccagaccggatttaaattccaacgtgtcaacaactggggaggatttgtgaacaagaaagtattctttgttcatttcacaaagaactttgaattgattaaacttgacttcgaatgaaaagggatcaactgaaatcactcttactgggagccattttgctggcaggcattaccctgccggcaaaagcccagataggcgaacaacgacataattttgcaatcggaatcaatggcggtgctaattacagcactgtttctttccagcccaccatcaagcaaaacggtcttttgggaattaccggaggtgtcacagcacgctacatttccgaaaaatacttcgctatgatctgtggtgcacaattggaacttaacttttctcaacgcggatgggacgaaaaattcgatccggaacagggattctcttccgaagactcttatgtccgtaccatgaactatcttgagattcctttccttgcccatctggcctttggcaaagacaaaggggtacaatttttcgtgaacctagggccacaaatcggcctcttgttaaacgagagcgaaaaaagaaaaggtacttgggaaaccgcgaatcgggcacccaatgaacaatatggtaaatgggttgaaaataagtttgattacggaattgtaggaggaggaggcattgaagtcagaactaaagccggtaatttccttttggaaggcagatattattttgggctggccgacttctacaacagtaccaaaaaagattatttctcgcgctctgccaatagtaccattacagccaaaatcacttatctgtttgatataaagaagtagaaaagcatatatacaaaatcgccacaaaggatttagagtttatagagaataatttctaaatcctttgtggcgattctacttttatcggagacgatcggcagcctttaccatcacttcatctcgtcctatcgcacggaccgccagccaattcagaataatcgaaattaacggcaggcataatgcccatgatatctggaaagtagcactcaaatctttcttcaggacaaacatgaaggcaagaaaagtaagataataaccaatcagcagaatactattgaatatcgtcatacgaatttgcaacatacggttcttgaacagaaagatcgtagcgaatgcaatgattgcactgagcaacaagataccaaataccccccatgtagaataaagtgtaccgttcatctctacccccaatggtttaaaaacatacattgcagcatcagcacctataaagctgcccacaggcagacacatacttgttatcaataatgcagtaacaagtaaaagataaatcgtttgaattcgttgaatcatagtttttaaagttgtgtttaatccggaataaaaaagtcaagcaataagagatagaagaatagactcctacttactacttgactcttagctcttcaatcagcgaagtaaattactgtaatttttctttctccttcgccgggtttctataatagatctttccttctacatattcctgcgcagcaatcagattgggtttcggcaatttctcgtaataacgtgaaatttcgatctgctctctgttttcaaacacttcctccaggttgtcgttgtaagaagcaaactccgcaagtttcttggaaaggtcattttttatttccacactaatctgattggcacgcttaccaatgatagccactgtttcgtaaacattaccggtatcggcacacaagtccatcatatcacgggtaatggtattcgtcggagcatttgtttttttgtaatccataaatctatttataatttagtctttaattactttttgagaatctttgaaaatcctttcggcttccttcagatatttactttccggaaattcatttttgaaagcataatattcgtctaccgtttcgcgataacgatccatctttttatcttctacactattcactgccatctcatatttggcacggagaatcaaaatagataaatcctcacgataatcagtataaggataatcttttaaagcattctgtgctgtgattacacaagacagatagttgttacccatataattacccagattataatataatctcgctgaataaagttctttcaaaaccaacttatcctgcaaagcaaaaatcatattctgtgcctcttgttttctgctgctttgaggataatattccaagaacatctgcaactgctggatagcctgataagtacttgactgatccaatcggggttccggagtatccaagaacaaagctttgcctgcatgaaaacgagccaattcagagaactgaccacgtggatatgtattaaaataagtgataaacgactgtgcggcagtagaatagtctttctgattataataactcatagccaacatgtataatgattcttctgccttatcaccacctttcaagatagttatcaactcgttcagcaatgtagccgaccgattatactgacccttggcgaagtagttcttagcggcctcatacttgtattcgtaatcagtgctttttagcaacttattgtactctccacacgaggataaaacagtagctgcaagcagcgttataatgatgttcttcttcattctgtatttaaataatgcgcaaagttaaagattcgcgctgaataaaccaattaatcaatgttttttaagataaaaaagaatggaagaatagagtttagttacgaatggcgaataagcattgatggatggttaatttataaacaatatagcagctattcattaaccatccaccacttagtcacagattttacagtttatacaagtcgcttgccgccaacaagtcaactttcttttccgtcaacacacggatacagttttccatatcattaggacggataatcacatttgcagagttattattggcaaatgaatacatatattcaataaaaactccttcattggaaaggtattgcaatactttggctaacgcaccgggcacgttaggacagttgatgcctaccacttctgtcacattcactgcaaaatgattatcttttaaagctttataagctttatccggatcggaaacaatcccccggagaataccaaagtcggcattttcagcaatgcaaagagcagaaagattaataccttcctttgccaatacttcagtcacctctgtcagtcggcctgatttattttccaaaaaaatggaaagttgttttgctaccataataaatgactttatatttaatattcgttatagttttctattatcaatcacacgcttcgctttgcccacactgcgttcaatgctgcgcggctctaccagcttcacgtctactcccagacctaatacactttgtaagcgacctgtcaatttcttctttaaagccagcatcttgttaatttcatccgaataatagtcaggacgaacctcaaccttcagttccatagtatccgtattgttcttgcggtcaatggtcaacagataatgtggctcgaattccgccatttccagaataacagattctatctgtgtcgggaatacattgactccacggataataagcatatcgtcactacgtcccaagatgcggtccatacgcaccaaagtacgtccgcaagaacatttttcataatgcaaagccgtcagatcttttgtcctgtagcgcaataaaggcataccttctttcgtcagatgggtaaaaacaagttccccggtctgtccgggttctacaggctgcaatgtatgcgggtctattatttcagggaagaagtgatcttcattcaagtgcgtaccattctggcattcacattcatatccaacaccgggacctgcaatttcactcaatccatatatatcataagccttaatgcccaatttggtttcgatgtctttacgcatactttccgtccagggttccgcaccgaaagcacccgccttcagtttaaattcttcgcgtggaaaacctgagtcattaatcgcatcagccagataaagagcataagacggtgtacaacataacacagtcgagccaaaatcatgcatcaatgtaatctgcttttccgtattaccacttgacatggggataaccgacgctccgatattctcggcaccggcatgtgcacccagtccgcccgtaaacaaaccgtaaccgtaagatacctgaaatatatcagaacggccggcaccataagctgtgaaggcacgcgacagacattctgcccaagtcgataagtccttacgggtatatcccactacagtcggtttcccggtagtaccggaggacgcatggatacgaacgatctggctcatgggtacagcgcataagccaaacggataattgtcgcgtaaatctaatttagtggtaaatggtaatttggatatatcttctatcccgttaatatcatcgggtgtgatgcccaactcttgcatttttttacgatagaacggcgtattatgataaacgtattctactattttcttcagtctaatgctctggattttatgcaaattgtcgcgttccatgcattcgatgctctcattccaaatcatgtctttcgttgtattttgttagttatgttgtgcaaagtaaaggatttattttaaaatttgatttgtttatctcaactattttgccgaatattgtcttctgaaagaaaaaaagaagcatgaattttgaattaacatccgcatacaagccgaccggagatcagccggaagcaattgcgcaactgaccgaaggggttcttgaaggcgtaccggcacaaacgttactgggagtaaccggttccggaaagacatttaccatagccaacgttattgccaatatcaataaaccaacattgatcttaagccataacaaaacactggcagcccagctttacagcgaatttaaaggattttttcccaataatgctgtcgaatattatgtatcttattatgattattaccagccggaggcctatctgccaagttcggatacatatatagaaaaagacctcgctatcaatgacgaaatagataagctcagattggctgcgacttcggctcttctatccggcagaaaagatgtagtggttgtatcctccgtatcttgtatttatggtatgggaaacccatccgatttttataacaatgtaattgaaatagagcgaggccggaccatcaaccgcaatgtatttcttcgccggttggtagacagcctgtatatgcgcaacgatattgaactgaatcgtggaaatttccgggtcaaaggagatacggtggatatatatctggcctattcggacaatctgctccgggtaaccttttggggagacgaaattgacggtatcgaagaagtagatccggtatccggagtcaccatcgcaccttttgaagcctataaaatatacccggctaacctgtttatgactactaaagaagcaactttacgggccatccatgaaatagaagatgatctaaccaaacaagttgcctatttcgagtctatcggtaaagagtacgaagccaaacgtctatacgaacgagtgacatatgatatggagatgattcgggaactcggtcattgctcaggtattgaaaactattcacgatattttgacggccgtgctgcaggtacacgtccatactgtttgctggattttttccctgacgattttttgattgtaatagatgaaagccacgtcagcgtaccgcaaatacgagctatgtacggaggtgaccgtgcccgtaaaataaacttagtggaatatggttttcgtttaccggcagctatggacaaccgccccctgaaattcgaagaattcgagtcgatggctaaacaggtgatttatgtcagcgctactcctgccgattatgaattagtacagtccgagggtattgttgtcgagcaggtgatccgtcctaccggtctgctcgatccggtgatcgaggtacgtcccagcctgaatcagatcgatgatctgatggaagaaatacagatacgcattgagaaagaagaacgcgtacttgtcaccacactgaccaaacgtatggccgaagaattgacagaatatctattaaacaacaacgtacgttgcaactacattcacagcgatgtggatacattggaacgggtcaagatcatggatgatctccgtcaaggagtttacgatgtgttgatcggggtgaatttattgcgcgaaggtctcgaccttccggaagtgtcactggttgccatcctcgatgcggacaaagaaggatttctccgttcccaccgttcattgacacaaactgccggacgagcagcccgaaatgtaaatggaatggtgatcatgtatgcagacaaaatcacagatagcatgcgactgactattgatgaaaccaatcgtcgccgtgagaagcaacttgcatacaacgaagaacatggtattactccgcaacaaattaaaaaggcccgtaatctgtctgttttcggaaacggagcagaaacagaagatactcaaaaaggtacccgtgcatacgtggagccttcttcacccaatattgcagctgatccggtcgtacaatatatgagcaaaacccaactggaaaaaagtatggagcgtactcgcaagttaatgcaggaagcagctaagaaacttgaattcattgaagcagctcaatacagagacgaattacttaagatggaggacttaatgaaagagaaatggcccggataagaatatccaagtaataaacttccagaatatatcaaagtgaactctttaactcttaattatcctaacaaattaagctgataaataaaataaatgttataaaaagaaaggttttctatgaaacatttgccaagatctcaaaaatctgtatctttgcattgtgtttttcatagtattagatttaaggttaacaaaggttggagcaaggcgttgctcctttttttatgctttcaaatcaactttcacaccaaatccttatctttgcacagcatcctgaatatagaaaaatgaaaaagatcgtccttatgggaatacctttattgttgatagtccttgtgatcaccatctatgtttgcaaccggactatacagaaaaatagcgaaacatatatctattcgactgtttccgatattccatataataaggtaggactgttactgggaacttcacctaaactgaaaagtggaaaagccaacctatatttcgactataggattaaagctgccacagaactctacaatgccggaaaagtcaaatatatactggttagcggtgataaccggaaaaacagttataacgaaccggaagaaatgaaaaaagcacttatagcagcaggaatacctgaccaacggattatactggactatgcaggtttaagaactttggattctgtggtaagagcacatttaatttttggtttggagcgttttactctgatttcacaacagtttcataacgaacgggcaatttatctggctcagcaaagtcacctccaggctatcggatataacgctcaggatgtgagtgcgtatgccggctttaaaacgaatcttcgagaattattggcaagagtaaaagtctttgtggatatagttaccaataaagctcccaaacatcttggagaaaaggtaaagatacccgaataataattgtatattccccctaataacatcattatcataaaatacatgcaaaagttactatttctttttttactgccactgataccattttcgttcccatgccatgctcaaaccacttatcaaatggtgacaagaaattactctccggttacagattcttatccccaagaggtttctaattttaaaaaggcagacagtgtctactatttcaccgtaaaagtatccaaagcttatgacgataccttaaaaagaaaagtagcagaaaaggttctttatagccccaatgacatctatgacggagaggtcgcttcttatctaaaccccacccgactcattgactattcttctcctactatcgaacttataacagactctttattcaaaggcgaagacagtataatgacaattataaaaaagggcttggagtttgtatcccattatataagttttgatgattctctagccacggctatttcaagaggtgattgcaaaacattggatgtaaatcatatccttcaaagaaagaaaggtacttgcagcgaatatactaatttattcacggcacttatgagaaagaaaggaattccttgccggtttgttgccggttttatttttatacctgaacaaaaattctatggatgtcatgcctgggccgaatgctacctcaaacaatacggatggatggcagtagacccccaatccggaaaaagctggttaccaacaactataatccgactttttgccggaacagattatacagactgtggattaaactcttttatggacctagtacccaagtctatagaaatagtaaaagaataaatgtacatcaaaaatataaaaaggaaaataatgctcagataatcatggaacaacaacctcaactcaacgaccacaataaacaagaatatcccccgatgcatacagcagagcatttgctcaatgccactatggtaaaaacattcggatgtcctcgttcacgaaatgcacatatcgaaaagaaaaaaagcaaatgtgattacgaacttccgacttgcccaacggaggagcaaattcatgccattgaagaaaaagtaaatgaagctatcgatcgccatttacctgtaacctgtgagttcatgacacacgaagaagccaaaagcattgtggacctgagtaagcttccggaaaatgcaagcgaaacattacgtattgtcagaataggagattacgatgcttgcgcttgcatcgggcaacacgtagaaaacacatcagaaataggtctttttaaaattatcagttacgactatgccgacgaaaaattacgcctcagattcaaactgataaaataggtatgtaacagtctcaatcaactaatagattattaacaaaagtcttatcaaagtataaatttatgaacaatttgacagcaaaatggtaaaattggcattatctccctgacatttagtcaaactaaggaagaatatggcactggcacaaattttgtaatttctttagtgaacgacggttcgaaacgacgaaccgaaattcaagaattaatctgaatgtttaactaaaagataggagactaaattatgatgcctgttagaagatctcagaattggttaccaagtatctttaatgatttctttgataacgaattaatggctaaagcaaatgctaccgcacctgctattaatgtaattgaaaccgataaggcctataaattagagttggccgcaccagggatgactaaggaggatttcagcgtacggattgatgaagaaaacaacctggtaatttcaatggaaaagaaagctgaaaacaaggaagaaaagaaagacggtcgctatttacgccgtgaattttcatattctaaattccagcagacaatgattctgccggagaacgtagataaagatcacatctccgcgcaagtggaaaacggtgtcctgaacatcgaactacccaagttgagtgaagaagaagtgaagaaacctgacagaaccattgaagttaaataaactcattgaattagtggaaattccttaatacaaagggattaaagatcaccccggaatcatctccccattagagagaaagattccggggtattcttttataaaacaagagttgaagggtggcagtatttgcgcaatacagacattagtcttgctttatccaccggcttcacgagataatcattgcaaccggatttcagcgcagctaccttgtcggactcgaaagcatgcgctgtaagagctacaataggaatattcgtatcaaacttcctaatctcagctgttgccgtcagtccgtccattaccggcattttcatatccatcaacaagagatctattttatactcttttaccatcgctacagcctgctccccattcacagcgtgaagcaaattataatgtttggacaacatagccgatatcagcagataattacttgaaatatcttctacaaccaagactgtttttctatccaaagccgaatactgatttccgctacgtatcagatcatctttacctgtattctgtccaatggcgatattggactcccgacgcatttgtacctccggatcgcaaggtagaacagcccagaaaagagatccccggctatattccgattcaaaaccgacacttcctcccatcgattcggtaatagccttacatatagagagtccaagaccggtgccttgtgcaaattcatccaatttctcaaaccgatgaaagactttcctctttttctcctccggtataccgatgccggtatcccttacataaagacggattccggcgtctaccacctcgtatcccatctcgatagttccctgcggcgtatatttgatggcattagttacataattagtcaccacttgtgcaacccgatttttgtcaagtctcacccggcacacactataaggattcaccgcgaccaactgcactttaggatttgtcacccgttgcttcattgaagatgccatactatcgaaatattctgccagatcaaattcctcatatttcagctccaccgaaccggactccaacttcgacaaatccagaatatcattaataagtttcagcagcaattcgttattggtattgataatctgcatgtattcttctttatcaccctgttcttccgaattcatcaataggtcagagaagccgacaatagcatttagtggagtacggatttcgtgactcatattggcaagaaaggccgacttgagcttatccgattgttcggccaacaatttcgcctgtctcaactcctcaatcatcctctccctgtcagtaatatcatccacacgaatgacaataccgtcgatctcttcactttcattaaatacaggagtagccagcacttctacaatccggttattctccagatgaaacttgatcttttccatctgtcttgataccaatactttgcttagcacacagttgtcacaaggagaagtccgattatgagcacttttataacagcattctcctcttttataagcctcaaaagagaggctggatgaacagacagacacattttcccattgtactacataatctgtcgtgatataggccaaccccgaattagtgttattcaataccagttcattctgtcggataagtttattcagcttttctttatttttcagcagagtcaactctgtctgtttgtaggattcgatgctgattgacattccggaaacatactgataaggatgatcattgagtatggaggtttcaagtactccgcgggttttccaccattcatagtttccgtttcctctcagatcagcacgatattctatatcccattcgccgctatcctgtttgagcaccgcatccattgtatcgacaaaccgttgccgatcatcagggtgcacacactctgcaaacttttcaaacgagttgatatccaaagcattccgcccgatcttatcaaatccttcaccaaagcttaccctttgttttgacggctcgtaaaaccaggtataagcgttcattacttccattgacatagagagcactttagcacggcgcttaagatcattctgcaatttctgatcccagcggatattaagcaacagacgcttggtgccatcatagatgatattcttgcgcacgatggtatcatagctgcgtccgtctttcaatatgattctttctaccccaaaataaggctttccggtagtgaagacttccagatctgttttctgcatacgttccgcctgttcgctatccagaacgctacatacggtttcaccctcatgggtgccgaacatccgcatgctttcttcattgcagaagacataacgaaaatcatcttccacatcttttatatgaatgggaagcggtatgctgttcaaaatattctcttgtagcagcttgcgcctttgcagctccgtattgtttttacgaaaacccacatatttaattacctttccatccgtccctctttcatacggggtacagttcagtttacaatattgccattcggatgtatcggacaacctgatccggaaatctatttcatacagacaatcgcaaccactgagcatatccaataggataatctccgcttttttccaatcctccggatgaatctgtttcttatagtcttcgatagtgagtgcttgggtaggatcataaccattaagaggttcattctccgcataaaacaaccgggtacaaacatcaaattcccacaacatcacctcagcagcctgcatggccaatgccgttttttgcttgctttgccgcaatatctcttgagtatgcacagcttcagtcacatcctgtgctatgaaaagaaacttatcaatctccttattttcatccagaacgaccgatacagcaatttcaaaataactgattcctgataaaacagtcggataatgggcttttgccaggtcaaaatcatatttgaccgtaaaacggatattctctcccgcacgtagacgcctcttcatctccaccggaatattcggattctcaaagatattgattcccaacatatcttgtttatccttcactcccatcatctttagtcccacactattaatctctatcagatatccatcgccatcgtacaattccattcctacaggaagattttcataaatggtctgctgaagtcgatgaatctgagaaggggttgatgtttgtttgttcattatgtaataacttagtatatctgttttttccttctacaaaaatacacataagttacaagctaacgtacatttacagagaaatttaagtctcttaaccacttttcggaggcttttgaggccctcttccataaaatcaaccgcttttccgatagctcttcactgcccaaacattgaaaagcagtgcaaaggccagcaacgcccccagctgtggcaacaaatcaataaagccactccctttgagataaaccatacgcatcacttgcataaaatatttcagaggattaagcattgttatccattgcgcccattcgggcatactacgaataggggtaaacagcccactcatcagaatcaggatcaacatacagaaccacatgacaaacatagcttgctgcatcgtagccgaatggttggaaatgaccagcccgaggccggatacagccaggacaaatataatgaagaaacaatagatgaccccaaaatgccccacaggaaagataccataaagtgtccatgccaaaacaaagcaaagagtcaggacaacaaaaccgatcagccaatagggaatcaatttggcaagaataaaggtaaactttccgacaggagttacattgatctgttcaatcgtaccggcttctttctcccctactatatttaatgcaggcagaaagccgcaaagcatcgtaagcaacatcaccatcagggccggaaccataaacagcttataatccaaacgggcattaaaaagattctgggtgagaatatcaatccggggcagatttccatcggcagagaaagaggtggtaccgctttcagtccgtaattcttctccatagtcattgacaatggcagacaaataggaacttcccaagccacccttggtaccattcacggcattgacagccaaaagtacgttggcagcactgccattcacccaatccttctcgaagcctctgggtatttcaagtaacaggtcggctgttcccgcttcaatcgcctccatacctttttcgtaagaatccggcaaagcagtggtctgaaagtaagttgaagccgttattttatccaccagcctgcgggaaataaccgaatggtcattatcaattatattcatccggatattttttatctcaagattggccgcccaaggcataagaagcataatcatgcaagggaagataaatatcaacctcggcaggaaggagttgcggagcaactgcttgaattctttctctataagatatttaatcataacctgtttttgaatttcttgaagcttattgttatcaacagaactgccatcaaagccagaatactgacttcagaccatacaaacgagatgtccactccctcgatcatcaacttacgtacagcctgaatataccagcgggcaggcagtatatcagaaattaattgcagcaccaaaggcatactttctatcggaaatatcatacccgaaagcaacatggtaggcatcatcagtaccaaacccgaggccagcatggcagctacctgtgtccgtgtcaccgtagagataagtaatcccagcgacaacgatacaaaaatgaaaagcaacgacaccataatcagccagaacaggctgcctgccacaggcacatcgagtacataaacagaaagcaacagaatcgtcgtaagattgacaaatgacaatacaaaatagggaactgccttggccagaataataaacagcggtttcaccggagacaccaacaggatctccatcgtgccggtttccttctcccggacaatagagatagaggtcatcatggcacaaatcaacatcaagataagccccatcacaccgggtacaaaattgtaagcactcttcatctgagggttataaagcaatttcacattgggtacgacagaaggcactgacattccgggaggaagcatttcctgccggacagcagcaatcactcctgtggcatagccggcttgtgtggtagccatattcggatccgttgcatcggaaaccacttgcacacgggcatcacctgtataaaggcggtcggcaaactgctcactgaaaacgagtgccatatctatctcgttttcctgaaacgccctttccatctcttgcggagaatgtaaaaggcacttcacggaaaagtattcgctggcatccagacgatcgataattttgcgtgtgacgatgtcatttgacggatcgagtacgcccactcgtacatttttcacttctgtagtgatggcaaagccaaagaggataatctgcacgacaggcattcccaacaaaatcaacatagtccgccggtcacggaatatgtggaagaattccttttttacaaatgctataaattgtttcatatactaatcagctttacgcactgccttacgggccagttgttggaatacatcatccatcgtatcggcatgaaaatgcgccttcaacccacggggggtgtcaagtgcttcgatacgtccgtccaccatgatagatacacggttacaatattctgcttcatccatgtaatgggtagtcacaaagaccgttatcccccggtcggcagcctgataaatcagttcccagaactgacggcgggtagccggatcgactcctcccgtcggttcatcaagaaacacgatccggggattgtggaagattgaaacggaaaaggccagtttctgtttccatcccaaaggcaggcttttcacaagtgtgtcacgctctccgctgaagcccaggcgatcaagaagagcatctgtcttttcggctatttcccgatcctgcattccgtaaattccggcaaagaggcggatgttctcccacactttaaggtcctcatacaacgaaaacttctggctcatataaccgatattcttctttacctcttcggggtgagccgctacatcaaaacctgctacccgcgccatgcccgaagtaggcttactcagtccgcaaagcatgcgcatagcagtggtcttccctgcaccgtttgctccgagaaatccgaagatctctccacggtttacccgaaaggagatatgatcgactgcggtaaaatgaccgaaacacttggtcaattgatccacctcgatggcaaaatcgtttccggcgtgcacttccgtacgttccagaccgggcgggcaaagaatatggctgaaacgttgcaggatacgttccggcacatcgataccttgtatctcgccctcattgataaaagcgatacggtcgcattgacgggcttcgtccatgatcggagtggaaacaagaattgtgataccttgatccttaagatgcctcagcatttcccagaactccttgcgcgaaacaggatccacaccggtagtcggctcgtccagaaaaagaatctccggcttatgaatcaacgcacaactcagagcaagtttttgcttcattcccccggataaagctcctgccctgcgtttacggaaaggctctatttgctgatagatatctttcaccagatcgtagttttcacgaatggtcgtatgaaacacggtagcgaaaaagtcaagattctcctccactgtcagatcctgatagagcgaaaagcgtccgggcatatatcccacttgttgccggatttgtttgtagtctttcacgacatcgagtccgttcactgtagctgtcccgctatcggccagcaacaatgtggtcaatatccggaagagagtgctcttacctgctccgtccgggccgataataccgaataattcgccgggatttacagaaaaggtagcacttttcagggcttctacctccccgtaacgtttcgtcacgtcatttacagatacagctggtttcataagcaggcatcatttataacttcactcctccgtacatacctatcttcagaagtccatcgttctttaccgctatcttaacggcatacaccagattggcacgttcttcttttgtcagaatcgttttaggagtaaactccgaacgatctgaaatccatgtcacgacacccggatattccttacgctcttctcccccataatcggaaaagaccgtcacccgattgccaagcttgactagtgaaagctgttcggaagtgatataggcacgaagatacatctgatcgatatctgccaccttaaaaagaggtttacccacagcagccagctccccggcttcggcatattttgccaatacagtaccactgataggcgaaacgacgtgacacttcgccaattggtcttctacttgtgccacctggattgcgactgatgatccctgttccgtcaaactgttcgtactgttctgtaaagacgacatctgggcagtaagctgccgttcgagcaatgcgatctgtgcctcccaatcatccagttgcttctgattggcggctccggctttcaacaggttttccacgcgtctcttctctctccgggcggtagcgatctgctgccgggtagcagcaatctgtttgttgacgtccggacgttggctttcaaccgacttcatgctggcctgcaattgcagtttcttcagatagagttgtagcgtatcgatcagccctacttcttcgcctgctttcagccgggtaccttcttcaacatgaaagtacaagagtttccccgaagcttcggccgaaaccagaacttccgtagcttcgaaagttcccgtggcatcataatccgaagttctgcttccacaagcggaaagtaaagccagtaagtatagacatcctataaatttcattgatttcataactgctattctatttttgtttcagtaataagagaagtttaattattcgttgtatacttcagttgatacatgttcatcaagagctgtacttcatgcagcgccttggtttgtcgcgccaggttctcggaagtcatgtcccgaagcatatcggttacggtcatggtaccattggccactttggcttccgaggccttgcggatactggttcgcaaacggattatttcgtcatcgtccgccatctgccggcgcacactctctacggcactcccctgctgggttgcctgaaggcgggtattaaacaggaacacatcccggttactgtccaacagctgacgattggcagctatcacccgccggtcgttgcgtaaagtatacaaactaccgaagttccacgacaagcggactcctgccacatagtaaggcgagaattcatttttcagcatattaagtcccggattaccgtatgctccctgaacaaacagcccgaaacgtggcatcagctgagttttcaaagcttcttcctgcacttgtaaacgtccgttttgcgcatcaaaccatatcagctccggacggttattcgctatcaccggtatatcccattccggcaccggcttctgcaaagagatcccggcaggcatctcttcgcctgtcagcaatgcaagcatagacagataggcctgacgagaggaggtcagttctatccgcttttgccgggtattaagctgttccacactgacagcatccagatcggactggctggctatgccattctcaatgtacgatgaaatctgcttatgggtacgttccagatcttccagaaagagttggttttgccttaactgttcgtccagtaacagaattccgaaatacacttgattcacccgctcggtaagtgcatacatatctacgttcaatttctcccggtccacatccgacgatgccttgacctgctcttttctcgaacgaatctcaccgccgtcccaaatgttctgtttcagttccagcatcacctgatactggtctttcggcaaacctttgatatctactccgggaacctgtacaggcaattccgtaacctcactctgccaactggccttacccgaaagggtaaactgaggcagataacctttcgacgcattggccagattatattcttttgtcttctctatcaatccatactgccttaccagcggatagttttcccgggttttccgttgacactcttcaagggtgatctgtccatacatcagcagggcaaacagggaaaaagacaaagaaaagataactcgtttcatattcctattcctattaattcttcttttcgacaaagataggaaataagaacacgcaagcaggttccaattgtttgcaataatgttctatttgttcgattcccacataaaaaaagtatggggatgtgtcaaaatccgtatgatgacacacccccatcacatctgggaataatagtttctaagtcggtatcaccctcttctgtataccggctctttatttcttaacctttccgataaacagaacattattatcattctcagtcaaagtagccgccagttccttgagtttctgttcatcctgaccggagcatttgccggaagcgatctgtttttctatcttttcaatcaactgtcccggttccagactctgtataaagtatccgcgataaaagctatggcccggagccggaataggaaggttaccgtaaaagtcgttcacaaggcggaaataagaagaagcattcttctcagtgtctaccaagacatctccacctccctctcccttattaccccagtaggtgacaatgaaatgatggggaagtctgtaatataaatgtatcggcttctcattcatattcgggaaagtcatcgtgaatttcggcaacagtttattgccggcggaatcgtaagtgaaaagagtatctataccggtatggaagaaatcgaaatcgccacagttcctataagagaaaacctctccgtcgaagttcatcaccttcgttgcggcagttgccggaatttggtttagtatattcccttcggtatccaccctgaaagcaaggggctcaccttcctcgaaaggcatgtgtacaacagataagcttccgtcttcattcacccatattttcgctttattaatttgcatgggaagcggaatatctttaatccattgtccgttgatatcatacatcatgattcttttccccacaaaaggtgtgaagaagatatggccgttcttctcatcaatgcattcatcgtagagggtggtgtcatattcaccgggaccgcttcctacggaaccgacattatacaggaacttaccatccctgtcaaacagtttaaacacatcctggtttccctggcggataccgatatgcttatcggtagcattgataaaccaggctttgaagtatgcctcttcagaggtctcaaaacgcacgatgcgacagtcttccacaaactcgctgagcggcacttctatcgtgtcttttacagccgataagtcacataccgtcagtttgtttccgttgctttcgatagtagttacgcttccatcgtttgcttccatagctttaggttcccggggggaagtgttgcaagcggataggcatcccagcaacaaagcggaggacaggagtagataagaggttttcatgcagaattatatttaagttattaattactaacaaacatacgaatagttcgtaactccggattgtttgtacggataaatttgattccgattaaattatattaactgttttgaaacaaactccacactaccgtctgcccttcattaccccaatgacagccacactcttcagcccggccgggagatcaggctccggtccggatgtatctttcggttcgcgagagcatgcattaaatttcattcttttatgggataaaatatgctattctttatatcggacctgcttataaatcgtatattttacctaagtttgccgtgtgataaaaacagatttatggaaaagaacaaacctctggaactggcgctcgacctgctgaaacacagcaatatcgtacgcaataacgaatatcgctttgtcacccccgatttcgggattgtcatcagcttcacccatatggaaagccgcctgttccgtctgggacagccctaccggctgaaagaaggaagaattatccggggactacgcggcaaagcccggatcacaatcaacctgatagagtacaacatatatccccaaaccattgccacattcctccccggctctatcatcgaacttttggagttcacacccgattgtgattttcagatgattgcagccgacaaagatttccttccgctcctgcgaggcgaccagctctttgaatcgcatacacggcaaaaccttgtcatgcaggtgacggataccgaatggaaactgtcagatgcatatttcacgctgatatgggacacggttcaggaagtccctttccgccgggaagtggtgcagtatctgctcgcagccttgttgcacaacataaagtatatacgcacggaagaagcgaacgacacttcccgcaggttttcacatcaggaagaaatattctggcggttcatcgcattggtgaacgagttcagcaaaaacgaacgcaccgtgggcttctatgccgacaagttatgcctgaccccacgttacctgaacaccctgattcggcaggtcagtcaccagacagtaatggaatggatcaaccagtccgttattctcgaagcaaaagtgttattgaaacacagcaatctgcttgtttaccaaatctcggacgaacttcattttccgaatccctctttcttctgcaagttctttaagcgaatgacgggaatgactccacaggaatatcaaaaaaggtgaattcaccttgatatccttactgcatatttacctgccattttattgttatttccacttgtttgcttactcacacttttatcaaaacaggtataatagaggacaggattgcatacagaacgcatacaaaacgcaaaataatgcagaatcggatcggaatattcaataaagatgctcttttcctaaggaaccaaggtggtatttctttaaaagagaggcggcattagtttaaaacaaaagctctatttcattaaaacaaacgttgcatcaggtataaagaaagcgtaagaagcttcctatcgtccgcttatctacttttcagcatagacaatccctctgtttacccaatagcaatcggcgtgcaaaagcgcgatgcagacaacacatgcaacaaggaaagagaaaaacagccgccataatgcgactctacagacaataaaagtaacttattgaaaaacaggaacaggaatataagccgttatttgatagcccataaacaaactacccgatatagcgtaagctacatcgggtagaaaatacaaaacggcataatcagcactttgctatttaaactcttccaataccagtttaagttcatcgatggtcagttctcccacttgtctccacaattcgtgcccgcgctgcaagagaataaaagccggggctgtctcgatattgaacgaatctgccactgccttgtcctccacgatattcactttaatcacctcggaaacttgcttctcgtaagtccgtactacaggttccagccattcataatgaggagaccagtctgcataaaattccaccaataccagacggttcgttccggatacggcatccaattgctctgctatattcattattacactctttattgatttatatgtactctcaacaacaggcagcagaaaaagttccggttttcaggattgttaagcaaaagtgaatgtaccggaagattcaccgcagattaaccgacgacacagattcataattcaatccgatttatatcttctccgtgcattgtgtctgccaatctgtggtgaagccctaaagtccttacttatactcttcccacgacttgatcgctatatcgtcaatgtccatcgtgcagaacgcattgataaacgcgctcgccaggcgggcattagtgatcagcgggatgttgaggtcgatggcggcacgacggatcttgtaaccattgtccagttcaccggcagtcagattcttgggaatattgaccaccatgtcgatctctttcttatgcaacatctcgagtgcctggggatgtccctcttcactgggccaataaacacgggtgttctccacaccattctcggtaaggaacttgctggaacctcctgtcgcgaaaatatcatatcccttcttctgcaacatacgggctgcctcaagcatatccactttctgcttcggtgttccggtagaaagcagaatcttcttcttcgggatgcgataacccacggaaagcatagccttgagcacggcacaggaagtatcgctgccaatgcaacccacttcaccggtcgaagccatatccactcccaatacagggtcggctttctgaaggcggttgaacgagaactggctcgccttgatcccgacataatcgagttcgaacagattcttctccggcttctcaacaggcaggccgagcatgactttcgtggcaagttcgataaaattgatcttcaataccttgctgacgaaggggaacgaacggctggcacgaagattacactcgatcacctttatatcattgtctttagccagatactgaatgttgaacgggccggagatattgagcgccttggctatctcacgactgatgcgtttaatgcgacgaaccgtctctacatacaacttctgcggcggaaactggatagtggcgtcaccggaatgtactcccgcaaactcaatgtgttcggagattgcataagcgatgatttcaccgttctgtgccacagcatccatctccacctccttggcatgttcgatgaactggctgaccactaccggatgcttcttcgatacgttggccgccagttgcagaaagcgttccagctcttcttgattggagcatacgttcattgccgcaccgctgagcacatatgacggacggacaagcacagggaaacctaccttatcgacaaacgagttaatgtcctcaagtgaagtaagggcacgccactccggttgatccactccgatacggtcgagcatggcggagaatttgtcgcggtcctcggcattgtcgatgctctgggcggatgttccgagaatgtggatgttctgggcatcgagacgcagggcgagattgttaggtatctgtccgccggtggaaacaatgactccgtacggattctccagttcaaggacatccatcacgcgttcgaatgtcagttcgtcaaagtaaagccggtcacacatatcatagtcggtcgatacggtttcgggattatagttgatcatcaccgaacgccatccttccttacggatcgtattaagcgcctgcaccccgcaccagtcgaactccacggaagaaccgatccggtaggcacccgaaccgagaacgacgatagaacgatggtcacccaggtaagtgacgtcgttggctgtgccgctataggtcaggtaaagataattggtctgtgccggatattcggcagccagcgtatcgatttgcttcaccacgggaacaatgcccaggctcttacggtaattgcggacataaaggctgccgtcttccatatcgccttcgtagccgatggcacgtgcaatctggaaatcggagaatccctgacgcttggcttgcttgagcaggtcggcaggcaagtcggctatctgcttgtgattgttcccccactgatggagttcctcagaagtattcatgatattcatcaatttctggaggaaccacttgtcgatcttagtcagttcgtgcacctgatcgatggtatatccggcacggaaagccttcgagatgacaaagatacgtttatcggtcggttcgtgcagtgctttgtcgatgtcggggataacgagttccttgttttccacaaaaccatgcatcccctgtccgatcattcgcaagcccttctgaatcgcttcctcaaaagtgcggccaatggccattacctcaccgacggacttcatcgaagagccgagttccttgtccacaccgtggaacttaccgaggtcccaacgcggaattttgcagactacataatcgagtgccggctcaaagaaggcactggtggttttcgtcacagagttcttcaggtcgaacaacccgtagccaagtccgagttttgcagccacaaaggcaagcggataaccggtagccttggaagccagggcagacgaacggctcaggcgggcattcacctcgatcacgcgatagtcttcactttcggggtcgaaagcatattgcacgttacattctcccacaatgccgatgtggcggatgatgcggatggcgagctcgcgcagtttatgatactccttattggtcagggtttgtgaaggagctatcacgatagactcaccggtatggatgcccagcgggtcgaaattctccatattgcagaccgtgatacagttgtcaaaacggtcacgcaccacctcgtactccacctccttccagccacggaggctcttctcaaccaatacctgcggagagaaagagaaagctttttccacgagtaggtccagttcttcttcattgtcacaaaaacccgaacccaatccgcccagtgcgtaagctgcacggacaatgaccggatagcctaattcccgggcagcacgacgggcgtcttctgcgttctccaccgcctcgctcttgatggtcttcacatcgatctcgttcagcttgtcgacgaaaagttcacggtcctcggtgtcgataatggcctgtacgggagttcccagaactttcacattatatttctccagaatcccttcgcggtaaagggcgaccccgcagttcaatgccgtctgtccgccaaaggcgagcataatgccttcgggacgttccttccggatcaccttctccacaaagtagggtgtcacgggaaggaagtatatctggtcggccacgccttccgatgtctgcacggtagcgatgttggggttgatcaggatggtttcaatgccctcctctttcaaggctttgagtgcttgggaaccggaataatcaaattcaccggcctcaccgatcttcaaggcaccggaaccaagcagcagtactttctttatattgttttctttcattattataatgtttttgagtttggtttaccacagagtaacacagagttccacagagattattttctcttaacatcttataaacaagaaattaaaactctgtgagactccgtgttactctgtggtaaaacagattcgtttctatctctttatgcagaatatactttagagcaacttcacgaactcgtcgaagaggaactccgtatccgtgggtccgctggctgcttccggatggaactgtgcagagaaccagggattcgtcttatggcgtattccttcgttagagccatcattcatattgataaacagcggttcccagtcggtgccaagtgtattattgtctaccgcataaccatgattctgcgaagtgatgaaacaacgttccgtgccaaccatgcgtaccggctggttgtggctgcgatgcccgtatttcagcttgtatattttagcccctccggctttgctcagcaactggttacccatgcagataccgaaaataggtaacttgggattctgcatcgctttacggatgttctgcacggcagcatcacacgtatccggatcacccggtccgttggagatgaagagtccgtcgaacttcagatgattgaaatcataattccagggtacacggatcacttccacatcccggcgaagcaggcaacggataatgttcgtcttcacaccgcaatccacaagcaccactttcttcttgtccgccccctcgttataacggatcacctctttgcatgaaaccttgtctacatagttcactccactgtatacagcttccggagcactctccggttcatcgtcaaatacgatccgtcccatcatcaccccatgttcacgcaacactttggtcagctcacgggtatcgatccctgtgatgcccggcacctgctcacgcttcagccagtcagccagactctcaacggcattccaatgactgtattcctgtgagtaatcgcttacgataatagcttcggcatggatgcgttcgctctccataaacgtagccagtccgttgggctctatgctaaaaggaggtacaccatagttgcccaccagcggatacgtcagtgtcatcaactgccccgcatacgaagggtcggtcagactctccggataaccggtcatggcggtattgaacactacttcacctgccacgggcttttcgtaaccgaacgacttaccgtggaaacggctcccgtcgtcaaggatcaaagtcacattcttcattcttatcttttctttatttaagttcacctttcttttaaaattggtacacctgctcgatgtagttaataaatgcttcgttcagcagcttcaccccgcccggtgtaggatagttgccactgaagtaccagtctcccgtatgattgggacacgcctcgtgcagcccctcgagcggctggtagacaatctgcactttcgctttcgttcctttcggcgtcagcagttccaccatcttttccgaaatctcctcatcggtgaaaggagcataaatatccttcacatagtttaccatctgctctttcggcagtcccacctgatctttcgacttccggtaagccgatgcgatcacatctttcatatcccggtccttcagcaattcaattgcagctttaaaggcgatgaattcggacatcttcgccatatcaataccgtaatagtcgggatagcgaacttgcggagaagaagagacgatgactatcttcttcggtcccagacggtcgaggataccgataatactctgtttcagagtagtaccgcgaacaatgctgtcgtcgataatcaccagattgtcgataccggaacggagactgccgtatgtgatgtcatatacgtgtgctgccaagtcattccggctattgccctcggcaatgaaagtgcgcagtttgatatctttgatagccactttctccgaacggatacggcgggacagaatcacttccagttcatcgtgatccggatgatgtcccaggctcgcaatctgccgcaccttctcttcattcagataattgtccagcccctgaagcataccgtaaaatgccacctctgccgtattcgggatgaacgagaagacggtatggtcgaggtcattatcaatcgctttcaggatgttcggaaccagtttctcacccagttgttttctctccttgtaaatatccgcgtcactgcctcgcgagaagtagatccgctcgaacgaacaggctttcttctcccgtgccttattgatctgtgccgtacgcaactttccctctttactgatcaggagggcctgtcccggcagtaattccctgatttctcctatcggaacattgagtgccgtctgaatcaccggacgttcggaagcaagcaccgcaatctcgtcatcctgataccagaacgccggacgaatcccccacgggtcacgcaatgcaaagctctctccgctaccggtcagtccgcacatcacataccccccgtcccattctttactcgacgtgcgcaacacgttggcaaggtcgatgtggtcctcaatgtaatgcgtcacgcccatgccggtcaggccttcagcctcagccaggttaaagagacgttccacttcacggtcgagcctgtgccccacttgttccaacataatatacgtatcggcatacttacggggatgctggccgatggctgtgatacgggcaaaaatttcatccacattagtcatgttgaagttgccgcaaagagcaagattcttcgcccgccagttatttcttctgagaaacggatgaacataagatatcccggattttccggtagtcgagtaacgcagatgccccatataagcttctccggcaaaaggcagcgtccgtttggcaaacgcggcatcgtgcaactgttctttgctcagatccttgaagttgctttgtactgtctcaaatatctcggtgatggcaccggaacccaatgcccgctcacggaacatatactcctcacccggatttacttccagtttcacacacgccagaccggcaccttcctgaccacggttatgctgcttttccatcagcagatagagcttattcagcccgtacatccacgttccgtacttcttttcatagtactccagcggtttaagcaaacgtatcatggcaacgccacattcatgtttcagttgttccatctattctctatttagcagtttacgcgaatcaaaaattaaaggacttatcgtttttcccaagagttcaaacatatctgctccaactcttgattcgtattatttatacatgggttatcgaactcactccatagtcacactctcttcccttatcccggtcgcttcatctttcccgccttgcaacagtgtgtcagaaaaagcctctctaattatcaacgaatcagagcactttaatgtttccggcctcactgcacgagaagccgttatcttacaaaactgatgcatcgggcggaaagaagaaaaggaataaacgggtacctctgtataggtactgttacggaagatgtaactttgggatggaaattcttggaggataacggtgggagtctcgataatgccgtcagaagcaaacacgaacgtttcgccttgcggccgatatacatttaacagctggttgtcgttgatgatcgctaccccggcgctgtcgtatccgcgatacttcagtcgcttcagccccttgataaggatggggtaggcttctctcttaccaatgtagcctacgattccacacatattatccttttttgttttcgcgtgcaaagatacacaatctatatgacataaagataagctttcctataaatatttgacataaacgtacaaaaaagttgttttaataccaaaacgttaattaatctattatttcaatctcaaaaagaaagagattataatcgtttaacgatagaatggaagcaacttacagatcgaaacaaaaagtagttaattcgcttacaatccgaaacattctagtttagataagataattagtgtcaagcaaaccaaccaaatattcatcataatgaaattaaatccctatatttaccggacattttgatagaacaaccgagtattatcatataataaagctaaacagaatgaagaaacgagaactttttaacagcaaagtcaaagcaaaggggcaggcaatagaaccgtgagatggttcccggcccatcgtgtatgtcatggcagctacatgtatgcctgcggtgaagatagaggaatatttcagatgaacggtgaagttattatcataaaaacataaatcctttaaaacaattacaattatgtgtggaatagcaggaatcttcaatataaagattcagagcagggaactcaggaacaaggctctccgaatggcacgcaaaatacgtcaccgcgggcccgactggagtggaatgtattgtggcggaagtgccatcctggcacacgagcgcctttccatagtcgatccgcaaagcggaggacagcctctttattcatccgaccggaagcaagtactggcggttaacggcgaaatctataaccaccgtgacatccgcgcccaatatgccggccgctacgagttccggaccgggagtgactgtgaggtgatcctcgccctttaccgcgacaaaggtattcatttccttgaagagctgaacggcatcttcgcctttgccctttatgatgaagaaaaagacgaatacctgattgcccgggaccccatcggtgtaatacctttatatataggaaaggacgccgaaggacatgtctatttcggcagcgaactcaaagcgctcgaagggttctgcgacgagtacgaacccttcttacccggacactactatcacagcaaggaaaggacgatgaaacgctggtacacccgtgactggatggaatataaagaggagaacgacaagcaggcggacagccggtctcccacccggcagattcaggacgcccttgagaatgccgtacaccgtcaactgatgtccgacgtaccttacggagtgcttctttcgggcgggctggacagttctgttatctctgccattgccaaaaagtatgccgccaaacgcattgaaaccgatggcgcgagcgatgcatggtggccgcagctacactcctttgccatcggactgaaaggtgcaccggacctgatcaaagcacgtgaagtagccgaatacatcggtacggttcatcatgaaataaactacacccttcaggaagggctcgatgccatccgggatgttatctatttcattgagacatacgacgtaactaccgtccgtgcttccacaccgatgtatctgttggcacgtgtcatcaagtcgatgggcatcaagatggtattgagcggtgaaggtgccgacgagatcttcggcggctacctttatttccacaaagcacccgatgcccgtgcctttcacgaagagaccgtacgcaaactgtctaaactgcatctatacgattgccttcgcgccaataagagcctcgcagcatggggtgtggaaggacgtgtccctttcctcgacaaagagtttctggatgtggccatgcaactcgatcccgaaataaaaatggctccgggaaaagtcatcgaaaagaaagtcctgcgcgaagcctttgcggatatgctcccttccggcatcgcctggcgccaaaaagaacagttcagtgacggtgtggggtatagttggatagatacgctgaaagagattaccgcaacggctgtcagtgacgaacagatggcacatgccgcagaacgttttcccatccacacccctatgaataaagaagagtattactaccgcagcatcttcgaagagcacttccccagtgaaagcgccgcccgcagcgtgcccagtatccccagcgtagcctgttcgacagccgaggcactggcatgggacaccacattcaagaacctgaacgatcccagcggacgtgccgtaaaaggagtacacgaagaagcatattaaaaaagggtgtagctccaacaggcaaagggtgtagccatcggacgtcctgggtgtagccccgacagacggatggctacaccctgtccacggaagcgtttctcctattcatactcccgttttcggtacacaggaatgtattgtaaagagatttaaaagaattttatagctttgtttaacgcagattagcatccttatccggctaaattgcgttactttttatatctttgaaggcgaaccaaaaactgaaatatatgaaaattaaaaaacttctgtttgcctctgccctgcttttctcagcatacaatgcctctgcgcaaactcaggtcattgcccatcgcggattctggaaaaccgaaggttctgcgcaaaacagtatcgccgccttgctaaaagccgactccatcggatgctacggttcggagtttgatgtatggctggcagccgatgaccagttagtggtcaaccatgaccccacatttaaagggaaaaggatggaaaactcaccttccaccgcactgacagccatcaaactcgataatggggaaagcctgcctacccttgccaaatacttgaaagcggcacaaccgctacacacccggttaattcttgaactgaaagcacacagcaccccactccgcgaaacgaaagccatcgaaaaaatcgttgccctggtcaaagacatgggactggaggaacggatggaatatatcaccttctccctgcatgccaccaaagaatttatccgcttggctccggaaggcactcccgtctactatcttgatggtaacctgtcacccaaggagctgaaagaactggggtgtgccggtccggactatcattacaccgtattccgcaaacatcccgaatggattcaggaatgccatgatttgggcatgaaagtgaatgcctggaccgtgaacaagacggatgacatgaaatggctgatcgatcgtaaagtagatttcatcaccaccaacgaaccggtacagctgaaaaatctactgaaaaaataaatctcggtatccaatcattttttacattctcccttgagtgagtatctacccgctcaagggattttttttcgggcccccgaaaaagtatgtttggggacatgcctataataattcaaaaccaagtcttccaatatttcaaattaattatctacatttacggtcatgcaaaaagacatggcatttacaaacagaacgtacacaacataaaaaaacatctacaatgaaaaaaatcctattcttattaacgatccttgtttcagttcccgctttttcacaaagcgccgatgaacgtataggagcttttttaaatcaagcggattggttcggacttgaaaaaaactatccgatactaaaagactccatgcaggcggatttcctaaagctaatgtccgaggcactgatcggctattacttcaatcgtccggatgaagccctgcaaagcatccataaactactggtcaaccaccaagccgagattggcggtcaaaatgcacttaacatggctatcctcgcatgtcagattgatggtctcaaagggaattatgccacagccgcacaaaactcgcgaagcattatggaacaactcaaacagcaaaatgcagaacaaggaatgtacaaaagcctcgaaggtatctgttatttctatgatcagttgaagaacattccggctctgggcatcacatgtccgcaagaggatatcatcattcctgtcgatatcgagaaagtgaagttaccgacaagcatcgagcccaaaggatggcgcggtacgacaattctaatacctgtgaccattaacggaaaaacctatcaatttattttcgatacaggagccggaacaagctacatgtcgcaacgcatggctaaagaaacaggtgtacgcattttaagtgactctttggtaataaattccaatttacccggagccatgacgggaaatttcggaactttggagaatatgcaaatcgggagcattactttccataactccctcatcaccatagcaccccccaatgcgtttgacagtattatgatagttgacgcggttctcggtatggattttatcggcttattcgatgaagtccgcatttatcccaaagataaaaaaatcgtttttcccaagagctccacacctctcccatcttacggacgtaacttgatgaaggttgaccgtgcactgaagttgaaagcccaggcaaacggcgaaacacttatgctgcatttcgatacgggcaacagcacagccggattgttttatcagtattacgaaaagcataagaccgaattcgagagtatcggcaaaaaagaaaaaataaccggtggcggattcaatcatgtcgttacaaaagatatattacgtttgccttcattcgatatggagattggagatgcaaccgcccacttaaaaaatctcgcagtggatattacccccaacggcatcccggccgaagatgacggaaacatcggcatggatatgatcaatcaatttgattgcgtaacgatcaatctaaaagacatgttcttaaaactcgaatagtgtctcaatcaggactactgtaaacaggggggcttcggacaatgccgtcagaaaagacgaaacagagtaccgaagccctcattatttcttctttttcttttcggaatcccaacaatgaaaatgcaaaattcatcctc

SEQ ID NO: 5035 - DNA, 15183 bp, Unknown
  gut microbiota DNA sequence
ttaaaaataaagatgaaaaagttatttgcattattattcatttctatgatttcgggaatgataatggcccagatcccggaggtttcgggcactattgtgtttaaaaaggacggacagcccgtcgttggggcattggtgagcgtattaggaacagatatcagcaccatcacagacgtcgacggacgttttactctaaaagaaatccccgaaaaggcacagagaatacgggtaaaatacatcggtatgcaacccaaagacgtaaaaataagacccataatgaatgttaccctcgacttagagaaaaaactggcattctttatacaagccggggttggagtcagcggatacaatcttgaaaacaataacgaagacatctatggaggcaacaatcatttatacatccagggcggagtcggattgaactataatttctcaacctatttttcattgcagccttctgtcaatgtggtggccaaaggttgtaagaacatgggcagaagaggctccgatggccaaggagaaatcactgtcgaccctgtatatctggaaatccctgtcctgatagccgcccgcttcatcatatcggatttcggccgactgattttcaatgcaggcccgtatgccgccatcggaatagccggcaaaggaaaatacactgacgaatgggaggggacaagcatgaaattcgatctgtttagcggtgacgaagccgttctcaaacggttcgatgcaggagtgcaggcagggtttgcttacgaaatcaaacacatcggtttctcgtacactttcggatacggactcctaaaaccatttaaagaatggaataaagaatggggagcgactccacacaacatcagccacaacttcggacttaaatatatattctgatacagtccggatagcatcatagaaaaagaaagcacttgagaaagggtgtttcataactcaccacagattacacaaaacgattttaatctactgataaccaatactatttatctgtataaatccgtgtaatctgtggtgaatacgacttttcgacacatctcctcttttataaaaagatccaattgacctgaatcaatccatccctcccattacaaaattcccccaaaggacacagaacaaaatcgctttattacagtttattaaaatacgaagtattcttatttcgatccggaagcaaaaacgagcaaaagtattgcagaatggaagacagggtaaaataaatagatataagacatgctttttataaaaacaaaagtcaaaaagacatatctttgtgcagtaacaatgcaaaaggatacataaatcaaccaatattgataaaaatggcaagagcgattcaattcaccaagatgcatggaacagggaatgattacatctatgtaaatactctcagatttccaatcgcccgtcctgaaaaggcagccatcgaatggagtgcttatcatacgggaatcggaagtgacggacttgtgttgatcggacactcggataaagcggatttcagtatgcgcatattcaatgccgacggttcggaggccatgatgtgtggcaatgcaagccgatgcatcggcaaatatctctatgaatacggactgacctccaaaaacgttatcacactggacaccctctcgggcatcaaaatattggaactacaccttgaaggacggaccgtggaaactgtaacggtcgacatggggataccactggaaaccggtacgattgacttcgatggcgaatttccgttcctttctacccaagtgtcaatgggcaacccgcatctcgtcacttttgtggacgacatccggatcgtcaatctttcggagatgggaccgaagctggaaaaacatcctctgttccccgaccgtacaaatgtagagtttgcccagataacgggagagaatacaatccggatgcgggtttgggaaagaggatcgggcatcacacaagcctgcgggacaggtgcctgcgctacagccgtagccgcacacctcacgggacggacggggcgaaccgttaacgtagtaatggacggaggcacactgaccatagaatgggacgaagcaacaggccatatatctatgaccggaccggccgtaaaagttttcgatggaaccatagaactgagagaatagttacccataaaatcaggtatcaacccaactgaaaagctaaaacaagaacaatatggcattagtaaacgaacattttttgaaattaccgggaagctatctgttctcggacatagcaaagaaagtcaatacttttaaaataacgcacccaaagcgggacatcatccggctggggatcggtgacgtgacccgtcccctgcccaaagcctgtatcgaagccatgcacaaggcagtcgaagagatgacatcggccgaaactttccgcggatacggccccgaacaaggatatgacttcctgatcgaagccatcatcaaaaacgattatgctccgcgcggcatacatctttcacctacagaggtatttgtcaacgacggtgccaaaagcgatacgggcaatatcggagatatcctccggcacgataacagcgtaggtgtcacagaccccatttatccggtctacattgacagtaacgtcatgtgcggacgtgccggagtattggacaccgaaagcggaaagtggagcaacgtcacttatatgccctgcactgccgaaaatcattttattccggccattccggagaagcgtatcgacattgtatacctctgctaccccaacaacccgaccggtacgacgctgacaaaggcggaactgaagaaatgggtggattacgcattggccaacgacaccctgattttgtttgatgcagcctatgaagcttacatccgggaaccggacatcccccactccatctacgaaataaaaggggccaagaaatgtgccatcgaatttcgcagtttctcaaaaacagcaggcttcacaggagtgcgttgcggatataccgtcgtaccgaaagagctgacagcagccacgctcgaaggagaacgcatccccctgaaccggttgtggaaccgccggcaatgcaccaaattcaacggtacgtcgtacattacgcaacgtgcggcagaagcgatctacactcctgagggaaaagaacagattcaggaaacaatcaattactacatgaccaatgcccggatcatgaaagagggcctggaatctaccggcctgaaagtgtacggaggggtgaacgcaccctatttatgggtaaaaactccaaacggaacaagctcgtggcgcttctttgaccagatgctatacgaagccaacgtagtaggaactccgggagtcggattcggccccagtggagaaggatacatccgcctgacagcatttggcgagcgggatgattgtatcgaagcgatgcgacgcatcaagaaccgactgtaatgacagacagtcatgtcaccacagattacacggattttcacagattaataatttatttcattgaaaatcagattaaaacatctgtgttaatctgtgtaatctgtggtgaatacttgccccatctttcttctattattcgataatctccgcatcctcaatctctcctttcaggggagtcttgggacgacggcgggcaaacttgaaccagttgatcagctcggagacggcataaaccaaactactgacaccgataatcataaaggccgtattacgtgctccggtaggattaaacagggctacgatacccgctatcaggatcaagaccggtatcacatagaaacctcccggaacgggcgtccaacgacgtgccatcgaaagagaggcaatctgctgcacacctcccataatcaggataaagcccaacaggaacatcagtacgtcggcaaagaaccccggcatcgtgaccagccaaagtccgaatagcagactgcccactccctcgatggggaaacggcgggacacacccggttccggctttgttccgaaatagccgatcagcacaataaatcccggaatcaggaacaggacgccgatggttatgacaatatagttaattgccgcatccggccagagtaccagtaccagaccgatgacaagcgcacaaatagtgcggataagagaataattcattgatttcatatcttacatttttttaacgggatatcccgcatacattctgcgaatatacgtgtttctgtctacatataaaaagaacaaatgaattttgtaataagttcatagcaagattgtaatatctattacatcatgcaagcgtacttttgcaaaaaaataagtaaactcttatccgaatgaaatcagacgaagcgaaacgtaaaaagctttatgtagaacgggacatcagttggatgtatttcaatcaacgcattttgcttgaagctgcccgcccggaagttccgttactggaacaacttacctttctgggcatttactctaacaatttagacgagttcttccgcgttcgcgtagctacactgaaccgcattgtagagtacgatgacaagaacatccgtgaagagcgtgacacggccgcacgcaccttgaaacagatcggaaagctgcacaatcaatactaccggcagtttgaagaaacgttcgcttcgatcatggagaagttaaagcaagaaaacatccacgtcatcaaagataccgaactgacaccggaacaggaacacttcatcacttcactctaccggaaccggctgaatgggtctaccaatccgctctttcttactaaaacgtcccgtcatacggacgaccagaccgatgaagacatctaccttgccatccgcctgttgcgcaaagacagtgagggaaaagtgaaaatgaaagattatgccgtcatcgggctccccaccgccgagttcggacgcttcatccgcctgccggattcggaaggcaaaacctatctgatgtttctggacgacgttatccgctactgcttgccgatgatcttcataggcatgaattatacggactatgaagcttacactttcaagttcaccaaagacgccgaaatggagatagacagtgatctgcgtacaggtgtgctccaaaaaatatcgaaggggatcaaaagccggaaacggggcgaaccgatccgtttcgtctatgacaaagagatgccgaaagatctgctgcgaaagctgaccgaccgcctcaacgtggataaaaacgacacccgtgtagcaggcgggcgctatcataacttcaaagacctgatgaagtttcccgactgcggacggtccgacctgaaatatcctgcctggcctcccgtcttcaaacaggaactgaacgggacggaaagtatcctgagactgatcaggaaacaggaccggtcgctgcattacccctatcaatcgttcgataccgtgatccgtgtattgcgcgaggcagccatcagcaaagaagtgaaaagcatcaagatgactctctatcgcctggccaaagactcgaaggtagtgaaagctctgatctgcgccgcacaaaacggaaaaaaagtaacggttatcatcgaattgctcgcccgtttcgacgaagcgtccaacatcagctggagcaaacgcatgcaagaggcaggaatcaaagtgatattcggagtggaaggtctgaaaatccactccaagctggtacatatcggaacacggtttggcgacctggcctgtatcagcaccggaaattttcatgaaggaaacgcacggatgtataccgatttcaccatcatgacagcacatcgctccattgtgagggaagtagaccgggtattcgacttcatagagaagccctacctcccggtgaacttcaaggaactgctcgtgtcgcccaacgatatgcgcaaacggctgacagccctgatcaaccaagaaatcaagaacaagcgacagggaaaagaggcatacatccttgccaaagtgaaccatattaccgaccggatactgatacagaaactctacgaagcttcgacagccggtgtacaaacagacctggtggtccggggcaactgctccctggtgaccggcatcccgggagtcagcgacaacatccggatcaacggcatcatcgaccgttatctggaacatccgcgcatcttcatcttcgccaacggaggggaagaaaaatactatataggatcggccgactggatgccccgcaatctggacaaccgcatcgaagtgcttacgcctgtatacgacaaagtgatacaagcagaactgaaacgtgtggtctgctacggacttcgcgatacggccaaagggcgaatcgtggacggaagcggcgagaacaagacttgggaaaacagcgatgcacctttccgctcgcaggaagaattatacaaatactataaagaatcagaatgaaaaaggtaaactatgccgccatcgacattggctccaatgccgtgcggctactgataaagagtgtaaatgaagagggttcgcccgagggtttgttgaggaaagtccaactgatacgcattcccctccggctgggcgaggacgctttcaccaccggagaaatatcagaagggaaagcagaaaaactgatccggctgatgaaagcctacaagcaactgatgaaaatattcgaagtttcggattaccgtgcctgcgccacatctgccatgcgcgatgcacgcaacggaaaagaaatcacgcgcaagatagaaaagaaaaccggtatccgtgtcgaaatcatcgacggtcaggaagaagcgcatatcgtctacgataaccacatcgaacagctttttgcttcgggccagaattatctgtatgtcgatgtcggcggcggcagcacagaaatcaatctgatctgtgactccgaactcaaaagttcacgctcctacaacatcggaaccgtgcgcatgctcagcggcatggtgaaaaacgaagaaaaagagcaaatgcgaaccgacctccaggcattggctgccgaatatgctcccatacagatcataggatcgggaggcaatatcaataagcttttccggctggcggacaaaaaggataagaaacagtctttcctcccgattgaatcgttgaaggaaatctgcgaaaccttgaaagcgctatcaaaagaagaacggatcaagcagttcaaactgaaacccgaccgggcggatgtaattgttccggcagcggaaatttttctggaagtggcaaaacaagtaaatgcaacggggatcacagtcccgacaatcggactgtcggacggtatcatcgacagcctctataccaagaatatgcgcatggaaacggacgctaaataaaacgggtcaccacagattacacagattatttatcgtgttgattcatggtataaaagaatctatgcaaatgtgagctatgattcaccacagattacacggattttcacagattaataatttatattcatcgggaattaaataatctgtgttaatctgtgtaatctgtggtgaaatgcaaaagcctatagcgagcttttcagtatttcctttgcaaccgctccggtgacatcttcattctcgccatatctcacgccacgttcattgaagcggcgttctatttcgtcaattgtttccatgccgatgccctcttcacttaagcgggtggtcaatcccagtgaacggaaaaattcttcggtgcggcggatagcttcatcgatgcgttcgtcacggcttccggacgtaatgcccagcaccctctctccatattgcagaatcttgtcaccttttgctttacggagcacacgcaacgtaccggggaagacaatgaccagtgtgtgtccgtgggtcaagccatgcaacgcagtcagttcatgcccgatcatgtgtgtagcccaatcctgagatactcccatggcgataaagccgttcagtgccatagtggccgacagcataaaatcggacatcaactgataatcgtgctgattctcacggatcttgggagctatttccatcaaggtctgcaaaatgccttccgcccaacggtccattacccggctctgtcccggagtagtcatatattgctccatcacatgcacaaacgtatcggcaattccacaagccacctgatggggcggcaaagtaaacgtcacttccggatcgaggatagagaacagaggataattggaatagaaaggatatttttctttggtttcatggcgcgaaatcacggctccgctattcatttccgatcctgtggcaggcagggtaagaacagtggcaagagggacggtgcgggtcaccggacgcccggcaagtaccagatcccaggcgtcgccgtcatacagcagtccggcggaaatcagcttggtgccatcaatgaccgatcctcctcctactgcaagcagatagtccaccttttcctcctttccgagagcgatggccttacgcaaggtctcgatggaagggttgggttcaattccccaaaactctacagtgaaatgattcttcagtgcttctttcacctggtcatatacaccattctttttcacactaccaccaccgaaggtaatcatcacccgtttgtccgccggtatttcttcactcaagcgactgatcatcccgcgtcccatgatcagttttacgggattctgaaaaataaaattatccataggttattactttatatcgtcatttgtacagaattcaatctgatacaaaaataatcgcttctttccagaaaacaaaaagattcgcaaggtattccatacggaaaaaagacttaagcgtttcccgcaaaagacttaaacgttttttgaaaacgcttaaacgtttcaccgaaaagacttaagtgtttagtatgaaagattcaagtctttagtttacaggcagccaggcattgatatcttcggctacaaaaagccagtaaagcagcaataggatgaatatgacaacggcaatcgcaattaaaacttttctttgtttcataatgttggtttctgtttttaaataaattatatctgagaaacaatataaataacaaaatgtttaaaaagagtttccttttcaaacgatcaataattcttccttacatctcatgtacatataatgtacatctgttagggccaaaagtccaagggccattctatgcgccaattgaatcggagaagaaagataaaaagacagcaataacatctaataatcaaatagttacaaataacaaccaacaaaaacagtggactaaaaaaagcagaaaggtgaacagtaaaaagaatacgatttcaagtacatgtataatataatatattttacatttttcaaaaaatgaagcgaagtgtccccatgactcataaaagtttcttttcacaacacactaacttcctttaggggggtagactggcacatagagtggcccttggacttttggcccttgattttaatttcgaaaaagaattaaccatctaataattaataaattaaacttaaaaagaagccaaaacaatgtggtcacgaatagctaaacgaacaaccactacagatgggtgtacaaagagcaaaaatacatacaatagacactttaaaaacaattcgtttttgggggacaaaacaaaaaataaaaaggagggcaataaaaaaaagaaagattttatttgttattccaaacaaagtatctatatttgcccccgttaaataacaattagcaatgatgacaatgcaagtaaatacatattggtggtggcgcccgttacaactccgacagtcgtaagggagcagcgctcgtatgtatatacctcattaaagatataacagaatttagaaagagccctgtcgcaacctgcgacggggctcttttttttaaccccaaatacaaataacaaataaatataggattatgaaaagttttttagttgatcaggatggctattacggagaatttggaggtgcttatgtacctgaaatcctccacaagtgtgtagaagagttgcagaatacttatctcgacgtaatagagagcgaggacttcaagaaagagttcgaccaattgttgcgtgactacgtaggacgcccttccccactctatccggcccgccgcctgtcagagaagtacggttgcaagatgtatctgaaacgggaagacctgaatcacacgggtgcccataaaatcaataacaccatcggacaaattctactggcaagacgcatgggtaagaaacgtatcattgcagagaccggtgccggacagcacggggtggcaacagccacagtctgtgccctgatgaacatggagtgcatcgtatacatgggcaaaacggatgtagaacgccagcacatcaatgtagaaaagatgaaaatgctgggagcgacagtcgttccggtcacttcgggcaacatgactctgaaagatgccacgaacgaagccatccgagactggtgctgccatccctcggatacgtattacatcatcggttctaccgtagggccgcacccatatccggacatggtggcccgtttgcagtcggtcatcagcgaagagataaaaaaacagcttcaggagaaagaaggacgtgactatccggactatctgattgcctgcgtgggcggaggaagcaacgctgccggaaccatctatcattatatcgacgacgaacgggtacggatcgtattggccgaagccggcggcaagggaattgaaaccgggatgacggcagccaccatccaactcggaaaaatggggatcattcatggggcacgtacgtttgtgatccaaaacgaagacggacagattgaggaaccttattccatctccgccggactggactatcccggtatcggcccgatgcacgccaacctggcagacaaaaaacgggcaatggtactggctgtcaatgatgacgaagccatccgtgccgcttacgagttgacccggctggaaggaatcattcctgccctggaatcggcccacgcattgggagccttggaaaaaataactttcaagccggaggatgtagtcgtactgacggtatcgggacggggagataaagatatagaaacttatctgggataaatcatttcaccacagattacacagattaacacagatttttaaactctcgtttgtggaatatcaaaaaaactctctgtgaaactcggtgttactctgtggtgaatccaaaatcaaattaaaaagaaatgaaattatgaatgccttcaattataccacccatagcaagcaagtcctgggcgacctgcacactccggtaagcatttacctcaaagtacgtgatatgtatccgcaatccgcattaatggaaagctcggactaccatgccggagaaaactctctctcgttcatcgccctctgcccattggcaagcatcggcatcaacagtggaatcgtaaccactacttaccccgacaatacccgccgggaagaaccgctcagccaatcgttccgggtagaaaatgcgctcaaccgctttatcaaccggttccatgtggaaggagacgacaagaaattctgcgggctatacggctacaccacgttcaatgccgtgaagtattttgaacacatccccgtgaaagaaagtcatgacgaacagaatgacgctcccgacttactgtacatattatataagtatatcatcgtcttcaatcactttaagaatgaactcactctggtagagatgctggctgaaggagaagaaagcaatttgtcacaactggaatcggccattgaaaaccgtaactatgcttcatacaatttctctgtgaccggccctgtcaccagcaccatcaccgacgaagaacacaaggcaaacgtacgcaaaggcatcgcccattgcctgcggggagatgtcttccagattgtgctttccagacggtttatccaaccttatgcgggtgacgacttcaaagtgtatcgtgctttgcgaagcatcaacccctctccctacctgttctatttcgatttcggcggctaccgcatcttcggctcgtcacccgaaacgcattgcaaagtggaaagcggacaggcgtatatcgacccgattgccggcaccacacgccgcacgggagacaccatcaaagacaaggaactgacggaagctcttttggctgatccgaaagaaaacgcagaacatgtaatgctggtggacctggcacgcaacgatctcagccggaattgccacgacgtacgggtagtattctacaaagaaccccaatactacagccatgtcatccatctggtgagccgcgtcagcggtgccctgaacaacggagcaaatccgctcaagacctttatcgacactttccctgccggaaccctgagcggtgcacccaaggtacgtgccatgcagcttatcagcgaaatagaacctcacaaccgcggagcctacggaggttgtatcggcttcatcggcctgaacggagaattgaaccaggcgataacgatccgcactttcgtaagccgcaacaacgaattgtggttccaggccggaggcggtatcgtagcacgcagtcaggacgaatacgaactgcaagaagtcaataataaactgggggccctgaaaaaggcaatagacctggccgtaaaactaaaaaactgaagtaaaatgaataggttcaccacagagtaacacagagttccacagagttttaatctcttgtttataggatgtttacgagaaaatatcttctctgtgaaactctgtgtcactctgtggtgaatcccccaaacaatttcaaaacaatgaacaacgagataaatacccttaacagacagaaaggagcgattctccttctggacaattatgactctttcacctataacctgctgcatgtggtaaaagaacagggagtgaccgacattgaagtattccgcaatgacgagataacactggacgaggtggaacgtttcgataagatcatcctctcgccgggaccgggcataccggaagaagccggactgttactgcccatcatccggaaatatgcggcaaccaaaagtatcctgggagtttgtctgggccatcaggccatcggcgaagcattcggagccacactcgaaaatctgacggaagtatatcacggggttcagactccggtcagcatattgaaagaagatatcctcttcaggggattgggacgtgaaattcccgtaggacgctatcactcctgggtggtgagccgcaaggatttccccggatgcctggagatcacggccgaaagccgggagggacaaatcatggcattacgacaccggacgtacgacgtacatggcattcagtttcatcccgaatcggtgctgaccccacagggaaaagagataatcaagaacttcttaaacaaccgataagcacgccttatgaccgcgcatgcgtaacattgaaaaaacaaactatatgaaacagattctatacaaattattcgaacatcaatatctgggtcgcgacgaagcccgcaccatattgcagaacattgcacaaggcaaatacaatgatgcacaggtggcctcgctgatcaccgtcttcctgatgcgtaacatctcggtagaggaactttgcggatttcgtgacgcactgcttgaaatgcgggtcccggtagatttgagtgagtttgccccaatagacattgtgggaaccggaggggacggcaagaataccttcaacatctccaccgcggcttgcttcacagtagccggtgccggatttccggtagtcaaacatgggaattacggtgccacttccgtcagcggagccagcaacgtgatggaacagcacggagtaaagttcaccgaccatacagaccgcctgcgccgctcgatggagaagtgtaacatcgcttatctgcatgcacctctgttcaacccggctctgaaagcggtggcaccgatacgcaaagcattggccgtacgcacgttcttcaatatgctgggcccgttggtaaaccctgtcatccccacctatcaactgctcggagtatacaacctcccgctgctccgcctgtatacctatacctatcaggaaagcgctacccgctttgcggtagtacatagcctggacggatatgacgaaatctctctgaccgacgaatttaaagtggcgacatgtggaaacgagaaaatctacactccggagagcctgggcttcaaccgctgtcgggaatccgaactcgacggtggaaataccccggaagatgccgcaagaatatttgacgccgtaatggagggaacagccaccgaagcacagaagaatgtggtgatcgtcaatgcggcctttgccatccgggtgatttgtccggagaaaccgatagaagaatgtatcgccctggcacgggaatcactggaaagcggcaaggcacgggagactttaaagaaatttgtcgaactaaacggatagaaaagctatcacccatcaaagaaacatgaaagatatattatctgaaatcatagccaataaacgttttgagatcgacctgcaaaaacaggccatcccatcggaacagcttcaggagaagttatctgacgaggtacagccgggctactccatgaagcaggcactggcctcttcggctaccggtatcattgccgagttcaaacgccggtctccgtccaaaggctggatctatgaaaatgcatgtccggaacaagtcgtgccggactatatagccgccggtgcttcggcgctttctatactcacggatgaaaaattcttcggaggaagcctgaaggatattcgcacagcacgccctttggtgaatatcccgatcctgcgcaaagattttataatcgatgaatatcaactgttccaggccaaaattgtgggagccgacgccatattgctgatagctgccgcactggaggccgatcaatgtcatgcgcttgccgcaaaagcccatgaattgggactggaagtcttgctagagattcatactgccgaagaactgccatttataaataaggagatagacatggtaggtatcaataaccgcaacctgggcactttcttcacagatatagagaattctttccggttagccggacagttgcctcaggatgcgctgttggtatcggaaagcggcatctcggatccggaaacagtgaaacgcctgcgtaaagccgggttccggggattcctgatcggagaaacgtttatgaaaacccaacagcccggacagaaattaaaagaatttataaacgacctgaattcaccacagagtgacacagagtctcactgagaatttttcaaagaaaacat

SEQ ID NO: 5036 - DNA, 84766 bp, Unknown
  gut microbiota DNA sequence
gtgaacccaactttaaacccaaaatgatgaacgacaaattaataaaagtctgcgggatgcgcgaagctgaaaatattcgtgaggtagagcaactaaaggtggacatgataggctttatcttctatccgaaatctccccgttgcctctacgaacttcctgcctacatgccggtcaaagcaaagcgtgtcggtgtctttgtcaacgaagacaaaaaggagatcgaaatatttgccgaccgtttcagcctggattatatccagctgcatggcaatgaatcgccggaatactgtcattcgctccgggctaccggactgcggctgatcaaagcattctccattgcccgaagaaaagactttgaaaacatcggaacttacgaagagtcctgcgactatttcctgttcgacaccaaatgcgaacaacatggcggctcaggaaatcagttcgactggagcatgttaaacagttataaagggaaaaagccttttctgcttagtggaggcatcaatccatacagtccgcctacactgaaagagttgcgccatccacaattggcaggcttcgatctgaacagccgtttcgaaacaaaaccgggattgaaagatgtggaaagactcaggcactttctggaggaactgaggaaataacccgcatctgcaccaaccctatattcacataagacagtaacagataaaaataaaagtatatgaacagaataaaccaacttttcgacagcaatcccagggatttgctatccatctatttttgtgccggctatcctactctcgaagggacaaccgaagtaatccgtactcttgaaaaacatggagtgaacatgattgaaatcggtattcctttcagcgatccgatggctgacggtatggtgattcagaatgccgccacgcaggccctccgcaacggaatgtcactcagactattgtttgaacaactgcacgacatccgtcgggatgtaaaaatcccattaatcctgatgggatatctcaacccgatcatgcagttcggctttgacaacttctgccggcaatgcgccgaatgcggcattgacggagtcatcattcccgaccttcctttcaaagactatcaggaacacttccgcaccattgcagagcggtatgacgtgaaggtaatcatgcttatcacccctgaaacaagtgaagaacgcgtacgcgagattgatgaacacaccgacggattcatttatatggtttcatcggctgccaccacaggagctcaacaagactttgacgggcaaaaacgtgcttactttaaaaagatcgaaaaaatgaatcttcgcaatccccggatggtcggtttcggtatcagcaacgaggctaccttccgtgccgcttgcgaaaatgcctcgggagccatcatcggcagccgttttgtcactctgctccatgaagagaagaacccggagaaagcaatcacacgcttaaaagctgttttgaatttatcgtccaatgatttgagataaatcaatccccccaaaaagatgtatccaccacagaagctcacacagatttgcacagataaatttcattagttatcaatagactagctacacaatatggaattctgtgtgaacttctgtggtgaatgctcccccctccccgccgttcatcatcgaaaaccgtttgtcattgaaagtttattgtttttcattcgccgttcatcacttaaaattgttatctttgtcgggaaaatagcaaaaatgacacagatatgaaagcagattacccctccgtactacttatttatacgggtggaactatcggaatgatagaaaacccagaaaccggtgctctggaaaattttaatttcgaccatctactaaaacacgtacccgaactaaaaagattcaattatcgtatctcttcttaccagtttgatccccccatcgactcctcggatatggaaccggcattttgggccaaactggttgaaataataaactacaactacgattcttttgacggctttgtgatcctgcacggcaccgacacaatggcctatacagcttctgctctcagtttcatgctcgagaatctgagtaagcccgtcatcctgaccggctctcagctcccgatcggtacgctgcggacggacggtaaggaaaacctgattacagccattgaaatcgcggcagccaaaaatccggacggtacggccatcgttcccgaggtctgcatcttttttgaaaaccatctgatgcgtggcaatcgcacgactaaaatcaatgctgaaaactttaacgctttccgttcattcaactatccgccactggcccgggtaggtatacatattaaatatgaacccaacctgattcgcaaaccggatttgagcaagcccctgaaaccacactatctattcgataccaatgtagtaatactcacgcttttccccggaatacaagagggcattgtttcggcactgcttcatgtaccgggactcaaagcagtggtactcaaaactttcggatcggggaatgctccccaaaaggagtggttcatcagagaactgaaagatgccaccgaccggggaatcatcatcgtcaacatcacccaatgcgcttccggcgccgtcgaaatggaacgttacggaacaggaatccaattactgcaggcaggggtgatcagcggctatgacagcacgccggaatgtgcagtgaccaaattgatgttcctcttaggacacggactcgataataaagagatcagatacaagatgaactcttgcctgatcggtgaaataactaaaagggtcgaataaaaaatgttttactgatcgcttccacacaacaataacctgtttgaattccgcttttccgtctcaggggagtgaaagggctcttttcaaagcatgcccctccccttgataaattttgttaattgagttatagatagttattaactaaaccatatacctcaatttatagttgtatatttgtattgcatatttgcaaatattgagcaaaacaaacaggtatgaaaacatcaattaacaaactatgtattgctgcgtcgatactggttacggctgcgggcatatccgcttgtgtagacgacaacaaaactctctatgatccggaatataagactcctaatccgatggaggaaatcagtgcaccgaccggatttgactggtcgtcgacccatgccattaaattcaatgtagaggttaacgacgaatttgacggacagtattattataccgtagaaatagtagataaaaacccgcttgaagcaacgacagaagagccctataataccttagccaaaggagttgccaggaagggagaaacttatcagaccgaagtggtatcttccaaagataccaaatatctttatgtccgtcagactgacccacgtggcagagaccggattaaacaggtagaaatcgacgagtcaacctcccatattcagtgctcttttacaggtacatctgcaatcaaaacgagagcttttgcaaccaccagggggaataacggaggaattgacattccgaaaagaacagaacaaagctatgacatcagccgggctatcccggtaacaagtccttcacaggttctgcaaggaggccaaacctatattgttacgggaaacttttcaggtaaattcacagatacctctctcagcaactcgaacaaagcgaccgtctatatacaaggaacctgggaactggcacaggtcacccaagacttcctggatattattgttttgaaggatggaaagattaatggaaaatatctgatgctgcagaatacaagtactttaacaatccaatccggagcagaagtatctttatccgatcaattgatatgtaacacatacagcactatttgcaatttcggtgatctgaaaacaaagaatatgaaattgaacaccaacgatattctttacaatggacacaaaacggacatcacgaatagtctggatgcttcgcaaggaggcaacatccacaatttcgggaaactggatgtagagaatacgataaagctaaatacgccttccattgtatataatgcgccagaatgtaagatagaagctaagacatatgaagctgcgggaagtacgaatgtgaacttcggcgaaatggaatttgatacttatgatagcggtggagcgggaggttcgctatataacaattgtatgctgtttgtagagcacatgaaggcaggcggcatcgtttatctggatcatggagtgatagccgaagaaaaagaagacgatgaagagaacgaactcttcgaagaagccgatgatattgagttctatgacaatgctaaagtgactttagcgaatggttcgatgataaaagccaaaaatataattgctaaatccggtttatcggttaacggtgaaggcaatgaaacctctttattaaaagcgaccgaaaaagtacaaatccaaaattgggatgtccgttttaatggcagattgtgtatcactggaaagatcagttgctccaatccagacatgtatcaggcaggaagtgaagtaaccttctccgaaagtccggacgtaatcattaccggctgcaacggaaaagcagaggtacccgatccggctcccgagccttccgatccggtgttccccatcattgtagatgacaatcataactatacatatctgtttgaagaccaatggcctttgtatggagattacgatatgaacgatatcgtactggaggttaaaaagaggaaaataagcatagataaacacaataaagtcaccgaattcgatctgtctgtcgaactacgtgcggtcggtgcgcagaagacaattgccgcagcgatcatgtttgatgaaattccggcatctgccgtcacacaagctgtcacctacgccgacaattatcagccggtatcttttgagctgacagacaaaaacatagagaagggacaagagtatgcagtagttcctctattcgacaatgcacatgcattgatggaacgtccgacaggctcgtttgtcaacacgatatccggaagtgacaacaatcaaaagaatacccagaccattcatttcacactcagattcgactcgtctgttgcaccaagcagtgatgctcttaatatcaataacttgaatatttttatcatcacagacaggggaagcaaacgaaaagagatccacgtagccggataccggccgaccctactggcaaacactgagttattcggagggaataacgacgcctcttctctcaatggaaagaagtattacatcagtaaagataacctggcttggggaatcatggttccgacccaatttaagtggccattggaatatacacagattcaaaaggcatattctcaattcgccggatgggtcaccacgggcggagcggataacaagaaatggtggaacgattttgataacacaaaagtgttccaaaccaataaaaattaaaacaaacaattgtgtgagccgggcaataaacgtttcccggctcttttttatgtctaaaagagagtcttcatataaaaacacttcttttagagaacattgttacaaaaatattatatatatttgcagtatagagtaagcatactccatacatatcaagagaacaaacagcaagacaaacaacataactcttactaatcacattatgagaaagctaatattacttgttgacgataaagaaactatcgctaaggtcgcatcaatctatttaggaaaagattatgatattcaatattttcccgaccccatccacgcacttgaatggctacatgaaggaaaaacacccgatctgattatatcggatatacgcatgccgctgatgagaggggacgaatttctacattatttaaaatgtaatgagttgttcaaagacatacccgtcatcatgctttccagtgaagaaagtacaagtgaaaggatcaggctgctgcaagaaggagctgtagattatatcctgaaacctttcaacccaatggaactaaaaatacgtgtcaaaaaaatcatagaataaatgttacatctcatttatattgggagacatgctgatactatcgaacaattctctaagatagctgaaggggcattttatgccattcaaaacagtagaaaagcaagcgaatttatcgataaaatacgtgagaaatatgacatagtgattcttttcgagcaacggatcatctcaaaagacatccccgaaatccaatatctgagaaagaaatttccgggagtatatatcgctctcgttacagagggaatcaataaggaagaccgacccgcttacctgaaggccggtatcaataattcaataccatttaattctacccccgaaacttttaaagacataacggagtttatgatgcggcgcaagcagcaaaagattaatgatatccacaaaaaaggagcaaatctacagttcttcaagctccctttatggaaaagattatttgatatcgtcttctcttctatcgccatattatgtttgtcgccaatactgataattacggctgtagccatccgcctggaaagtaaaggtgctgtggtatacaagtcgaaacgggtaggaagcaattataaaatattcgacttcctgaagtttcgctccatgtacactgacgcagacaagcatctgagagacttcaaccagctcaatcaatatcagacagaagaagaaccggaactgagcggagaagagttcctgatcggtgacgatatagaactgaacgaagaagagaccatgttaatttcagatgacttcatcatatccgagcaaaactatacaagcaaaaaatcgatagaaaaaaagaatgcattcgttaaattggagaatgatccccgcatcaccaaagtaggacgcatcatccgcaaatacagtatcgacgagttgccgcaattggtcaatatattgaagggagatatgtctatcgtaggcaaccgacccctcccgctttacgaagcggaactgttgacaagcgatgaatatattgaccgctttatgggaccggcaggactaaccgggctttggcaagtagaaaaacgcggaagcagtggaaagttatctgccgatgaacgtaaacaactggacattaaatatgcccaaacgttttctttcttactcgacatggagattatcctaaggactttcaccgcgtttatacaaaaagaaaacgtataaccgtacgatatcggatcatggatacttttattcaaacaacagatttcatcttatttctatgcttcagtctgatgactgtttatctgggagttttggcaatagcagcttctctaagaaacgacactccatatccccaagcaggaaaaagacatagattcgccattctggttcccccgggtagcacttccctccccttaccccattatccggaagagctatatcaagtattcacttatgaagatctgacagaagctatagccgcactgaatgaaaatgatttcgatggtgtagtcgtcctgggagaaaccacccggatcgaacctgccttcctggaggaaatcaacagcgttttcgatgccggcatccaagccattcaactccgtcacatcacggaaaaacgttcgacccgcaaacaatactttcaggctctgaacgaagaaatcactcaggccctgttcgggacaggggcaacccgcctgggagtgtcatcggctttatacggtgcggacatggtattggacttgaaatggctgaaaaagaatcaaaagagccgcaagagcaatctggaaagaagattagtccggcaaggtattttcgtggaatatctggaaaaagtgaaagtttatagcagcgacatacgtgctccacgctataaagtaagattttccaaagcgctccgcgcacttccggaagcaatattcactgcccactgggattattgcaacaaaatactcagatggattcttccttcccggaaaacgaatttaataagtattgcacttattgcaacggcattgctttgctacgattggagcctgtctctgaagtggtggagcttactttatatactgatgttcatcatttgtctggctatcccggattatctggtacgacaaaaaacaaaaaaataaccaactctcccgattatggcactgaaagagaaaatcaagcagaatcccgcactgaaacaagctgtacaccgttttattatgcatccggtaaaaacacgtcccaactggtggatacgtatattctctttcctctacctaaaacgtggaaaaggctctgtgatttaccgtagcgtacgccaggatcttcccccattcaatctcttctctctcgggaagtattcggtagtggaagatttttcgtgtctgaacaatgctgtaggcgacctgattatcggggaatatacccgaatcggactgggcaacaccattatcggccccgcaaccatcggcaaccatgtaaatctggcacagaatgtaaccgtaaccggactgaaccataattatcaggacgcagacaagcggatagacgaacaaggagtaagcacacaacccatcacgattgaagatgatgtatgggtaggtgccaattcggtgattttacccggcgtgacactgggcaaacattgcgtagtagctgccggaagtgtagtcagtcgctccatccctccctactctgtctgtgccggcagtccggctaaagtagtcaaacagttcaatccggagagccgaacctgggaaaaaacagtctcaaaaaacggaaagtaactacatatagtgagatactctacataatataccctaaaaaggggattgtggcaaccgccgaaaccgcctatctttgcagtatcagaatttaattaattagtcataattttattacgtagccacatttgagtaaaagaaacaatcccgccgaagtgatttcgtcgggattttgttatgaatctatttcaccacagattacacggatcaatacagattccatcatctgattctcaatgaaataaattatttatccacataatttgcagtgagttccgagcataaaaaaaacgagtaaattcttaagtagaattacccgccccacatcagaaaagccataaaggcttttctttattacctcaaaattcctaaaaacacaatcttctttttacctaaaaaactttcaataacctattcttcttttacctttaaaaatctttacctaattgaaaatcacttgaaactttttaataccttaaatctttatctaatacctaatattctattttaccttaaatagcaatttctcaactgcactgcaaaggtacggattttttcggattcagcaaacgcttttatgttttataacattcttttagagctataaatccttcacatcactaagctcaaccagcttatttacaatagcatagatggtcagaccggccgcactgtgtatttgcaacttcttgctgatgtttctgcgatgtgtaatcacagtatggatggagaggaacagcttttcggctatctccttattggtcattcctttcaccacacaaatcacaatttccttttcacgctggctcaaattctcttgactgtcctcctcttcttcgggctcgatattctgcaaaagattgattttattggccaatgcctccaaatcatcgaaaatagaaaaagacgcatcgtatttactgagcaacgaagcatcgataaacgaactgaccaacgctactacccggattcctttgccggcagtctcttcacggaaacgcgccacatcaaaaaagtcaccaaaggtgggattgacaaccagtatgtcaggaaactgcgtacgcagacaatcattaagcgcctctaccgacaacaactccaccggttgaatctttaaattgggtaaacgtttcagggccagtgtcagaccactgcgtatgatcaccgaagtctcggcgacagctatacggattgattcattatttttcattttctcgcatcctcctttccaatttcagaatggcaggaacaaacagataatcttctactttgcaatgtgattcaagtccctcttcgcaagcatatatatcgaacaaggcagcattcagcacattggtattggccttggcaggacagtatttaataataatgttcttcagttccgttaggcgttcccctacctgatcgtgatgtttcgagaaggtgctgatctgataattcttgggagcattgccatgaatcagcgtatctacatacttaaacactgtcttttcttcatactccatgtgcttgcgtacctcccgcatatatccgtcaaagaactttagaataaggaaggagacatcgtcctgcgaacagtcaatggcttcaatcagtttcctccggatggcaggcaggcagtaatcaagaaaataaatatgcgcctgtctcagataatcgaccagggccggtatcgaaatatcgtcggcactgccgtccatacgcgagaatccctcggccatgaagttaacgactaccagaaacgtctgacaatcgacattattcatttcgcagacttctttcaccgttttgtcaccaaaccccagcgaaagtccaaaccggctcataacttgtaaaagagaataattatcaccgataaggtcgatcattttatcggtaggcttatatttttgcagtttatccatcaaacaccttatttatattacgggtgcaaagaaacacaatattttaatggtatacaatcactataaataggtattttcactataaacagactaaaaaaggacaagaaatgactaaacaggacggtctgcaagcaacaaaatcacagattattattcatcgttcaccactattttttacctttgcacaattcaactaaaacataaacaatatgacaaacgaactggaactgaaatacggttgcaaccccaaccaaaagcccgcgcgtatctttattaaagaaggtgagttgcctatcgaagtcctgaacggacgccccggatatatcaatctattggacgccctcaacagttggcaattagtgaaagagctgaaagaagcgaccggacttccggcagctgcttcattcaagcatgtaagcccggcaggtgctgcggtagcagtagaaatgaacgacacgttgaagaagatttatttcgtagacgacatggaactctctccgatggcaactgcatacgcccgtgcccgaggtgcggaccgaatgtcatcatacggagactttatcgccctttccgatatctgtgacgaaccgactgcccgaatcatcaaccgtgaagtatcggatggcgtgattgctcccggctatactccggaagcacttgagatcctgagaaacaaacgtaaaggtacatataatgtcatcaagatcgatccggcctaccgtccggctcccatcgaacataaggatgtattcggaatcacatttgaacagggacgaaacgaactgaagatagacgaaagcctgctaaaggaaatgcctacccgtaaccggatcatcccggccgatgcccaacgcgacctgattatcgcactgatcactttaaaatatacacaatccaactctgtctgctatgccaaagacggacaagctatcggcatcggtgcaggacagcaatcacgcattcattgtacccgcctggccggaaacaaagccgatatctggtatttgcgccaacacccgaaagtaatgaatctgccctggaaagaaaaaatacgccgtgccgaccgcgacaatacaatcgatgtatacatctcggacgactacatggacgtgctggccgatggtgcatgggaacaattcttcacccggaaaccggaagtgctgacccgtgaagaaaaacgtgcatggctcgatacccaatcgggcgtagctttaggatcggatgctttcttcccgtttggagacaacattgagcgcgcgcacaaaagcggtgtgagctacattgcccaaccgggaggttctgttcgtgacgatcatgtgatagaaacttgtgataaatatgacatagcaatggcctttacaggtatccgcctgttccaccattgataacaatcgcccccctcccctccccatttatagtgatagctaccctgctatttccattataaatggggattttctatttctgccggaccgcctatctttgccgtatcatttaaaaacaagatcagaaatgaataagattggagtattttacggttccacaacggggactaccgaagatgtagcccaccggattgcagaaaaactgaacgttcccaatggtgacatccacgatgcctcaaaactgaacgacgagttagtgaaagaatatgatgtattagtactgggcacctctacgtggggagcaggcgagcttcaggatgactggtacgacggtatcaaagtgctgaagaaggctgacttgtctcacaaattcgtagccctcttcggctgtggcgattcagactcttacagtgacaccttctgcgacggtatcggcatcttatacgaagaacttaaagacacccactgcaccttctgcggggcaaccgatccgtcgggctacacattcgactcttctgttgcggtaatcaacggcaagtttgtaggacttcctttagatgaagtgaacgaagatggcaaaaccgacgagcgtatcgctcaatggactgaagccttgaaaaaagaatgtatcaactaatttaaaaactccaacgaacgttatggctatcgaacgaaaggttccgggtgaaatacgaattttcctgaaccatgtatacgaattcaagaagggagtacgcaacatggtactctatacgatgaacaaggaacacgaagcctttgccatacgccgtctggaaagacagaatatcagctacctgatacaagaagtaaacgccaataagataaatctgttctttggtaaggccgaatgtatggatgccatacgacatatcattattcggcctttaaaccatctcactccggaagaagatttcattctgggcgccatgctcggatacgacatctgccaacagtgcaaacgctattgcaacaaaaaagggaatataaagattgccggctgagttgcagcttgctttcagtacaggtaacaaggttcatcaggccaatgcattaatgccatagggagatgaactattagaaagtctcaccatcacagggtaacacagagttccacagagaagagaataacagaaaactccgtaggactctgtttcaatttgtggtgaaatcaattcaccccccaaccgaactacctctctaccggatacaacacacctactgcctctttctttcttcatttcataaagaatgttattcccgtagtattttccgttggaaatttgttttataagaaaacaattaattaagaacctgtttaaattttcctggaataaacttttatatggtttttatcgatctgttttgagtctctttttcgatctatttccttgttttcatgcgtcacatagcccgctatgccttcacagagacaagagaatatccttgaaaataaatctcaaaacaatctcgaacaaaattcagacagattctaaaacaccctgaaataaagatgattaaagcatttttgaaaaagaaccgactcacatttatcggtctcgtcattggagctgtaggaggattcctgtattggaaatacgtaggttgcaccagcggaacttgtcccattacctcttcaccggtcaacagtaccctttggggagctgttatgggcggcctgctcttgaatctgtttaaaacagacagtacccctaaaaaaacaaactaatcacacctcttatgacaaccacaaacgaacaagaacaatcgagagcctacatacttgcaggcctctttacgctctcactacgtcttgtagtgggatggacttacttttcggctttctggcgacgcctcgtactcgagaataagctgataccggacagtgccggatacatcggagagaagtttaaccatttccttcccaattcgataggtatccgcccggtcatcgaatatctggtatcgacacctgatatgttatggtgggcaatggtgatttttactcttgtagaaggtatagtcggactgctttatatgttggggttcttcacccgtctgatgagtatcggcgtattcagtctggccaccggcattctcctggggtcaggatggttgggaaccacctgtctggacgaatggcagatcggtattctgggtgtagccgccggtttcaccatcttcctttccggcggaggaaagtactcggtcgaccatctgatagagcggaaattctctttaaaaaagaaagcagcctggctgtcatggctgacttccggagaattgcctgtaagcgccaagcgatttgccaatgtcagcgtggcaggtgccatcgttatcttcacactgagcctatataccaaccaagagttccacaatggcgtctggggcccccttcataacaagtccgtcaaaccgaaaattgaaatatccgacgcacaaatagagaacaactctctgtcattcagtgtttatcgcgttgaaggtgtcgatgtatacggttctttcctgattggtatcagcctgaaaaatgccgatggagacattgtactggaaaagaaaggagaagaattagcagacttcccgatcggaaatatcaataataaatacattgcccgggtagctccgggtaagcacagcctggtaatcccactcggaagcaaagcgacccttacaatcgatgatacggctataggcagtttgcccaaaggaaagtatgaattagtactgaccgacatcagtggtatcacctggaaaaaagaaatcatccattaataaccattaaaaagcagaaaaatgaaaaagagcattcttatccccttcctattcatgggactgttggctttcgcatcttgcaaaggaacatccgagaataaatcgaccaccgctacagatacggtacaagccgaaaagccacaatcgggcaccattcacctgacccgtgcggaatttctgaaaaagatagccgactacgaaaaccattccaaagagtggaagtatctgggtgacaaaccggctattgtcgacttctacgccgactggtgcggtccctgcaaaatggtggccccgatacttgaagaattatccaaagagtatgccggaaagatttatatctataaagtaaatgtcgataaagagccggaactggcaagagactttggtattcagagtattcctaccatttggtttgtgccgatgaaaggcgaaccccaggtcaatatgggagctttatccaaggagcaattaaaaggatacatcgataaagtattattgaaacaatgattcctgacgcggcctctccttccaacaggtatcgaggccgctcttcgtgtttctagcgcttctccgatttatgcactttcatatagccgtcggtcagtgttttcataaatgccacgatgtcggcttcttcttcctgtgtcagtccgaggtttcccagttcctccttgttcacggtggcaggatactcggcaggaggaaattcatcactcacatcccgcacgttatagaaatgtacaatctcctcgagtgtcttaaaatagccattatgaccatacggagccgtcagttcgacatttcgcaacgtgggtacacggaacttgccattttcgctttcggcattcacaatggctcccagtcccagatcaaccgaatccgcagttaacagaaaatattctgccgctaccttatagtgaggatgatccggcaacttcggaatgcccagattatcataagtatgatcggtaaacagcgtgcgatgcgcacgtttgtcacggtccagaacatgacattcggcacactgccccttatttttgaacagctccttgcctctcgcttcctggtcggtcagctgataatttccttttttatacgcatcatacttggatgtaaagggattgatttccctggatgcctgataagcggccaatgcgtccgtaacatgggcaaacaaagaatcggcatgttctgtctctccatatatctgcactatccggttataatacggagtccgcttcactttctccgccaccatctgtttgtccctatttcccatttccacaggattcaagagcggaatgcctgcctgatcctgcaaggagggagaacgaccgtcccagaacaaacctcccacgtagttttcatcatcatcgtcataatgcaattcgggcacaaaggccgcatagcatactgacatggagttgcgctgggaaaagagtccttggacggctccttcggatatggcacgggcttgttcatcggcaaatcccttggaagaagcatggcaggtggcacacgattgcccgggtggctcggacagtaaagtatcatgaaaaaggagtttgcccagcgcttccttctcacttccggttttgtgagacggatgaccacaggagatgcagacagtgcccagcagtgtgacgaatagcagtttatgtgtcttcatagttgtaaaaacagagatatggttatttcagaggtcaaagatacattattttccggaaagagataaaaaagtccggtcgaaatcacatcgcccggacccctctaaacagcttctcacgaatctgttccacgaaaatatactatagttataaagaatttctatccttcttccggccagagttctccggcaaccatttcagccattttcaatgtatgccactgtttttcttcagcagcttcataagattccgaaggcaacacttcggcattgggtatgcacagcgagaaacggtgcgaaggaatataacgtatgatctggtcgatcttggctctcaactcttccagctcttcctccacgggataatgggaaagtacgaagccaaacacagattgcttctcgcggatgaaccacaacaaacggtttttgccgcaacattccgaatcgtaatcgaggaaaaaagcatgaatcccctgtagcgagaaaagcatctcggtaggtgaatgaaaagcaatgaaaagatcggcgggaagattctccaatgccatgttgttgacacggatcgcgttatccgtcaccgtacgcgttgcatcatcgagttgcagataacggcatcccgatctgtacagttccataatcagtttctgatacgtctgtgcaaggtctaccaacagtatctcacggtcgggatagaccgaatcgagttcggtccggtttgcgtctttcattaattctgccagcaggcgcgaaggcgcaggaagcacttgcttagctattacatctccaccggtcaccccggtaagaaagacaaaatcatcgagcacaggatggtgatgtacatcgatccgaccggtcagttcgacagaggtctttctgtcatcccggaaccggataccatccaatccgcacataaagtcgagcggccacgcatcactgcggaaacggccgtcagtgaccaccttcaacccttctgccttcagtctgtctaccagattccgtatctcggcatcttcgacagcacgcaaggtcagcaggctgatttgttcgtttcgatattgctcacgggcttctctcaatgcagcgggcaaaagaaaagtaccggcaacgtctactttgaacggaggaactacgttttccatacgttctacgtttttaatattgattgttactatcgtgcttcgctcctaacccacgaggaaccaagacttatcagcgagagtggcaggtcttctgacttagcttccattccgaacgccttcccgactacacgagtcagtggccaaagagtatcctgtcggaatgtttataataaagcttcacagcagcgggactgtccgggagttacacccgattcccttttaatcgcccaaagcaggaaagcttcggcgaaccaatctgccgacaaatataaaaacaataaatcagatatttgtgttcaacatgatacttttttcaatcagagcctccgtccgggcaaaataaaggctctgtccggtcggaacagagccttcatctcgaccgaacagaagctcggtttccattcaaatgtaacggggttaatagctgatctttattccggcgaaatagcttcgcggagcagccggaccataaatatatccggagtcacgctccactccctggtcgaaatcgttctgataagcattgaacacattctgcacacctgcactcaattgcaggtccaccgatttataaagtttgaaatcataggccaccttgactcccatatcgaagaaatcgcgcgtattcaccgccacatccttgtcaatataaccggccatgtgctgcaccagcatcgatccggtgtacgtgcccgacagggataatgacagaggcttgatcggcatatacgttgccgtaaagtacccataggtattcggcgtacggaaaatcttcttctcggccggtgccgtttcgctccacttttccggttcgtcataacggctctgttgcaacgtgactcctgcctgtaactggaacaaagagagataagccatttttccctccatcgacagtcccaatactttggctcccgatccgttacggcgctctttgataagaatgccgtcccgctctccaatgttctcgagtacaaatacatccgacagtctggtataaaaaccttcaaccaggaagtttacctgaaaagcaccgaaacgatgatacatatcggctgaagcgctgaaactctgagatttttcctctttcagattcttggcacgctcaatcatcgacaccgttccgcctacattctcaatatgcaggtcttcgtcgaaagcctgcggggcacggaagcccgacgaataactcaggcgaagattaatgtcctcggaaggattgaaacggagattggcacgagggctaaagataacatggttgatcagattgtgcttatccagacgtccgcccaacagaatgctccatttctcgtttttccattcattctgcaaaaaagcactaccaatatttaccgtctgcttcgtataacggttgtatccccacatatcgtccttcaggttatcccggttatactccaatcccgcagtcaggtcggcaggcatgaaaaggcatttaccgaaactgtacacatattgagaaccgccgataaatgtcaggtccgttgtctttccataggcgttctggtcttttttgctgccataataactgtcgcggtccgtatgctgtgccgaagtataaacggtcagacggtgtttttcattcggagcaaaataatcgaatttcaagccaccaccgttgatggagtgctgaatctgctcggcaatgtcagcctcgtgaggcggacggttcagcaggtttccgccacgacgaaactcctgtaagtgatgatactcaaatgtcaacttagaataagtgcttgtcttgaggaacgaacggaagccgactgtctggtttttaagtttcggcatttcggaataaccgtctccatcatgatcgtacgcatcccggtgacggttctgtccgaacacataaagtcccgcccgatgatcatcggtcaccagcgatgcgttcagcgaagtattattatcgaaagacgagctgccgccgatagaagtaagagtatgtgccaactgccccgaattgcgcaatggctccttggtgatgatattaatggttccggcaatagcggacgaaccgaacagggcagaacctccgcctcgcatcacctctacccgctcgatcatattggcaggaatctgttccaacccgtaaacaccggaaagggcactgaagatgggacgcgaatcgataagaatctgtgtatacggaccgtccagtccattgatgcgcacctgctggaaaccgcaattctgacagttcgtttcgacccggacaccgggctgaaagttaagcccctgcgaaagtgtaggcgagtttgtattctcaaacatcttcatatctaccacattgaccaatgtaggtgccaagcgccgtttggtcacgctgcgattggccgaaactaccactccgtcaagcgccacggcatcttcttccaactcaaaattttcttcaagtgtctttcctttcctgagactgacattgcgactgatggttttataccccaccgaactggcttcgagcacaaaattcccttcgggaaggtttttcaggaaatagtgtccggtggcatccgtcaccgtaccgatggtagttcctttcagggcgattgttatataagagaggtgttcacctgtttttttatcgagtacatggccgatgatattggcatcagacgctttcagttccggatgttccggttggtcggccatagcaggcaacagggcacagcacaggctaacgaggaaaaatatatatttcttcattttcatttttggatagtagaattactaaataaatttctctaaataatgcagtgagagtgagagagatgttctatctcccggcaggaggtgcccgcaaagataccacgcccacgacggacgaacagtatcctgccctatccggacgccacgaaagggtatagagcagacaagcaataaactgaagagagagaaaaaagataccggctccggtagttaccacgtggttcagcaaatgaatcaattgaaattcgaccgtggtgtgactatggggagagtctttcttaaacgggtgcgaatggacaatggtcaccccattcactacatgcgagtgagtaaagagtgtgatacctgccatgtacgatataaatagcacaggcagaaaccatctcattattttcaggcacccttgtttcatccgtttagttttgtggcaaagataagaagtattccataatggaacaatccctatttatagggataataaatgtaacaccgcatccggacagattgttcacacatttttaatcttattggatattttcgatctccaggcggcatatataaaaaaacggggtgtgtcattattcacagatgacacaccccgtttccatagatacggccgatggacgaatccatcccagccgttattccgaacgaatccaggtcagtttatgccagatgctttccaaaggtccctgcttatgcgccttcagccaccatttacagaaacgaacctgcaaaaggaagaatgcaaagcctatcagcaggctgacggtataaccgcaataaggggccagatacagcgcgaacgggaaataaataatagctccggcaatagactgggagatgtagttcgtcagactcatcttaccataaaaccgcaaatcggctgtcagcttcctgaatttctccgtttgatatagcagcacgaacgaagcgaccaatactattgtgaaagcaaacttttgccacatatccatcactacccctaccgtctggcgtatcatatccggctgtccggcatccatcaattgcactttcaactgatagagaggaccaaacagaacggcactccagatcagggctttcacccaaaagcggatcgtggcctccgaagcaacgaagagttgctttcgtccgatcaacattcccagcagaaacagtccggctgtctgcaggaagcgtcctgcacctattgcccagaacaggctcgctttttgtcccaaggttacatttccccagataaacttccagaaatctccttccttggtatattcggctacttcgccatacatctgaccgactcccaggtcgggcaaagaatgggcgggattgaaaagattcatcacgtaatgataccattccaccggttgcagcagcaggaaaatggccaggataaataccgtacggtcactccacttacggacaataaacaggaaaatacctaccacacagaatagcagcaacacatctcctgcggggaagaatgccgcattcaaagtggcaaaaccacccaacaggagcagacgccaaagaaaacggtaaccaaaatccttgcctttcttctgttggttggtatactgtatgtagaacgtcaatccgaaaagcaaagcaaaaatagcatacgctttcccggcaaataaagaaaatgtcacactgaataccccttcgtcgaggatattgagccatcccggttgggaggctgcggcgggatatacaggaaagataaagtgctcaaggttatgaaccagcaggatcgccatcacggcaaaaccgcgcaatgcgtccactacctcgatacggggagtttttgaagcaattgtttgtcgcatgtttttgttgtttttataatgtgattattgaattagggacaaaagtaataaaatgaatcagaaccgggaaaaataaagtcaataaagtagataaccttacagcactccttacagaaacaaactcaggcctcaactcccggcctgcttcatgctatcctttcttcgtcctgagaaacagtaccggaacgacacacagcaacgtgacgataaaggcgataaaaaaatcgtcgttaatggcactgatgtatccctccagatcgatacgcttcaatatcagcatctccgccacttcttgggctgtatcgggcgttctgccccctgtatgttctataaaccggctcaaggaatgaagggtctgccggtatacgtctcctgtatagttgagtgcttcgccatatcgctgcgtgtgaaaagccgtacgctgtgtcaacagatgactgaagatggctactccgaaacttcctcccatctgccggacaatgttcgtgatactggaagcctgtgccatattactgttacggatattcaccagcgacagggtcagcaaaggggtgaagagcaatcccatacccagcccgcgcagataaagactcagcatgatgtaccacttctcggtcagaaaagatagataatagttcatatagaaactcaaagccatcaacaggattcccgacacgataaagaccttggggttgatccgttgcatcagtttgccggacaaaggagaagccactccctggataatccccactggcatgaaaaacataccggcctgcaaagccgaatagcccagattgtcctgtaaatagagcggaatcaaaaacgtactgccgaacatgccgataccaaaaacaaacagaatcaggttggacaacgcaaagtccctgtcgacaaacaggcgcagattgatcagcggtgtcttgacggtaaactcgaaataaaggaaaagaataaaagtgaccactgcaatccacatggcaccaagtactacgggactgctccatcccatggaattggttgacgaattgacttcggaaagcccgtacatgaagacaggcaagaagatggctgaagtgatgaaacccgggatatcgaaaggaactccggttcctttcacatgttccttttgcacaatggcagtgacgatcagggccaggattcctatcgggatgttgacataaaagatatagttccagtccatataatctaccaggtatccaccgatagcaggcccgaaagagaccgaagcggcagaagcgatggaccagaaccccaatgccgtcccccgttgttcgggagggaatacatcgctcacaatagccatgccgacaggaaggagcatgccgcatccgaaaccttcgatcacccgccagaagatcagctcttcgatggtagatgaactgccacacatgaaggaaccggccgtaaatacgagtagggacaagaaatatatctttttataaccgaagcgttcggacagccatccggcagcaggaagaatactcgccatcgaaagcatgtatccggtcagcacccattcggccacattgatatccgcaccgagcgtacccataatcacaggcagcccggtattgacgactgtagaatcgagcaccgccataaaggtgcctatcatgatgttgcccaatacgatccatttataagaagaactttctttcattctttgacgatcttcacgttagcagacatccccgaaagcagtcggagattggctttcagtttctctttaccttctacccggtcgattgatatcttcaggggaatccgctgggccacctttgtatagttgcccgatgcgttatcagggggaatcagagaaaactcggatgcagtattggcaccgatatagaagattttgccgtaaaacgtcagtccgggataggcgtcgagggtgaaaagagcctgttgtcccatacggacttcatcaaacttagtctcctgcaagtagacagtcacccagagtttcttgccctcgttcaaggtaaagatattctcgcccggctgcaacagatcgccgggaaccacccactgcttggctatcaagccatcgacaggtgaaacaatccggtaatcttcagtcatcgtgctgtcgagcacagccagcagttcacctctcttcacgctgtcaccctcctgcttaagacagcagacaaaggggccatcgcacggacggacacattcacacgactgccatccaggtttgcatctatggtagatacgtattttcgatagttccaccaccagacaacggctacgacaatagcgatgataagcaatatcaccagccagataaactttttcttatcagagggattcgatgtatttgcagcgtccataattcttgagattagttacaagggtgtaaacaaaatccgcaagaaaaggtttgatggctgtgggaaaggaatcgctgccggctatggaagacacggagggcacagagcgctattcctaagaatagttatgctctgtgccctccgcagtatctttttatggtcagccggcttagtacaccactgtcgcaatcacctgtataaacaggatcaggaataccattgcaatcggatataccgtcgcataagctacactcgggatattgctgtctaccatcgagtcggcagccgcaagtcccggcgtactggtcataccgccggtaatggtacccagcaaatcgagcaagctgatcttaaacaccagacgtccgacgaacacagcaatcagcatcggtactaaagtaatggcggcacctactccgaacagcagcagaccgctctcctggaaagtagcgaccagattcttacctgccgacgtacctacctcggcaaggaaaagcaacagtcccaactgacgaagcaattggttggcaggtccggacatagaccaaaggataggcccggtcttgcctattgcgctcagcagcaaagccaccatcagcacaccacctgtcaatcccggcgaaaaggataatccgcccgggaacgagatattgagtttgccaaacagaactcccagcacaatacccatagcaatggggaagaaatccgtgtcggaaagcttcttggcattattacccagcagacgggctactcccttgatgccttctttctcaccaacgaccatcagtttatcgccaaacttcaatgctaggtcgggtgacggagagaggtcgataccgcttcgacggacacgtgtcacggtacaaccgaaattcttcatcaggttcaggtcgcccaactgcttattgatcatatccttcttggtcaacagcaatgattcgatttcttgcgtgttttccaacggaagttcaccttcttcacgttcacctaccaacacggcaagttgtgtcagagcttcttcgctacccactgcctgaatgtagtccccttcatggagtaccgtatgggctgtcggaatggatatctcttcctgatgcttcaggcgtgagataacggctcctgtcatggcacgtgcattgatctgcatcaggctacggccgaatacactcggattcgtgatacgataaatgcaggttcccagttccggaaactgtccgcgacgctctatctcaagacgacgggcctctttgtcaaggtcgatacgcattatcttcggcagcaacttcacaaacaggatgacaccaatcacgccaaacggataggcaataccataagcgatagaagccagcggagagttggtgctgtcgatggcaacggccaaacccggtgtactggtcagcgctccggctaccagccccaccacactcggtgtatcgatgccaaacgcatactttaacccgacagcagtcagacaggcagaactgatgataagcatggtaataatgatcagcgtcttccccttactgcggaaagaatcgaagaatcccggccccgcctggataccgatggtaaagataaaaagtaccaatccgaaattccccagttccttgggaataatcacaccgaaatgcccgaaaagaagggcaatgaagataaccgccgacacgtcgagcgatagccccttaatcttgattcttcccaacatgaagcccaacgcaacaataaggaagagagagaaataagaggagtgcaataaatcagtaaacataaataaaaaggttaattttagttgttatgtgcgcaaaggtacgtaaaaaactgttttcgactatagcaaaagaagaagttattttcttcgccaaaccccaaagccttcacataaagaaagcggaacggatatttcacaatcaaaaagacagaaattaaaagattctgctaacgcaccctctatttaaaaacgggcatatagggcaaccggaagacttagcagccaacttcaccccttccagaagtcctgaaaacggggttctgtttttcacttttacagaaaaacaataaggatagacaaaaaagggagtaaccatccggccagtatgccgtaaccatacttaccggatgaagtaatcatccggtcaaaatggtataacctaaccggaaaaaggctttgaaaaagactgttttactctacttcgtccacgcttccgaacggcgaccaagtgtcagaaagcaacgatataggtaataagagatccatatttcacatattacaaccgaatcagcgacagatagcagttcatgcggcacattaagtatccgaacacaaaatcgccaacggcatttcccggtgtttttccgaacaactcccgacgaaggatacaaatacgggattctacaagattttaaatatcaatttgacaaattgctcttttcttcgaaaatatactttaagaaatacaatcctccccttcgcaacatgctcctttatactcaaattctaaagtggcatgagtgatcccgacatgttccagttcatgcttaacctcgcgctttacctcttccatacggcgtagatcgcctatcacgatatgggcagtcaatgctgtttcggtagtgctcaatgcccagatatgcagatggtgataactctccacaccgggttgctccaggataacccgcccgatcttttcactatctattcccagcgggactccgtcgagcgaaaggcggaggctgtcgtgcagtaagctccaggttgaaatgacaataatgacggcaatcaccaggccgatgatcgggtcgacaagtgtccaaccggtgtacataatgataatacccgaaatgaccactcccaccgataccaacgtatcggcagccatatgcagataagctcctttcacgttgagatctttttccttatctttcataaaaagccaggctgtaacggcattgataaccactcccacacctgccgtccaggcaatggcagcaccttcaaccggaacgggatggaacaacttctctatactctcggtgatgataatgccgacggcaaccagaagaataacggcattgagcagagataccagtaccgtactctttttataaccgtatgtataacgactgttgggatgcacctttgccaaccggaaagcaagcatggcaagcacaaggcttgccacatcgcccaagttgtgcccggcatcggaaagcaaccccaaagaatcataatagaaaccgatgccgaactcaacgaggacaaacagaatattcagcgtaatgccaattataaaagatttattgagcgacgtcagttcgtggacgtgctcgtgatgatgttcgtgagaatgtgccatgctcgattaagatatttatctattctaaaaacagacaaaccggcagattagttcaatgaaatatcatgcataaaaggtatcaagccatccgtttcttcaacggccggcgactgcagcaaaaccagagacttcagttcttcaagttcggccgtacagacacagaaatagacattctgagccggcaatttcagaaagatcttccggttggcattcattttcctgttcgacctctcacagtaaggtccgttaatcgatacaatataattgcgtagacactcaaatccggcttcggacagacgaaagaaaaggttgccaaattccagatgatacactttacaatgggcacagtaagtgatcattccattgcgggttctgctgattagttccatcataactttaacgttttggtgatggcacaaaagtacgcagatcaccaggtgaaggcaatacctactaatatctaattatcagacaaccgatagccacatatggggagacaagtctgccgtacgatcatagtatgaagaaatctcaatgttcagaaacggtcggataccccatcaaccttactgcagtcatcaccaaaactcccgctacgaccatccgcaatactactcctaggtcttacaagagatattattgtcttcaaaaactgaattgttttcggacaatagcataacacttggatcacttttcagaaaagccataactatcacatgctatttcaattctttgccacatatatgataacaatatacaaaatgaatagctaagtaaagttgtttttccttgcttgtatataccatatttttacagatcatggcacaggccactctttcgttccctattcgccagcacatctacttattaataggtactgagttcagtctttttcattctgtttaggtattgtaacacctttttagtccacctacctttgcaaacagttataaattaaacaatataggaatgaaaagagaagaaatttcatataagaattattccaaactattgatcaaactaagtcttttgggaattagtttcattatagtatcatgcaataaaacagatctgatcacagataatcctaataatgaattggggcaattaccacaagaaaatggaatcacaattaagactatcacatattctcctcaaataacccgttcttcgggagatggagccaatgatttaataggctatggatataactgtttatatgcaacaggagataatcctaacggagcggctaataaagttatcgatttaaaaagatttgagtcaggcgtgggaatagatccaatgacaggtgaaaaaaaaatatttccaaaaggtattatagaagaatccattatgcatggagatgtcacggcgactgaaatatttgaaaaatccaaaaaagagtttaagaaatctatttccgcaaaaggtaaactaaaactaggttttcttccgtggggaggaatacagttttctgcagagtacgacagtaattttgaaacaaaagatgaatattctttttataagatggatattattcgaaatgtccgtagattatacttaagttcctcaagtatagaacgtctaaaatacttcttaactgatgaatttagatacgcattaaaacatgccagtggaacagaaatcataaatgattacggtacgcatgtacttgtagacttcgttttaggaggaaaattaagtgtagtaacatcagctatagatcattctgacaataaagatgaactctttaagttttcaactaaaatttttaaaataatcagtgcatctgcatcctcttcaataagcaaaagtaactatttaaagaacacatcattaactattctccaagcaggagggtcagaaattcaggctgtaaaaagatacatagaagaagatggaacaatcaactcagatattttcaattacaaggaatggataaaaagcatcaataaagagacatctgttttagtagctagtgacacaaaaaaaatgattggcatttgggaacttacagatgatcctaaaataaaaaccaaaatacttgctgaattagaaaagagaggaaataatttaggtatcataggtagtaaaagtggagagatagttacaggcaaaagtacacctatgtataaattacaaaatgaaaaaaccggagaattagcaaaagctcccaatgatcgaggttataaatttcctctctattgtcaaggtgaatatggaaaagaaatgacaggaataggatttatgaattatcttctatcatatcgtgattttcaaccatatcaatctgccccagccagtaatgatgaaaagagttggagtataaaattcactccagatggttatataacagttttgaacaaacatttaaacaaatttttatgcacagattataagtttagaacaatatcagaagacgatacaaattcaagattatggattccacgatataccttaaatatgtgggatgacgatacaatacaataagaagggcaaatactattaattaacatttatatttttaacaatgaaaaagaaattatttacaccgagcacacttctccttttgggaatgttatctctttttagcgcatgtaataacgatgatgacggtacgaataaggctcaggagatagctggaaaatacgaaggctactcaataggtaattgtgccatgttcacagactatgtaatgggtgaaaaatcagtagcaacgattgttcccaatgaagatggcactataaatgtaacctatgattccggatccggtgagtttaaattgaataatattaaagttacttccaaaacattcgaaggatcgggacaggtagaactctccatgaacgataaacctgcaggtgctaaagattttacactcacaggaagcatagatgaacagcaaaaactaacccttaaagtgaatgtaccaagtgtgatgggagggcttactattgaatttatacaagggacattgcctatatcatatcacgtttcgggtacttacaacaaagaagccaatttatcagtcagtgtcggatcgactacatatccggatatcacagattgtaaagtcagcataaaacgttcatcggatgatactgtagagcttactcttaaaggactatctaacttgaacagttctcaaacaggcagagctatgaatttaggagacttcacagtaactgatgttaaagttaccagcactgacaatagtattttcaagattgaaggaagcattaatactactgataccaacaacaccccaattaccggaactctttcaggtacagtgagcaatagtgaaactaatattactttcacttttaaacccggtgccatgccaattgatattaccgcaatgtttaaaggaaagaaataaaaaagcatgagaaaggcgattttgttttgtttagccattactctgctgggaacgatgcttatatcgttctcagcttgtaatgggatattgagcagcctatatgatgaaccggaaaccgcaaaggatttcggcttcattacgatagatcatgccaatcatagcggtacggtacgggtggatgctacccaatatacaaaatggaactacatcaatctgcacaccctgcagattgactcggccaaagttaccgcagaaggtgcggatgatccggacacatgggaccttgccattcatcgatacgatgtaaagactaatggcggtgaggtgcttgaaaccgattaccaaagcctgagtgcactgaaaaacgcagacagcatgcctcaaggtacctttgtcgccgacgaatggaccacaaataaaatagctgtcgacgtttcacacatgatggaggataacggttatctgatttatgctccgtctgacttcaatccggaactttcaaagtggctcaacgtcgataccagtgaaatgcctcccatttacactccgtccaacaaagtctatctgctcaggatgaaagacggcacaatggctgccatccgcctggtgagttacatgaatgctgcgggcataaagggatacatgacttttgactacatctacccatacgaaccataatgctttgataaagacaaataaaaataaatatgcaaagactactaaaatcggcatattgcttcttcgcagccctcttgttgacgacagcagctgccgcacaacataaaatatccggcagggtgatcgataccacccaggaacctctggtgggtgccaccatcaccctgaaagaaaaaccgtctgtcggcaccaccaccgatacggaaggacgctacaccctgacactgccggaccagaaagaatataccgtacaggtctcttttgtgggatatgtgaccgctacaaaaaaaacaacagctgcccgtcaaggtcgtctcgatttcattctgaaagaagatcagatgaatctgagtaccgtagttatcaccggaacacgtactccgaaactactgaaagacgctccgatcatcacccgggtaatcacagccggcgatctgaagaaagtggacgcaacccatatcggacaattgcttcaggtagagctaccgggtatcgagttctcttattcaatggatcagcaggtaaagctcaacatgcagggatttggcggtaatgccgtcctctttctggtagatggcgaacgtctggccggagaaacactggataacatagactacaaccgcctcaacctggacaatgtagaacgagtggaaatagtgaaaggcgcggcctctacgctgtatggttcaagtgccatcgggggggtaatcaatatcattaccaaagcttcggacgatccgtggaatctgaacctcaatactcgtttcggagtacataatgatcagcggcatgggggtacggtaggattcaatgccggcaagttctacagccagaccaacgtacaatataccaacatagactccattcacgtaaaacagggggattatacgaccatcaacggcaataaaacctggaacgtgaaggaacgcctgatgttcaccccgaacgagcaattgcgactgacggcacgtgctggctattatttccgtgaacgggatgcctcctcggaaaccaagaaccgttatcgcggattcagtggcgggctgaaaggaaactacgacttcaacacgaaaagtaacctggaactggcctacacattcgaccagtacgacaaaagtgactatctggtatcatataagaatgatatccgcgactacagtaatgtgcaacacagtgtacgcgcgctttacaattatacgttcaacgataagaacacgctcaccgtcggaggagactatctacgagattatctgatgtcgtatcagttcaaagaaaacgccgattataccatgcattccgccgatgctttcggacagttcgactggaatcccacggaacacttcaacgtgattgccggattgaggttcgactacttctccgaatcgaacgtgcgccatttctcaccgcatctgggattgatgtacaagataggaaactgctcgctgaggggatcttatgcgcaggggttccgttcgcccaccttgaaagagatgcacatgaacttctacatggcaaacaccatgatgatttatggtaacccggatctggagccggaaaccagtcacaacttctcgctctccggagaatataccaaaaaccgttataattttacgctgacaggatattataacctggtgcacgaccgcatcgagtatacctctttcagagataccgacggaatgatcgcacaaaaatatatcaataccccacgggtagacattgccggaatcgatgccaatgcctctgccaaatatccttgcggtataggtgcacgtatctcgtatacgtacatccacgagttcatgcgtgacggacagaccaaactcagctctacccgcccccattcggctactgtacggttggagtatggcaagacatgggatcattatgacttcaatctgtcactcgacggacgggccttgtcacaggtgaaaaccaatcaatatacttccaatgacccgaatgcgggaacggaaaaggttacttatccgggatataccatgtggaacctgacgctcacacaaagagtatggaaggggatcaatgtgaatatggccgtcaataacctgttcaactaccgacctgactattattatgccaattcaccctatacgacgggaaccaacttctccgtagggctgtcgctggacattgaccaaatgttcagaaaatagcggaaaaggctaagccagcggatatctccgatcgtccggccggcatttagtaagaacgaaataaaccaaagaacaaaaaacaatatgaaaaagaaacaaatcatcaccacttgttgtgtggctgcggcaatactcgtcggggtattcgtctggcaagcctacttcagtgccacgaagattgcctttgtcaatttccagaccatcaacctgggaaatatttcgaaggcgaacgacaattcatttgtcaaactaagggaggtctctaccgatcacctggacgaactgacgggctatgatatggtgttcgtcaacggtatgggattgcgcatcgtcgaagaacaacgccaacagatacaacgggcggccgacaaaggtataccagtgtacacctccatggctaccaatcccgcaaacaatatctgcaatctcgattcggtacagatgagtcaaatacgtcaatacctgactaatgcgggaaaagtaaattaccggaatctgctttcgtatgtccgcaaagagattgatggtaagctgatctccgcccccgtaccggaagcaccggtagaaaagccgaccgacattctttaccatgccggagtgaagaacccgaatgatgaaatggaatttctcaacgtaaccgattatgaaaagttccttcgtgaaaacggactctatcatgaaggtgcccgcaaggttgtgatcaccgggcagatggcggatgccacaggactaatcctggcactcgaaaaagccggacacaatgtatatccgatctcttctttcacccgtttcatggagttcgtccgtgaaatacgaccggacgctgttatcaatatggcacacggacgcatgggcgacgatatggtggaatatctgaaagaacgcaatatccctctctttgcaccactcacagtcaacagcctggtagaagagtgggaaaacgatccgatgggtatgtcgggaggatttctttcgcaaagcgtagtgacaccggaaattgacggtgccatccgtccgttcgccctctttgcccaatacaaggacgatgaaggactgcaacactctttcgccgttccggaacggttggagacatttgtcaacacagtgaacaattatctcaccttgaaaacaaaacccaacagcgaaaagcatatagccatcgtctactacaaaggccccggacaaaatgccctcacagcaagcggaatggaagtaggcccgtcactctacaacctgctgctgagaatgaagaaagaaggctaccggatagaaaaccttccggagagcgccaaagagctggaaaagatgatccaggcacagggagccgtattcggaatgtatgcagaaggcgcatttgatgaatttatgaaaacagggaatcccgaactggtgactaaagaacaatacgagagctgggtaaaagcatcgctacgccccggaaaatatgctgaagtggtagccgccaacggtgaattccccggccaatacatgactacgccggacggacgcctgggcatcgcacgattgcagtttggcaatgtggtactgatgccgcagatggcagccggtagcggagacaacgcctttcaagtggtgcatggaaccaacgccgcacctccccacacttatatcgcttcgtatctttggttgcagcatggttttaaggcagacgcaatgatccacttcggtacgcacggaagccttgagttcactccacgaaaacaggtagcgttgtgtagcgatgactggcccgaccgccttgtaggagctcttccacacctttatatatattctatcggcaacgtgggggaaggcatgatagccaaacgacgttcgtatgctaccttgcaatcttaccttacacctcctttcctcgaaagcagtgtacggggcatctaccgtgacctgatggagaaaatcaagatttacaataacaccacaggagcgaaagaaaagcagtcgcttgccgtaaaagcactcaccgtgaaactgggcatccatcgtgaactggggctggacagcttgccgacccgcccatacagcgaggacgaagtggcacgtgtagagaacttcgctgaagaactggccacggaaaaaatcaccgggcagctttataccatgggggttccctatgaaccggagcgtatcacctcttccgtacttgccatgacaaccgaaccgatcgcttacagcctcttgtcactcgacaaacaacgtggcaaagcaacagccgatgtagaaaagcatcgctctctcttcacccaacgctatctgaatccggcccgtgccttagtagagaaactgatagccaaccctactttggcaacagacgaactgatctgccgcactgccggtgtcagtcccgaagaactggcaaaagcacgagaaatagagacctcacgcaatgctccgaaaggaatgatggcgatgatgatggctgccgccgccaaaaacaagaccggggataaaaccggcaaaacagccgataagatgccggaagccatgaagaagaaaatgaaagaaatgggcgcacatatggattcatccaaagccatggaaatggcaaaaaaaatgggtgccgatccggaagccctgaagaaaatggaagcaaaaatgaatgcctcaaagggagataagccggaagcggataaagctaaaggcatgtcggacatgatggccgccatggggaaaaaaacggctcaaaaggaatacagcaaagaagaaatcaactttgcccttgcactgacggaggtggaacgcaccatccgcaacgtaggcaactaccaaacggaactgactgccagcccagagaaagagcttgccagccttgtcaatgccctcaatggaggatacaccgcaccttcaccgggtggtgatccgattgccaatcccaacaccctacccacaggacgcaacatgtatgccatcaatgcagaagccactccgtcagaatcggcctgggaaaaaggagttgcacttgccaagcaaaccattgaaacttaccaacgccgccataatgacagtatcccgcgtaaggtcagttacacgctctggtccggcgagtttattgaaacgggaggagctaccatcgcacaagtattgtatatgctcggtgtagagccggttcgtgatgcattcggacgtgtcagcgatctgaagctgattccttctgccgaattagggcgcccacgcatcgacgtagtagtacagacatcggggcaactacgcgacattgcggcttcccgcctttttctgatcaatcgtgcggtagagatggctgcagctgccaaagacgacaaatatgaaaatctggtagcggcaagcgtagtagaagccgaaaagacactgaccgagaaaggggtaagtccgaaagatgcccgtgaaatggctgcattccgtgtgttcggcggtgccaacggaatgtatggtacgggcattcaggagatggttgaatccggtgaccgctgggaagatgaatcagagatagctgccacctatcttaataacatgggtgcttactatggcagtgaaaagaactgggaagccttccggaaatatgccttcgaagccgcactgacccgcacggacgtagtggttcagcctcgtcaaagcaatacatggggcgcattgagcctcgaccatgtctacgagtttatgggaggtatgaacctggccgtacgcaacgtgaccggcaaagatcccgatgcttacctgagcgattatcgcaaccgtaaccacatgcgcatgcaagaagtcaaagaggctgtcggtgtagaaagccgtaccaccatcctcaaccccgcttacatcaaagagaagatgaaaggcggctcttcctctgctgcggaatttgccgagacagtcaccaatacatatggctggaacgtaatgaaacctgccgccatcgacaaagagctttgggacaacatttacaatgtatacgtaaaagacgaatacaacctgaacgtgaaagaatttttcgaaacacaaagtcccgcagcgcttgaagaaatgactgccatcatgctcgaaagtgcccgtaaaggtttgtggaaagcaagtgccgaacaggttgccgaactggcaaaactgcatacggagacggtaaataagtatcgtccgtcgtgctcgggctttgtatgtgacaacgccaaactgcgcgaatacatcgcgtccaagtcagacgctccggctgccgcacagtacaaagaaaatatctctaaaatacgcgaagcgaaagtttcgggcgatgccaaaggaatggtgatgaagaaagaagagataaaccggacaccggaagagcaaaagacaaccctgagcaacattgccgtgggtgcagccgttgtagtggtaatactggcactcgtactctttgtccgtaaacgtcgtaaaacatcagaataatcagaagtatggatacagtcgtacttgtattaatgctgttaatagcattcaactttctgctgaaacagactttctggaaaacggtcgcagtcggcatcatagccactgttgccgccctgtttgcaggactgatgtggccgtatgccatcgagcaatcgaaaacacagattgccgactggctgggtaacacagccctgatgctggacacttccgttttgctgaccatcgaagtcagcctccagatggcctatgccatgctggcggtacatgttgccagtgcctatccggtaaaaccgcgtacactgctcacctaccgcttcctgagatggtttccgggactgctcatctttccggtactattcagcgggctggtctatcttatctttgccttcccggggacaccattcaccaccgtggcatggatgtatgccgcttgcgtgctgatagccattcccgtaggacgttggctactgctttacctccttccggagaaggagttgcggctggaactcttcttcctcactaacgcattggtggccattctgggaattgtcgctaccgtaaacggacggacctccgtagccggagtcagtgaagtaaattggggagcactggccggcgtcggtggaataaccatcatcggcagtgccatcggactcgtttggcgaagggtgaagaaaagaatcaattaatcacaaaaataataagtaaatcaactcattaaaacagatcaacaatgaatattatatcagacattttatattggatttctacaggactactcgttcctgacatcgtattgcttatcgtattattcggccgtgcacttctgctggtcggcagtttctacggacaatatctctcaatacgcaaaaccgaggcactactccgtaacgaactgaatgcactcactcctgccaccgttatggaactggcagacaagcttccggaaaaatcatcatcattagtcatatcgtacatacgccaggtgctccaggcacatgaaagcccggcacagatacagagactgcttgccaactttgagatagccgccgataaagatctggctatctctaaaactctgacaaagctcggacctatcctcggtttgatgggtacgcttatcccgatgggacctgcccttgccggactggcaagcggcgacattgcttcaatggcctataacatgcagattgcttttgccacgaccgttgtcggactggtagcaggcgccgtaggtttcttgacccagcaggtgaaacaacgctggtatcttcaggacatgaccaacctggaattcctttctgaattgttgaacgaaaaacgtgcggcccgatgaaacgaaacctactcagaaaagaagaagatgctgacccgatcagcgttgtatcgaacctgttcgatgtagccatggtttttgccgtagccctgatggtagctcttgtcagccgctacaacatgaccgaagttttctctcaggaagactacacgatggtgaaaaatccgggaaaagaaaacatggaaattattaccaaagagggacagaaaatcaaccgttatactccttcggaagaccagcagaaaagcggtaaaaaaggaaagaaagtaggtatcgcctatgaactcgataatggggaaatcatctacgttccggaagaataataaagaatagattatccttaaaatgcagacaaacgcatctttcatccgcccatccggcaacgaaagatgtatttgtctgcatctcttttacaagtcaacaatacacccgctcttttatgaatagttgttgttttttaaaacacactctctgcacaaccattccaatttctattatctttgctccctgatcggttccgaatagtcattcctctatccggattaaaagggaatcgggtgtaaatcccggacagtcccgctgctgtgaagctccgtctgaatttccgataacaactgttgccactgggatacctttttgtaaatagataaggagtcaccgggaaggcgtcggaaacaaggagtcagtcagaagacctgccgcttatcaaaggctgtttccactcgtgggattagggaaacggtacgaaaagattctataaatatttagttagaacataactcatggaaataaccaagaggaacggaacgacggaaccctatgacagggagaaaattgccgtcgccatacgaaaaagttttgccagtacagggcaggaagtaagtaacgaaatcatctattcggtggtagaagaagtggagaattttgtcgggaaagataccgcaaaccgtagtgtcgaacagatacaagacaaagtggagcaaagcctgatggaacacggcttttatgccgaggccaaaaattacatactctaccgctggcaacggactgaacgcagaaaagcactcaacagcataataaatgaattgggcgacggaactgtgatggatgtcctgaaagagattcagaaagacttcaccacccacgaatacagtctcgttgtactctatgaaaaattttcagggttttgcaaacaggaaatgccacattccgaacgtttggcagcattgattaaggctgccgtggaactgaccactcaggaagcacctgactgggagtttatcgcggcccgtctactcaatttccaactatcgaagaaactggaaaagcaggcggcatcggcaggcatccgttcgttttacgacaaactgcgctatctgacggaagaaggactatacggtagttacatactggcggcctactcgcaacaggagattgaagaagcagccggatttatctgccctgacagggacaaactatttaattattccggactggatctgcttgtcaaacgctacttgatccgtacccgactccatgaaccggcagagtccgtacaagaaatgtatctgggtatcgccctccatctggctatgcccgaacagaaagaacggatgacttgggtgaaaaaattctacgacttactaagtcgtttggaggtgacaatggccactcctaccctctcgaatgcccggaaaccttatcatcaactttcaagttgtttcatcgatacggtacccgacagtttagaaggtatctaccgcagtatcgataactttgccatggtaagcaaatttggtggcggcatgggaatgtactttggcaaagtacgtgcggcaggaggaaatatacggggttttaaaggtgtagcaggaggagtaattcgatggatgaagcttgtgaacgatacggctgtagctgttgatcagttgggtatgcgtcaaggtgccgtcgctgtctatctggatgtatggcacaaagacctgccggaattcttacaattgcggaccaacaacggagatgaccggatgaaagctcacgatatttttccttcggtatgttatccggacctgttttggaaaatggctaaggaagaccttaaccaaccatggtacttattctgccctaacgagattataacaatcaaagggtattgcctggaagattattacggagaagaatgggaaaagagataccatgactgtgtaaacgatacccgactttccaaaagaagtataagcattaaagacattgtcagattggtgttgcgatcggcagtcgaaacaggtactcccttcaccttcaaccgtgacacagtgaaccgggccaaccccaatgctcaccggggcatcatttactgttcgaatctttgtacggaaatagcacaaaatatggcagctatcgaaacggtatccaccgagatacgtacggaagagggtgacacagtagtggtgaagacggtacggcccggcgactttgtagtttgcaatcttgccagcctctcgctggggcatctcccattggaggacgaagaacagataaaggagaaagtaagcaccgtagtgcgtgctctcgacaatgttatcgacctgaatttctatccactcccttttgcgcaaatcaccaaccagcgttaccgcagtatcggactgggagtaagcggttatcaccacgcacttgccatacgcaatatccgctgggaaagcgaagaacatctccggtttgtagaccgagtattcgaacagattaattatgccgccatcgaagccagtgccgacctggcaaaagaaaaaggacgctatgaatacttcgaaggaagcgactggcaaacgggagcatactttggcaaacggggatatacttcccccgaatggaatcggctggcagccaaagtagcggaaaacggtatgcgaaacgcctatcttctcgctatcgcaccgaccagcagtaccagtatcatcgcgggaaccactgccggtaccgatcctgtaatgaaacgtttcttccttgaagagaaaaaaggagccatgctgccacgtgtggcaccggcactgtcagacaaaaccttttggttatataaagatgcctatacactcgaccaaaaatggagtatccgtgcggcaggcacccggcagttgcacatcgaccagtctcaaagcctgaacctgtatatcaccaatgaatttaccatgcgacaagtactcgatctctacttactggcatgggaatgtggagtaaaaacggtatattacgttcgcagtaaatcattggaagtggaagaatgcgaaagctgtgcatcttaaataaacgaataaacaagaaaacgatatggaaacaaaaaaattaaagaaaaatgccctcttcaatcccgaaggtgatacagaaacccgtctcagaaagatgatcggaggcaatacaaccaatctgaatgatttcaataacatgcgatacaaatgggtaagcgactggtatcgtcaggccatgaataacttctggatacctgaagaaatcaatctgacacaagataccaaggactatccccatctgaccccggccgaacgaacagcgtatgataaaattctgagcttcctcgtcttcctggattctttgcagagtaacaatctcccgacactcagcgaatacatcacggcaaacgaagtcaacctctgcctgcatattcaagcatttcaagagtgtgtacacagccagagctacagctatatgctcgactctatctgtagtccggaggaacgcaatgacattttgtatcaatggaaaacagacgaacatctgctaaggagaaatacgtttatcggcaattgctacaatgaattccaggaaaatcgtgacggatttgccttgatgaagaccctaattgccaattacatccttgaaggtatttacttctacagtggttttatgtttttctacaatctgagccgtaacggaaagatgtccggatcggctcaggaaatccgttacatcaaccgggatgaaaacacccatctctggctatttcgcaacatcattctggagttgaagaaggaagaaccggaactgtttacgcctgacaaggtgaaagtgtatgaagagatgatgcgtgaaggagtgaaacaggaaatcgcatggggacaatatgtaataggcgaccaaatccagggcctcaaccgacaaatgatctctgactatatccactttctgggtaatctccgttggagtagcctgggttacactcctctgtacgaagacaaccggaaggaaccggaaagcatgcattgggtatcgcaatattcaaatgccaacatggtaaaaacggacttcttcgaagcgaaaagtacggcgtatgccaaaagtactgcgctggaagatgatttataaatagtctatgtttccgggcaatcaacgataaacaatggatcattcatgtgaatcagttcttgagagacctatgcggtatgaaattcaattactgattcacattatcaatgaatacccgaacaatgggatatatacatgaccacattaaaaaaatattcatcagcaatggttcctcgtccatcataaatcattcaaatcctttcttcattcaaaaaacttttgacccctgatttttttaattacctttgtaccccgaaaagacgcaattcaagggtgtgtcattattcacacatcctcttcccccactcaaaacctaaaccgaaatcgaaacactgtactgacacattaaccacatttcctcccatacgccggaaatgcggaaaagcaacatgtatgtatcacacagatttaagaaaaagtaaaaagaaatgttagtaaccaacaccatggaagctacagcttccactaccgacagttgccaggtcagtgaacctgtaacagcaacacaggaaactcccaggaccatcgccacttacaccgccacaacaccggccatgcaccggaaatcatttaaagagcaagaaccggctattttttccattatcggattcgccgttgcctatattgctgccctgattatcaaccgcatcatcaagacgagaaaaactcaccattaacccaaccttatggacatccaccaagaactaaaagaactatctaaattcctgtctgaatattcgaccagtctgatggccgtaggcgtacaaacatcacgaatcgtacgaaacacctcacgaatcgctgaatctttcggcttcttctgtgacatgacaatctttcagaaaaccatcatcatgacattacgcgatgccgacaattcgcattcatacagtacggtaaacaagatcaagcccatgggactgaacttcgccattaattcagcactcagcacgctgagttgggaagcatatgacgaacatttgtctctcagcgagctccaacgtcgctatcacgaaattgtcagcaaaccacgtgaaagtaaatggcttgtattgattctggttgcctttgccaacgcatctttctgccgcctgttccaaggtgactttatttccatgggaatcgtatttgtagccaccttggccggattctttgtccgtaccgaactgatgggacgtcactggaatcatctggcaatattcatcatttcgtcgttcattgcttccatgatcggtagtacgggctatctgatgcactggggtgacactccggatatggctttaggtaccagcgtactttatctgattccgggtgtaccgctgatcaacgccatcatggacatcatcgacggacatgtattggccggaacatcgagatttattaacgcctgtctgcttatcatctgtatagcgatcggcctttcaatgacccttttaatcaccggaatcagcaccttatgatgaatatagattttataacagccaccgtactcgacggtgcattcgctgccgtagccgctatcggatttgctattatatcgaatccaccacgaaaagccatattgatctctgctttcctggcggctgtaggtcacggattacgttactttctgatgcatgcacatctgtttacgatggacattgctacggcttcattctttgcagctgtttccatcggtttattagccatcccttttgccaaagcgattcactgcccggcagaggttttctcgtttccgtctctcttgcccatgattccgggaatgtttgcttataaaagtatccttgcactgacaaagttcatgcagactaaagatgaaaccgattcactgcgatacctggtagatttttgccacaatggcagtaccaccatcttcgttttatttgccttggtcgtaggggcagccgtaccggtattcatcttccaccgccaatcattcacagctacccgtttactgaaaaagttggtaaaaaaaggatgacggcattcatattatagataaatatctaaaatggcgaatagggatctgtttttacagcgtccctattcgccattttaattactttcttgcctcagcaatgtattctaaggcttcggtacatttcttggtaacatatccccaatcttcggctgctaccttatctttcggaaataatttagatcccataccgacacagaatgcacccgctccaaaccatcctgtcaggttctcccgggtaggctctaccccaccggtcaccattaatttggaccaaggcatcggagccatcaagcctttcacaaaatttggtccgtacacatctccgggaaatatcttacaaagatcacaaccggcttcctgtgcaaagcccacttccgaaaccgagccacaccccggtgtataagcgatcagccggcgattgcatatcttagcaatctccggattaaacaagggacctaccacaaagtcagcccccgattgtatatacagagctgcagtagccggatcaaccactgatccgactcccatagccatccccgggcattcacggacagcaaattttacaagcccggcaaatacttcctgggcaaagtccccccgattggtaaactcaaaagcacgaactccaccttcataacaagcttttaccactttcttcgctatttccacatcttcgtgataaaatacaggaaccatacctgtcgaacctattttgttcaagacagctattttatcaaatttagccataagaatatatacgatttaaagattgacaacccactatcacccacgattatctttgtacacgtccgctcgcatctcctccgacaagcgcttcgacctccgccacagaaacaagattgaagtcaccattaatggtatgcttcaatgccgatgctgccactgcaaattcaagagcctcaccctgggttcgctttgtaagcaggccgtgtatgacaccgccggagaaagaatccccccctcccacacggtcaataatcggatcaatatcgtaatgtctggaaacatagaattcctcaccattataaatcatggctttccaaccattatgtgatgctgagaaagattctcgcaacgtcgagatcacatagctgaacccaaactcatccatcatctgccgaaaaattcccttatagccctctgcatctgtatgtccgccttccacatccgcatcaggtttaaatcccagacagagttccgcatcctcctcattaccaatacatacgtctacatacttcatcaaaggtttcatgatggactgcgccttctccttcgtccatagttttttacgaaagttcaggtcgaccgacaccgtcactccatgacgcttggcagcctcacaagcaagccgggtcaattcggctgctttgtctgagatggcaggagtaataccagaccaatggaaccagtcggccccctccatgatcttgtcaaaatcaaagtccgctgcagcggcctcggcaatggcagaatgggcacgatcgtaaatcactttactgggacgcatagctgcaccggtttccaaataatagatccctacacgttcgcctccccgcgcaatatagtctgtctttacaccgtatttacggagtgcatttactgccgactgcccgatttcatgtccaggcagtttggttataaaataagcgtcgtgaccataattggcacagctcaccgccacgttagcctcacctccaccatataccacatcaaaagagtccgactggacaaagcgggtatttcccggaggagacaaccgaagcatgatttcgcctaatgtaacgactttctttcccataatttaatattttaatgaaacgagcaatttagattattcagttataatttatcgtcaccccctatttttagcgataataaactggtaataggagaaataacaactcataaaacttacaccgaacaagttccgtgtgcggacacaaagatacgtaaattttcaggattacaaaaattgttatatatttgtgtccatagaaataaaactattagtgtgtccgggcacaaaacctcacacaaataaaggtgaacgcatgaataaattgccagaaagaatcagaattaaggatattgcccgcttggcaaatgtatctgtaggaactgtagaccgggtgctccatggccgtagcggagtgtcggaagcaagccgtaaacgtgtagaagaaatcttaaagcaactcgactatcagcctaatatgtatgccagcgcgttggcttccaataagaaatatacttttgcctgtctgctacccaaacatctggaaggcgaatattggacagatgtgcaaaaagggattcgggaagcggttaccacatactccgacttcaatatttcggcaaatatcacccattatgacccctacgattacaattcgtttgtggcaaccagtcaggccgttatcgaagaacaaccggacggagtaatgtttgctcccactgtaccacaatataccaaaggatttaccgatgcactaaatgaactgggtataccatatatatatattgattcacaaatcaaagatgcccctccacttgccttcttcggtcaaaactcacaccagagcggatactttgcagcacgcatgctgatgttactcgccgtaaatgaccgggaaatcgtaattttccgcaagatacacgaaggagtgatcggctcgaaccagcaggaaagccgcgaaatcggatttcgccaatatatgcaagagcatcatcccgcctgtaacatccttgaactcaacctgcacgccgacctgaatattgaagatagccggatgctggatgacttcttccgcgaacatccggacgtcaagcatggcatcacgttcaattcaaaagtatacatcatcggtgaatacctgcaacaacgcaggaaaagtgatttcagcctgatcggttacgacttgctcgagcgaaatgtaacgtgcctgaaggaaggcactgtctctttcctgattgcacagcaaccggaattacaaggattcaatagtatcaaaactttgtgtgatcatctgatattcaggaaagaagtggcttgtaccaactatatgcccatcgatctcctgaccaaagaaaatatcgactattatcacagtaagtaatgtaaacactgaaaagagttcaggctgcaaagaaaaaaacaacattcttgcagtctgggctccttatttttccctcttcaaataaaccatatccctgagccggatgccattctcataaataggatgatcataatggtcggtgaaaaaattcttaatacgatgggaaggaacaaatccgcaggattgatagaataaaagcgtatgtggagtatctcctgttcccacaaacatgaccgagcatcggtccgaataatggtgaaacagatattcaatcaggcttttaccatatcccttacgctggctatccggacaagttgcgatattctttaattcgtaaattcctttcccctcgttagtaaccacacaaaccgccctgagcttgtcttcatcatatagagcgaacatatctccacgttccagataccggtctatcatatcttcctgctcatctgccagcaagagcaaatcgaggaaacgcttcctgtctgaaaatacctgttcgactttcataaccctttctgttgttctctatgttcaaaaatcattgtcatatgatccagtgcccatccaaccaatgcttcgacgtgtggaatcaaactatgtcccatttccgtcaggcaatattccaccctcggtggtacttccgcatatgctttccgttccaccaacccgtcggcctccaacgtacggagagtaacagtcagcatccgttgcgaaatatcgtctattgttttatgaatgtcaccaaagcgcatcgttccgttcgcattcagcgtcaccagcaccagcatcgaccacttgtcgcccagccggcataatacgtccctgatgggacaagttcccgtaggatggaagttcttcattctctaatcgtttctgtcatattaaaaacctgcaaagttaatttgatcccctgatattaagccacattcacatctatcagcacagaataatacacctttgcaggcacaaagataataaacttacgaaagagaactattgttttatttaatcaattcacagtcgatgtacttgcagaggacgcaaagatattatttgattcataaaaataatcaaagagggtatgtcataactcaccacagattttaccggataaactttaaatttagtctaaacaagaggtacaatccatttattattaatacttttgtacacgatcaaacaaacataaatactttttcatcaaagatatgaccctcttcacaaacatcaaatccttcgacaaatcatttttgttgaagttatggctatctcttattctctaccagttgtccgtatgccccgtatctgcacaaaaagacacgatggatatcaaagactacatcttaatcattaatacatataccgaatcattcccttggagtaaccgcttgatctcaacagcaaccaacttcgtaaaagacgaccccaaactggctgtatacaccgaacatatgaacatgataatgatagataatgacagcattctggaccaattcaaagacagtcttttcgacagatacggttcccaccgcccacgtatgctgctgttattaggcaactcttctctcatattgaaagatgatcttagaaaaatgtggggtgacattccaatggttctctgtgccggaaaagactataccgggcctgagcactattatctgacgaaacaacccattcctctttccgaacgtgtaccattggcagaattgtcccaatcctgcaatctcacctacctctatgccaatctctatatccacgagaatgtagaaatgatgttccgtacactcccccggatgaaaagattcatctacgtgggcgacgaacgctttgtcaaccaagtcaacagtcaggagattcaagaaattctacggaccaaacatccggatgtacactataccttcctgtcttcccgtgacataaagaaaaccaaccaactgatcgattcactcaactttgtcgatccccggagcacgggtattctgttttccagctggttccacaaacggcagtttgccggcaacatgatgttgacaatgatcctgcctgaaatcgtttccaccgtatcccctccaatattcgctctcaatatgattgaactgaatgacaaagagagtggaatggtgggtggttacacctacgaccagaatcacttcaatgaaaagctgtccaacatgttttcggaaatcctcagcgggaaatctccacgggatcttccacattatctgcccacagacggtacaccactcatcaactatcaggtattggtccgcaaaggtttgtctcccgacgagtggcccgctcacacccgttttctgaacaaacctatcaccttttgggacaaatataaatatttcctgccgggaacaaccgtttgcatcgccctgctcgtctggtttttcctctatcgtatccgtacgctcacgcatctcagacagatccagttgaaagaaatcgaggctatggctaattataaaaatctgatcgataacatgcctttgctctacatgcaggagaaactaatcgtaaacgaacaaggtgtagccgacgacttgatctacctgaacgtaaatccccatttcgaaaaacattttttccgtagagaggatgtcgtcggtaagcgggccagtgaactgtttcctgaatctctacctgaatttctacacttcatccagatctccctgaaggagaaccgtgccatcacattcccttattacttcaaaaagatagacagattctacgacatcgtattaaaaggtgcacatcaggagaatgtcatcgacatcttctgcgtagacagcactgaacttcatcgtgcacagcagaagttgaacgccacaaaccataaactatctatggcgctggaagtagccgacatcattccctgaaaatgggacttactcagcaaaaccattctttgcgacatcaataagcccattgaactcagtgcacaaggtaataacgtaagcgaagaacagttggctgtacccgactcacaatacttctcgaaaatatataaggaggaccgcatacgagtggaacaagcttataaagacctgatagaagggcgcttggaaaaagtaaaagaagagtatcgggtgatcaacatccggaatcacactcacaaaatagagtgggtagaagcccaagctgcagtggaaacccgcgacgaaaacggaattccggtgacactggtcggttcttcacaggtaatcaccggacgtaaaaagatggaaatggaactgacttcggccaaagaccgggccgaagaatccaatcgtcttaaatctgcctttcttgccaacatgagtcacgaaatccgtactccgctcaatgccatcgtcggattttcgggaatactggcatccaccgaggaagaagaagagaaacaagaatacgtcagcatcattgagaacaacaatgcattattgttacaactcatcagtgacatcctagacctgtcgaaaatagaagccggtacactcgagttccagtactccgacatcgaactcaacaccgagcttaaaaaactggaaagcaccctaaaactgaaattaaagtcggacgacgtacaactggaatttgttcccggcctccctgtgtgcccggtatgtaccgaaaagaaccggctctcacaactgatcatcaatttggtgaccaatgccatcaagttcacttcccggggaagtatccgcttcggttacgaacaccgtggcaaagaactctatttctatgtcaccgataccggatgtggcatccctaaggacaaacaggaaagcatcttcggacgttttgtcaaactgaacagtttcgcacagggaacaggcctgggactctccatctgccgtaccctcgtcgagcacatgggcggacatatcggtgtagattcggaagaaggcaaaggttccacgttctggttctccctcccttataaagcggcaagcacttccgccggaacaatgcaaaaaaccgagattcagcccatctcagtagaaaaagacaaactgactatcctaatcgctgaagacaatgaaagcaactaccgcctcttcgaatcgatcctcgggcacgactatcatctgattcatgcctgggacggacgcgaagctgtcgaaagattcaaaagagaaaatccacagattattttgatggatatcaatatgccggttatggacggatacgaagccacgcaggaaatccgtaaatactcagccaaagttcctatcatagcagttacggcctttgcctacacttcggacgagcaacgggtgatggaaaacggattcgacggatatatgcccaaaccgatcaatgcacggcaattaaaagcacaaatcacggagattatgcaaaaacggatcattttgttataacaacagcgcgatataccgccccattatgacagtttcactccatattcaccttgatgcaaacctcctcaatctgtttgcgatcaacttataccacaaggggtcgaggcgatcgatatacaatgacgaaaccctgaggatggcattcatgtcggatatacaagagattgtagagattgaagtgcatcgaacacggatattgcgacctgactcattttatcaaaagcttcaaacgatttaccggaaaagtaccgttgcaatattacaaacagaatataggtaatgatcgaaaataaccggtatatatatatccaaaagttccacagattacaccgaatcacacagattaaaagtaaatatccagctatttatcgaagtttctgtgcaaacccgggtaatctgcggtgaaccatatccggtcgagatacaaattttccattattcctctacgacataaaccacctcgtgggcttctgtcaactgaggaacttccaacctacctaacatcttatccagaaccgtttccggaacttcatattcgcgtgtactgttctgtcgccgccagactgaataaggtttctctatatagactattttaacccgtgccccatatgtaatgaacaagtcgatcaactgagtacgcctttgacggctcacgttggtagcattccaaatgaagtcctgtccctttcgaagatagatccgggcctgttctttagcagtttgtgccacccagccattggccgctttgtcagtgggactaaacttatgtttacgccggatggcatccaaactgacaaccggcatatcggcacatcgagattcgatataatagtcttttcccataccgggcagacctacaagcaatgttacctcacatttaaaatcatcgtggggaacataatcgatataggatcggggtgtatgaaagtagtgaaaacgggctgtgccattggcaaattcccgtgcctttccccaacattgctgctcccgacagaacatctcaaaaaattcggtagcctccagcaacacttctttgtctgtactgatacgtccgcaaatatcggcaacagtcaattgtttcagcaacgaggtgtccagcctcagcgaagcctcacaagcacgctttaaaggatcttcgcgttccatcaaccaaataggcagaccatgatggcgtaccagtgaagctatatgctcgcgtatattgaaaggagcaggtatatctctataaagaagagtacggacagtagtctccccacgtttagcatggttcttagaggtaacctgtccattcccctcatcgactgaagtcgaacgtttttccacatcgtgaagtaaagcggctgcccaaagtatttcccgttcctgttccggaagcatcagataggcaggttgtcgcagcaatgcttcgagcaccatgcgggtatgtacagccacacttccttcggcatgatgcaccgtatgctgaggaacttggttcatatcccgtacccacccaaactgttgttccaacgagttccagtctttccgttcgctcaatttccaaatcatcgattacctcctttctcttgtttcaactcccataccagacgggcacgtttccaatgacgtgtccaatgctcccctgtttgtacatgacctttacggacatacttaaacacattgtgagcaaaatcggcagtagcatattcaccgatattccgggtaaccactccttcccgggtacagtccagaccggtctgtacatcacaggagccgaagacactcggctcctgcgccaaacagacaacatgctgttccaaagatgctactgttaatccgtccacgcactccgtgcacaattcaggcacggttggcaaatcgaacagtgcagcataaaatttcacttcatcccatgacagccatttgtccaggcaacggacagcaaatacataaaaatgtgtttccagccgcttatactcaatggaatgaacggcatacagattttcaccgaacagttcaatatctcccagatcgtttttcagcaactcccagcgttgacgcaactggcttgtccatggcgaagtggtaggtgcgacatgcgaacgggcaaagactccatatctgctcaaacaattattctctccatccagcttttcggtatgcaccaaggtgcttatctgccggatatcttcccaatatgtatgattgatccggtcgtcactcgtcgtcccgggagagaacggatagtgataggtacgaccatatttttctgataacatagttttttcttttaatcgttaatacttaaaaccggagttcttcctgaatgatcttcaccgggtttcccctttgaaggctgttgtgattgctccaattggtctgtgcctgaatcatcgcttgctctatgttccaagcggtcagcttgaccaacaatcgttcagtagccagttttttattctgccattgcgaacgctggtcggatgccactacactgattccgctggggatatgaacagctcttacggcagattctgtcttgttgacatgttgccctccgggcccggacgcccgtaaggtttcataccggatatcatcttcggtagcctcacgactttcggacaggaggaaagtctgcacaccgacaaaccagttcttccgcctgtgatgaatccgatacgggctacgggcaatccacagcacagtcccttcccattcgtcagccaatacatcgcaacctgcaccttcgagtgcaacgactaccgacaacaaagtgcgattgacaggaccagtctctttttccaggatttctactctcaatttccgtttctgtgcttctctcaatattttttcgagtactaaagccactacacggcaacactctacaggaccacgccctgaagtgatttgtaaatacgtcttttccattatcctattctttattcattcgtacgatgcagggcatgaaggtaccttggacttcaaccagttcctcctgggtcttcatcacccggtcaatatccttgtaagccaacggcatttcttcgacactgccaccaatcagcgtgactccggcctgagaaagatactttctcaatgctgaccgggtaaagttgtcttttgccttttggcgggacatagctcgtcccgctccatgcgaggcagaacaaagggcttcacttatccctttaccacataccaaataaccgggcgttgccatacttccggggatcagtcccggttggcctttctgtgcaggtgttgctcctttacgatgcacaatggctgtctgtccgggagcgatttcctctttccatgcaaaattgtggtgattgttcacattggccaaaggtttcagccccaaagcttttgacaaattctgatgaatccgctcatggcaggcacgagcataatcacccgctaaattcatactaagccagtattcctgtccttcttccgtatccaaccccagccaggcaaagtgctgagcctcgcgaggcaggcggcagaggtcgcgtgccagcagactatagtgtttggcaatggcagcacccaaaccacgcgaaccggaatgggacagcaaagccacgtagtttccttccggaacgcccaagacattaccggcctgtaagctcatcttaccaaattccacaaaatgatttccaccaccggagctacctaattgccgtaccgccttgccatgaagtcctctcaacaattcggtcattcggaactcttctctgtcaagcacctcatgctcttgtgcaaaagacaatccgccatccatgccaaaatgagtaaactccttcagcgcttctttaatatggtgcgaatagcgtttcagaaaatcctccccggcatcaaacagggtgagattcatccgacaaccgatatcaacccccacagcatacgggataaccgcatgatctgtagccaatactccccctatcggtaacccgtaaccggcatgtgcatcgggcatcaatgctccggcaagagtaatcggcagccgcatggcgagattcatctgctgtttggctaatgtttcaatgtacttgcttccatatgttttataacccaagggctcatcaagtaaatcatacggcgtcaatcttttttcgataaatacaggagaaagatgttcggccagtttactccatatctcactgtttttatatacctcgggattcttgagaatatcgcccaaggcggctaatatctgctcttttgtttcgtgtttacaatatttgcctacgagagcaacagccagactacgagctacattatctctatatcccagtttacttaaatcttttaaacgtattcccatactgttgtttccattcgcatacaagacaccggttgcctgtcattggacagacaaaggacaatatgcgagataccaatactttaaaaaggatataaccactcctcttcacagcattgaggtgaataataaataaattaaatgtgattgtggaactaatcaacttgcatcgccagcagcagaattgcgacgcatactaaaagatatagttataaagacccatcctcccgatggggcaacttagttccgatactgaagatattatttctctgacataattaaaaaccctttccatcatttaaagggtgaatactctgtttatcggcggcaaaagtaatggttcttttgattttcacaaaacgaaaagacattttttttcaggcacagtagtgatatttatagaaaaacggcacgaatcacttcgcaccgctcctattgctaactcgcgccaaaggttcccgcctcacagcgtccgcctccggagatttatttttaaatgcatgaagcggttagcgttaatctttatattgtcgatgcaaaattaccgtttttctccctatcattcactatctttgcacctcaaaattttaagaactattcaatgataaacgaagaaaagatacataaaagcacttccggatggtgggcactcagccctttatttgtattcttgtgtctctatttggtcacttctatcctagtgaacgatttctacaaagtacctataacggtagccttcctgatttcatcatgctacgccattgccatcacgcggggactgaatctggaacaacgggtctatcaattttcagtaggagcttccaataaaaacatcatgctgatggtgtggatattcatcctggcaggagcctttgcacaaagtgccaagcaaatgggagccattgacgctacggtaaacctgacactccatattttgccggataaccttttattggcaggcatctttctggcctcttgcttcatttcgctatccatcggtaccagtgtaggcactatcgtggctctgactcctgtcgctatcgggttggcagagaaaaccggaatcgatctgcccttcatggtagcagtggtagtgggcggctcctttttcggtgacaatctatcgtttatctccgatacaaccattgcttcgaccaagactcaaggatgcgtcatgcgcgataagtttcgggtcaactccatgattgtggtacctgccgcactggtcgtattgggtatctatatctttcaggggctttcagtctctgccccgccactggtgcaggagattgaatgggtcaaagtgatcccctaccttatcgtattgggaacggccatagccggaatgaatgttatgctggttttgataataggtatctttaccagcggtgttatcggtattgctacaggcagcctcggattcttcgactggtttggtgctatggggacggggatcaccggaatgggcgaactgattattatcaccttactggcaggcggaatgcttgagacgatccgttacaatggaggaatagatttcattatccgcaaattgacccgccacgtaaacggaaagcggggagcggaactcagtattgccgctttggtaagcatcgccaatctttgtacggctaataatacgattgccatcatcactaccggaccgattgccaaagatattgcaaaaaaatttcaattggaccggagaaaaacggcaagtatcctcgacacattctcgtgcctgatacaaggcatcatcccttatggagcacaaatgctgattgctgccggactggcacagatttccccgctcagcatcatcgggaatctgtattatccgtttacaatgggtatttgcgcactattggccatcctattccggtatccgagaaagtattcctgaataaagcccaacctactttttgatattttgcaaataggcttcaagagattcatctttgcccaatcccagtttcttgcgtatccggctacggccggaattcacgctggcacgcgaaatccccagagcgagagctatttcatcagtgctctgattcaaccggatcaacatacaaagcaattcgtcattacgggtcaactcgggacattgacaacgcaatacaggtaaatagtggggataaagtgctgcgaacgactgacggaaccgtatctcgtcatccccactcagcagcatcgggttcagtttctggcgcacattatcaatcacgtccgcatgtgccaccttctctaattcgttattgagagattcgtagcgcccgttcagttcctgatggatggaaatcagacgggaaagccgttctctatggagatgtgcttcacgccggtaatggcggcggcgttgtaacatatataccactaccagtcccaacaacatgaaaagcaatacaaccacaattccaatgtaggtcaacgtacgctccttcaattcgacctcagccatcaatgcacggtattcctgctcttttcgtccggtatcgtaacgcacattggccgcagcggtatagcgcaacttgtctttttcattcagcgaatcttgcaaagcggcatatcggggataaaactccaacatcctcgaacccaaatggcgtgaagcatagattcccaaaagtccttttgccgcaaaggcttccatttcatcccagtccatataggcaaattcacgatgcgcctgttccatcatggcaagaccacgctcttcctgtccgtctcttaccagagccaatcccagccagtatcgggtgcctgaatgggtggcaggacgtacaccggcactgtcggcaaaaatagcttccatatcacgcagtgccgccgcattggagtcgggacacatctgtaaccaatatttagcccggtctctgcgccacgtctttaaacttctctctcccatccgttgcgccacttctctctctttacccagataaaaagtagccgaatcaacctgttccagatccataaaaaaagaagaacgcacacgataggccccgcacagcgccatgctgtcttcacgggcagccatccgaatcactctcgcattgatctccaaagctttctcggtgagggcaagggtagaatataaggcagcaagatcggcataggctcgtatcatgccatccgtagcaataccgggatgtttatcataccattcaacagctgcgagggacagatcaacagcttttacatatcgcccttcgcgcctgtaatagtatcccaaccgtgccaatatggctcccacatcttgggtttccccaccccgccgataagcctctacagcccgttcctgcatccggcacgctacattcgggcgagcactgctgaagtggtaagcccacgaaaccatgtggcaacacagcatgacgaccgactgatcgtccggtggcaatagcacggcaaaagaatcggccaatgcctctgtgcgtctattatcatccgtcatcaaactgttctgcgcttcgaaagcccaaagaggataagcacaatatcccgtcagaaacgggtgtcctgaaagacgaatactgtcgagcaactgtacggcagcttcataagctcctgtttttgataaaacttgattgtacaacggcatgatacgcaataattgtctgcgaagtgtatccggattaccatccggatcggaaggcatatagagaaacatcccgctgtaaatgtccgtgagcatatcataacgtcccgcttcgaaaagcgaatcgtgcagccccatataatgttcgatacactccccgggatgatgggtcatccactctttaaaagaaagtggtgtcactgtggatgattgtttacatccgacaggcaaaaaaaagagtagaataaacccaaatatcaaaatacaatatcgcatataagaagtacaataaatgaatgacagcaaatatatgctatttgtgcgagaagagaaccaagctcaaagcgggaaagtccgtatatagcctcaaataacgtgttttaaaccaataatctattaaaccatctatcgtcttttctaccggacaactctctttatgtgtacttttgcccccataatcaagccccttaaaaactacaagcaaaacaatgattaaagaaaaagcaactccgcatatcggtctggtaaccgatctgacaacaggacaaatagacggaaaaatcactccgggtggaatggttttagttaccggatgtaatattaaaatagagaacggaaacaaacctgtctgtgaagcaatccaactctcccaccaaaatggagaagttatctgcatcgacccaccgttcgaaatgaacgaaccccatatcctcaaattcaagataccggattcactgcccaccggagaatatacgctaaccatcaagactcgtttcgcaggtaaggataaacggcttctgacccaagaacagactttggtgtacatgctaaaattaatcagagaagaataatcggacagagtgaaaaagctccgaacattccgataattataaaaaagaaccggaagtctttgtcaatcaaaacaaaacccttatctttgcacccgctattacgagttagtagcattaattcaaatcattcattaaaaaaacatttatttaaaatggcaacaagaattagattgcaaagacatggacgtaaaagctacgctttctactctatcgttattgcagacagcagagcaccacgtgatggtaaatttacagagaagattggtacttacaaccctaacaccaatcctgctacagtagatttgaatttcgaacgtgccttgcactgggtgctggtaggtgcacaaccttcagacacagttcgcaacatcctttcacgtgaaggcgtttacatgaagaaacacctcctcggcggtgtagctaaaggcgcatttggtgaagctgaagctgaagctaaattcgaagcttggaagaacaacaaacagtcaggtctgtctgctctgaaagctaaagaagaggaagctaagaaagctgaagcaaaagcacgtctggaagctgaaaagaaagtaaacgaagtaaaagcaaaagcattggctgaaaagaaagctgctgaagaagctgctaaggctgctgctgaagctcccgcagaagaagctgctccggcagaagaagctgcaactgaagctgctgctgaataatcggcagtatctatcattcgtaaataggattaaaacaataaaatcctctccggtccgccggggaggattttttattggatcatcccggctacggaatggcccacagagaacgctctacttcagcacgacataacgcagaaagaccacctgatcgccgaccttaactcttccatctgccaaagcctccttgtctaccctgaaagttttcaagtatttttttaaacttttcgttaccgtatagggctgttctttttcatacccgagaatctttatactaccatcctcgttgatcgtcactttacattttatattgaaagtcaacccgcgcaattttttggcttccgttttgtttatccaaaagatataggttgccttcccgatattattctttttctctaccttcttctccttagagtattcatcgtacactttaaatgaaggttcacttttatcgccacatgaagtgcaaacgaataaaaccaataacaatattccaaatactttttccattactgaactcctttctgtttagcgtatatcacataactattatcttcctcaccgatcgactcacacaattcctgtaactttttcctattcttccccttcctaccatctgtcgaggagagataagactctatttccgctttcagcactcccggttccaccagccttatatattgtttgttacggagtgaccaaggggtccacaaccgatccggcatccctcccgcaaagtcattgatcacccggaaaaaagttccgcgcaacgatgccttatccactataaagttcgaaggtgatttcgtctcccacattccatcacccacttgttcctctaccatcaatctgccgacataggcctgaggcaactcatagaatgtggttatcgaacgtttcctgtctccaatgttgagtgtgaagcggggcttcagcctgctttccgaacggatataatgataaagcgtatcgggacgcagttcaaagaaggtgctgatataaagatcgaatacttccgtattggcaccgtacatcacctcattgctataatcgggaagaacagacagatgcctggcagcaggaaccgaatcgagcagatgtccttcaaaatcctgtacccatgccacaaaagggtatccggtaaagggaagtgcccccaccgtaagttcacgtttatcggcatcgactttgaatacagccttggagaccgactgatgtaacggaatggaacgcaacggtttcccagccagatcataaacatagatggcattgctgttatcgaaaggcatcagatagatacaattatgtttttcgtcaatctccgctttgtatacggcacgatactctcccggcccttgcccgatagcacctatattggtaacaaactctccttttttagtaaataaccggcagggatggagttcataaacagaaccgtagacaaggatgtaattttcggaaacacacagattgttttctccgaccatcgcttcatcacggttatcgagcttgatgatttgaaagtctttcaaaaagaaactgaacggtaagtcaaccgtatctttcagcaagctgaggtcacataccacaaccgagtcttgaccggcccattgataggaagcgaccaccggccattgctccgaaagatttttctcttcgcccttgggaacgaccgaacaggaagaaaataaaaatactccccccagaattgaacttaggagatgaaattgcctgatattcttcataaactctccatttctatatcatgcaaagataaaaataaaaacgaataatctacgaatactccgtagttttttttgattcgtttcagaatttatctatatacacggaaagggagtagcgacaaaaatcataaaaaaagatgcccggaacaaatcccgggcatctcctctataagtctgttttgacaaacaggtaatcttgttcgattaatatctgtcacgaccgccgccatagccgccgccacgattaccaccaccgtaaccaccaccacggttgttaccatagccgccacgattaccaccaccgtaattgctgttacgacgcgggccttcttctctcggacgtgcaactgatacggcaagtgtctttccgtctatttctttttcgttcagtgctgctatggcagcatttccctcttcgtcattaggcatttctacaaaaccgaatcctttagaacggccagtttctctgtccataacgattttggctgaaataacttctccaaactcttcgaataattctcctaaatcagcattgctaagattatagctgatacctgcaataaaaatgttcattgaaaaaataattaatacaattaataaaatttgttatcttagagaagtcttaataaggagataaattactctacaagtaccttggaaataaaacacatcctatcagaaatctttaatacgcggtaaatatagacatttacaacagactgagaaacaaaatcatcattttcttttattttttttattaaaattgagattttgacgatgctttagtctcacctctgtttcttccgcctacggctccggcgcctctgcatcttcttgtgtttatagcgctgtatccgtttataaatcatccagccgctcatcaaacctactactacgaagatcaggatcgtaatgcccactcccagattgtctcccttaatgcgcgaccagatttcaagaacatctttcgtcttatcgccgaaatcacgaatcatggcacaacgttctaccaccttacggtccgggtactgtatcttgtcaatctgcaggctgtctgctcccggtccgaagaaatagctcaaatccgaataataagtcagggtggtgtctgtcttcgcctccatgatttcaggcgaagccacagcactcacataaccgctcgcttccatattccgcaaagcaatgtcgggacggcacataaagttgatgaaatagctggcagcttccggattgccggcatacttaggaatcacccagccgtcataccagatgttgcttccttcccgaggcactacatagtccaggtccactcctaccgcatccgcttcttcgatggcccatttggcatctccgctccaggtcatattgagccatgctttatttttggtcatcatctctttaccgaagtctgcctcccaaccggctatattgggtttcatcgccttgaggtatttttcggcaatctccattgcacggggagaatagtcgttcatcagatcctctactgtcaccctgcctccggccagatcacgggcatgtgcgtaaatgatggccgtcccgtacgcatcgcggtaactgtctttcatcaatattttgccggcatatttccgatcccaaaggcaactccaactttcggcatccgcatcgggaacaaaagccttgttatacagtatcccggccgttccccacatgtaacacacggcataatgactggcaacgcgtccgggttgactcaacttatcgatctgttcccggatataaggagacacgtcattcatgtagtcgggcgaatggggaaaaacggtgtcgatgggcaacagcaagtctttcttcaacatccgctcgatgatgtattccgaagggcataccacatcaaaatcttcgtgccctttttcgatcttggtcaacatgatttcgttgatatcgaaagtttgatagacaatacgaatatcctcgcctgtctgctccttataatatgcctggaaatcttccagcactccgtcaccgatgtaatcggcccagttataaattttcaataccttttcgcggggctcaccggaattgtaacaaccggaaagcataaacgacgctgcaaggcaaagagttattaacagcttattcattaacactttatactatttcttgattctcgtaaattctcttctattttggtttaaaacccaaaggacgtgggtttcaaaccaacggacactatctttaaaagcaatgacagttggggtttaaaccggcggtctctcgctttaaacggcgaggccgaccaacgtcaggtatcactttttctcttttccggcacgccggttaatgacaatcagcaaggccagcaccaccacgaaaataatggtcgaaagcggacgcagttccggagtcagccctcctttgcgggcatcggcatagatataggtggaaagtgtctcgagaccttcgttaccgatcgtaaataccgttactgcaaaatcatcgatagaaagtgtcagcgcaagcatgaaaccgctaatcattcccggacgaatctccggaacaatcactttgcggagtgcctgcatcggagtcgctcccagatcgagggcggcttcgtaaatattaggattcatctgcttgagacggggcaacacgctgagtaccacataaggagtacagaaagtaatgtgtgccagtacaacggtcgtatatccctgcgatatccccagcgacacaaacaacagaaacagtgaaataccggtaataatatccccattcaggataggaatgctgttcacaaagctgatggccttccgcgaacgtgccttcaggttgaagatgccgatagcagtgatactccccagcagggtggaagccgtagctgcaatcaaagcaatggtcacagtattgatcagcgcattcatcagcgaatggtgagtgccggtagtgaacagtgacgaatacagttttgtggagaatccggtccagttgcccagcacttttgcctcggtaaaagagtagatcattataatcacgataggcgaatagagcagcaaaagcagaatccacaaataggtctgagcgagaatcttctttaccatagcccacctccttcgttcgtattatctttgtcgtcggtgctgaacagagaggtcgcggcaatcagcagcaacataatcagcgacagggccgcgccatagttccacatactgttattgatattctcctggattgtggtaccaaacagtttgatattgttcatcgtcaacaactcggcaatggcaaaggttgagatagtaggcatgaaaaccatcatgatgccactcatcacccccggcatggaaagcggaagcacggccttaaaaaagacctgaacgggattggcacccagatcctgcgcagcctcaatataactgtgatccatcttttgcaaagtgttgtagatggggtaaatcataaatggtatgaagttatagaccataccgaatatcagggcaccctcaccgagcggaacactgaaaaagtcgaacaaggctaccgtagccaacgtacgtaccagaatgttgacccacatgggaagaataaacagtacgaccattgttttcgaccggttcagttttgcgttgctcagtatccatgctgccggatagcccagcaggatacagacaatggtggtaataatggcaataccgatggaatagacaaaggtattgatagcttcgtggtgctgaaaaaacttcgcaaagttttccaaagtcagatgtccgctgtcatcggtgaaagcataaaccacgataaggagtagcggaataacgacgaagatcgccgaaaagataatgtaagggagtgtccaactcttacgtgatgaaaaaaagaccgataatcttttcactcttaactcttattttattagttcttaattactctgataccgtccggggggatggtgatacctacacggtcgccatcgtcccatacgtcgttcgtatctacaaacacattctcgtcccaatccgaaagcacagtcagatgataatggtcacccttataaaggataaacttcacctctccggtcagtgcaccgtcttcttcgttgtcctgaagaatcacgttgtcgaaaccgacttccaccttcacctcgctgcctgcttcgatccccgtgacaggagcacactcgaagttgcatcccaaaaactccacatgggtttcgtcgatcagcttgccttcaaaagtattgcacacacgctctttcttcataatatgaatatcgaacggcttcaccagcaacccgacgagagccccgacttcaaaatgatgatagtcttgtaccagaaattcatagccattgcagagaaccgtcatttcgtaatgtacgcctttaaagacagacgattgcaccacaccggtcagttgcgccgcttccgaaaccggaaagatgtaaaggtcttccggacggatcactacgtccacgggcatgttctcgccaaaaccttcgtctacacactcgaattcggtattacagaaacgtaccagtttgtcgtggatcatcactccgttcaggatattactttctccgatgaaatcggctacaaacgaattgataggctcgttatatatatcgatcggagtaccaatctgctggatgcgtccctcgctcatgactacaatcgtatcgcttagcgtcagtgcttcttcctgatcgtgagtgacatacacaaaagtgatccccagagatttgtgcatctccttcaactccatctgcatgtctttacgcattttcaggtcgagagctgccaaaggctcgtcaagcagcaacacttccggttcgttgacgatggcacgggcaatggccacacgctgctgctgtccgccggacagcgaatctacatcacgatattcgtaatcggtcatccccaccatcttcaaagcggcttttaccttcttctcaatggtctgcttgggcattttcttcagtttcagcccaaaagcgatattatcatatacattcagatgcgggaacagagcgtatttctggaataccgtgtttaccgggcgtttgtgtggaggagtttgtgtgatttctttccccgatatttttatctcgccttccgaagctgtctggaagccggcgataaggcgcaacaaagtagtcttgccacatcccgaaggccccagaatggtgacgaactcacctttctttacattcagggtcacatgatccaaggcagtcttctcaccgaagaatttagacacaccgttcacctcaataatggatttgctttcttgcatattcatactaatttggggtgcaaaggtacacatttatccgattcgtacatacatgttaatctaatataacagagaaattctatccggaattaaaaaaacacctatctttgcataaatatttattcactaaacatactaaagcaatgaaaaagttaacttatctggctgttgcagcagttgctctcggagtggcatcttgtaacaccaacaaacccggttatgtaataacaggtactgtggaaggcgctgccgacggagatactgtatttatccaggaacgtgtgaacagacagttcaacaaactggacacagctatcatcgctaacggaacatttacattcgaaggcgcacaggattccgtagtgaaccgctacatcacttattctaaagacggcgacggagtctatgtggatttcttcctcgaaaacggtaaaatcaaggtaaacctgtctaaagacgataaatcggcaaccggtactccgaacaacgatgcttatcaggagatacggaacaagataaatgcaatcgaccagaaacaagccgctatctatcaggctatgggcgacagcacattgaccgatgaccagaagatggctaaacaaaaagaattttcagaactggaagaggcgtacagccaggctatcaaagaaggcgtacagaagaatatcaccaatccggtaggtatcatgttgttcaaacaaagcttctatgaaaactctaccgaggataacgacgctctgctgaaacaaattcccgccaactatcagaatgacgaaacgattgtgaaaatcaaggatatcactgaaaagcagaaagctactgccgccggacagaaattcatcgacttcgaaatgctgacacctgacggaaaaccggtgaaactgtctgactatgtaggcaaaggcaaagtggtattggttgacttctgggcaagctggtgtggcccatgccgccgcgaaatgcctaacattgtagaagcttatgctaaatataaaggcaaaaacttcgaaatcgtaggtgtatctctggatcaggatgccgataaatggaaagatgccatcaagaagctgaacatcacatggcctcagatgtccgacctgaaaggctggcaaaatgaaggtgcacagttgtatgctgtaaacagtatcccccacaccatgttggtggacgctgacggaacgatcctggcacgcggcctgcacggcgaaaagcttcagaccaaactggaagaagtgctgaataagtaatcagcggaataccatatcataattcaccacagattacacagattcacacagaatagctttaatctactgacaacccatcctatttatctgtgtaaatctgtgtaatctgtggtgaatatgaatcaggtacgggctttcgatttatttcagtgagtcggcataagaacagagcttcacaatctgatccacatcttcaaaattcaccttattatcttcaatatacttctccacctccgcacgatgttttgagtagattttggcaagttgcttaaagttacggaactgcttcattttatcatccttctccacccaatagacatggtgccgattgctgacaataattttttcaccttccagcttgtaagactgtccgttgctcgttatggtgccatagctctgaactgccgttgtttccgaacgggtaccataagcccccatgggagcttccttacgggcggtagctttatactgaacgtaaaccaccggtttggtcggcaacatttctataccggctccgttggattcgggataaaatgtacgtcccgctatcttgatcagcagaatatctcccggattggcaagctctttcacctgcttatcctgagggtctataaaataaaacttattgactactatactgtagttcattttagacttcaattcgcctccggctctcaggagcacttgggcatcttcatacttatcaaacaggaacgaagccgtatcagcctgagctctcaattgccacaaactgcacagtgcaaaagcaataaaaataaaaatccttctcataatacatcgactttaagcaataaagggctgtcttgacagtatacacttcaaaacagcccttcaaaataaatctggtaaatctctctttactctacatcaatcagacgaaccaacgtacgtagcagaagtcttgacggtgaggcagatcctgatttttcgggaacatacggtatgccactttaaagcttcctgcattcgacaagctgtgcttagcctggaatgtatacaggtcgccttctttcttgatcacactgaatggttctaccgaatatacatgctgcttgccttccggagtcgtataagttgtaaccaactccagtcccactgcatcgttcaatcctttctcgtcaacgacaactgtaatggtatactctttgccgctttcgatatcgccttgtgcaatgtctgcttccctctcttttgaaacaatctcgatagagtcccacttagcaacgacttcttctttccaggctgctatctcttttgcctttgcattgtcattggcagacagttctttgaaacgtttagcttccttgcagtagaacttactgtagtaatcgtcgagttgacgcttcatggtatagtgaggagcgatctgggcgatcgagtttttcacactcttaatccagccttcagagtatcccttcttgttgcgtgcataatacagcggcaggatttctgtttcgaggatactgtagatagtagctgcgtcgagctgatcctgatgttcctggttctgataagtacgtttttcggtcaatgcccaacctgcaccttcgcggtaaccttcaagccaccatccgtcgagtacagagaagttcaatacaccattcatcaacgctttctcacccgatgtaccggatgcttcgagcggacgggtcggagtattcaaccagatatcaactccggtcaccagacgacgggccaactgcatatcgtagttttcaaggaagatgatcttacccaggaattccggacgctgagagatctcaacgattctcttgatcagtccctggcctgcaccatcgtgcgggtgagccttacctgtgaagaggaactgtaccggataatcaggattgttaacgatcttagacaagcgttccagatcggtgaacaacaagtgagcacgtttgtaagtggcaaaacggcggccgaaaccgatcagcaatgcattcggattgatcttgtccaacagcgatacaatgcgtgaaggatctccctggttcttcaaccacgtttcacggaactgcttacggatataatccaccagcttgttcttcatcgtcacgcgagtcttccagatctcttcatcgggcacattatagatagcttcccagatcttcggatttgactgatcgtacaggaagttttcgttgaagtatttagcataaagctgtttccattcggtagcgctccaagtggggaagtgtacaccattggtcacataacccacatggctctcttcggggaagtatcccttccagatagaagagaacatctcctgagaaacttttccgtgcagccagcttacaccgttcacttcctgagaagtgttgcaagcaaatacagacatacagaaacgttcgcccttatcacccggattgttacgtccaaggtccatcaggtcgtcccagctgatacccatcttaacaggatatccgcccatatatttaccgaacaagccttcgtcaaagtagtcgtgaccggcaggcaccggagtgtgaaccgtatacagtgaagatgcacgaaccaactcgatagcctggttgaaagtcaggccggtagctacataatcgcagatacgctgaacattgatcagggcggcgtgtccttcgttacagtgataaatatcttttttgatacccaatgccttcagtgtcagcataccgccgatacccagcaggatctcttgtttcaaacggttttcccagtcacctccgtacagctggtgagtgataggacggtcaaactcgctgttcatttcattgtctgtatcgagcagatacaaagaaacgcgtcctacgttcactctccatacatttgcatgtacgtagtaatccatataaggcacatctactaccaacggtttgccgtctgcatccatcacgcggtcaatagggagttgtccgaagttctgtgcctcgtaattggcaatctgctgtccgtccatcgacagggtttgtgtaaagtaaccatagcgatacaggaaacctactgcacacagatctacattactatctgaagcttctttcagatagtcaccggccaatacacccagaccaccggaatatattttaagaacatgattcaaaccatattccatgctaaagtaagccactgacggacgtttgttatcgggcgtcacatccatgtagtctctaaatttagcatatacgtcgttcatgcgtttcaggattactttatcttttgataaagcttccagtttttcgtaactcatacgttcaagcaaaagcacaggattctgaccggcttctttccagagagtcggatccaagtctctgaagagttcagtagcttcataattccacgcccaccaaatgttgcgtgccagttcagatagtttctctaattccgcaggaacacgtgactttacagttacctccttccaattcggagtattcacattacttactttaattttcataatgttattgtttacttgttgatgaataaatacttagtttagttgacgtttcatggcattacgcaaggcgatgtcataagcctcgtaataatatttgatgaaatgcttccatagagcctgttcggccacagccgcagcttgtttgcggatctctttcacctcattatctgttttacccgagaacagtgcgatcgtatctttgataccgtcggctacctctgagtaattatagtccgaacggtgtaacacctctaccccattatcgatgccatgctgatttttcaggctgttcacccaaaggccgaagcctgccaggtctgttgtaatagtaggtacgcggaatgccacactctcaagcggagtgtatccccaaggttcgtaataagaaggatagacactcaagtcttctcccaatatcagatcataatattctttgttcaggattccatcttttccatccagatagcacggaacgaaaatcaccttcactttatcttccggacgatttcccataccaagatatttgagcatatccagaacctggtcgtgggtcatgttatgcagccaatgggtaatgaaaggtacttcgagcggagtatcgaatttttctttgcttttcagccgtgtctgcaaatcctcgcggggctctcccacccaacccggtacattgacaaatgccagcacgttcttctgcaggtccttgtcccggttcaaacggttcaatgattccagaaacacgtcgatccctttgttcttaaactcgtaacgtccactggtgccgataattaatgtgtcatcgtccatatgggtacccagaagcttattggccacattcaacatcaatgcacgcgcacgtttgcgcttaccggtgaaagcgcttccctgaggaacaaaatcgtcctcgaaaccgttcatcaatactacatcggcggctttatcaagcagttccttacactcgttgttggtgatttcgctcaccgtcgtaaagcagtcaacgtgatgcgcagtctgcttttcaatcgagtgcttcgactgcatattcagctcctgtgccatctgatcgccgttataagcaaacagatagtcatataaaggtttatcgtttccggcaatgctacggccgatagaagtggcatgggtggtgaagatggttcctatttcgggaacagccaattgcagatacagtgctcccaggccggtcatccattcatgtgcctgataaatgaccttatcattttcagtcaggttgtagcgatagaagctttccaccacttttccggcagcatacgaaaacatggatgcttcgtcataatcgccgtaagcatgcaatgaatcgacttgaaagtgattccacatttcagtatagatttcattctttttctcaaaaaaaggctgaaagtcaacgagaataacaatgggttcacccggaatattccaacgtccgacacggacagaaaggtcatctttcttgagggcatgttctttccatgccgcacaaagattgtcagattctataaacaaaggattgtcctttccttgccatacatccggccctataaaaaataatttgtcacggaagttagtttgcaacgtatttgcccttgtagacaaaacagtataaattcctcctaccttgttgcacacttcccaactggcttcgaagatataatcgggggttaataaatcttttaccatataaatgtttaaaactctttttattacgcaggtgcaaaagtacgcattatttattgaaaaataatgctttatgcaaaaaatataagcaaaatagcacaaacaagcgtttacaacgagatttcagagcataaaaaaagacttaagtgttttcggaaaacgcttaagtcttttcagaaaacacttaaacgttctgtcgaaaacgcttaagtgttttttataaatcattagtttatgcaagcgcactaccgataaggaaggtagcagccaatgccacgatagcataaagttcggggaacacagcaaggatcaatgtgttgctgaatacattgtggccttgtccgatggccgcaataccattggcgcaaacctgtccctgacggatagcggaaaacagagccaccaatccgagagcaatacccgcacccaaaacggcagaagcctgaatggcggtaatctgcggagtaaggataccgaaaatagtctggaacataaagtaacctgcgaaaccatacaatccctgtgtacccggaagagctgtcagtacgaggaagttaccgaatgcactatcgtttttcttcaatgcgccgatagcagcgttacctgcaatagtcactccgtaagcacttccgatgcctgacaaaccaaccataaccgcgatgccaatgtaagcaataaacaaattcatttccataatcttaattttattttttaatttattattctattaatttctttttattttctgaatggtttgtactctttgccaccaccttcgtaaccggaattcttgaaaaactccacgaaggtcagacgcataggatgaaccatggctccgagcacattcataaagatattgatggcatggccgattacaaaaatcaataccatcacaatggggccggcaatcacattgtccggactcatgcccactgccaaactattgaatacgccggcaaggatacctcccgacaatcccagagcgaacaaacggacgtatgacagaacgtcgcccaacagacctgtcgccatgttataagaatcccataagcccagcccgatattcaggaagatgttcttccccggactgttgaacaggaaaatcataacgccggcaatacccatgatgatcaaatgaaccgtacttcccatcggcatcactttcggcaacagtgccgagaaggctaacgatagcaagaggatgatccatccgattgtagcaatggcatacttgaagccaaactggatagtctgattgacagctttcagtaccatgccgaacaagatctgtaccgcacccagaatcagtgagagctggaacatgtcattattgtccatgaaaacggcactcttcaggcgctggatgaacggccagggcagatcgtaaatattggctccgaaaaaagtcccggtcagcaatccgcagaagaaagtggaagttgccagtatctgaatcagcgaaatgatcgatttagccgactgactcagttttttcgccaatagacgataagccgtagctcctacaaacaggaataatccataaccggaatctcccaggcagagcccgaaaaagatcataaagaacggggcaaagaacggggtcaggtccagttcattatacttgggcaacatgtagagtttgcaaatgggctcgaaccaggcaaagaaacctttgttattcagttcgatcggcacgttgtcttccggtgtcggatctgtgatctcataataaatatgtgcatcgttcagataagcctctatctctaccttgctggtagcaggggcccatccttcgagcaacatcaatttgtcacccgcagtctgctctgtactcaatacgacttttgaaaattctatttcagtctgcacctgtttcaaagcctccttcagcgaaggaatatcggtttcggacaaagcgaccaacttcttttcattctcttcaagtgcggtctctgtattcgcatattgcgcctcgagctgggccagtgactgcgatggcagtttagcttgctccacatccagatcgacttcctccccgtccttggtcacggtgatgaaaaagacttttgaggatatgcggcagatgatcatagcgttgtattccgcttcccattcttccttgtagttaccttcggagcaggtatagaagccgactacataaccggcatctttcaaacgttgtatgccttccggctcaaagttgccccaagcctccaaagcgtctttctccttgccacaggtttgctgctgttgcaacagtttactgtgttcggcctgcaaggcatctatttcatcgagcacctgcaaaccacgttcggcactaccgccattggcagcaatgaccgcatccttctcgtgcttctggttctgaagcaacttcaatgcggcggccagacgggcagaaagacgaatattatcttgcagttcgacattctccgccgctccctgctgcttctctacaatatggaccactccgagttcacgaagactgttcaggaaatcttcgtactccttatgataaaccaggaacgtgagtttcttcattttcgtaatcatgcttctgcctccttccttttttcctgctgtgacttcagaatcttttgcgaagacttagacaaattttcttcatcttccatgaatcgtttgatcttgcgcaaagcatcctgataccccggtatctgaaccttctcaaaaagattcactttctgagtggtctttttcctcgcatgttctaacaagcccaacttggccagcgtaaactcacgctctatagcggtatgtgccaactccttaagcaggtgtataccgtcggcataccacttaggagcattaaacagactgtacggacggatctcgaaatccacattttcgagcaaaggcacccgtacaccggctatcttcttgacaccaagatgaacatcatttacttttatcaatgaggtgtcaaactcattccaaagtgcgaacatggcttcataagcctggatttgtttttccagcctttcctccagatcggcagcttcgcttttacagcgcttcacttccatgcgaagggcactctccttgtttttgataatcgggagagtacgtacccgcactttcagttgcttctcaagctgctgaagggaggttttgttatattgaaactttatagccatctcgtttatttactattttttccaatactgatctaccagttccttcttgatatttacttcttccggacggaagtatttgccgaacagtccccaggctacatcgagcatttcggtcgtatccagattgacgtcgatggccagcaactgattggagtaatctttggcaaaagctaaagtacgttcgtcatagttggtcaggtcgaaaccattttccaatttagtcttggcattagcggcatcggcatacaaacgcacggcagcattcatcacctgcggatggtctttacgggttttcttaccggttaccaactgtttcagacgggacaatgaacggaacggatcgacaataaccttaccgatgtcactgtcacggcgcaggaacaactgtccttcggtgatgtagcctgtattatccggcacagcatgcgtaatatcaccaccggacaatgtagtcacggcaataatcgtgatggagccgccatcggggaactgtacagccttttcgtagatcttggcaagatccgaatagagcgaacccggcatagaatctttcgaaggaatctggtccatacggtttgacacgatagccaaagcatcggcatacgaagtcatatcggtcagcagaaccaatactttctgattgtgctgtactgcgaaatattcagccgcagtcaaagccatatccggtaccagcaaacgttctaccggagggttctccgtggtattcacgaaactgacgatacggtcgagcgcaccggcattggaaaatacattcttgaaatacaggtagtcatcgtttgtcatacccataccgcccagaataatcttatctgtttctgcacgtaacgccacgttagccatcacctggttgaacggttggtcgggatcggcgaagaacggaatcttctgaccggaaaccagtgtattgttcaagtcgatacctgcgataccggttgcaatcagctcggaaggctgtttacgccgtaccgggtttacagacggccctccgatcggtacctcctgcccttcgatctccggtcctccgtcgataggatcaccgaaagcgttgaaaaaacgtccggccagttgctcgctcactttcagcgtaggcgatttacccagaaatacaacttcggcattggtcgggataccttccgtaccctcaaacacctgcaaagtcacttcgtcaccggcaatctttacaacctgagccagtttaccattcacagtggccaactcatcatatcctacccctgtagctttcagcgaacaggtggccttggtaatctgagtaatcttagtatatattttttgaaatgcttttgtagccatgttattatttacaatttagtttcaatctactatttgacacttctctcggcaaccaactcctccaattgcttctggaaaccttcatattgttccgacttgaacttcgaatagttcatttgcttgcagatgttaatcatcttcttgaagtaatccataacctcattaaagttatcaaactcaaattccgtatgacagatgtctatcaccatattcaagatagcctcctgacgctccatcggagtcacggcatcaatctcgtcgaacgcatcctgctgcaagataacgaagtctatcaactcggacttccagaagattacgtgatactctaccggtacaccgtcatcacccaggatattgatctgctcggcaatctccttaccgcgttgcaagcgagttttgatttcgttcaccttaccgatccactcatcattgatatgctcggcaatgtatgcttcaaattcaggatattcgatatacttggaataagaatcgatcggatttacagccggataacgcttcttatcggcacgatcctgctccagagcatagaagcaacgggctaccttcttggtgttctctgtcaccggctccttcaagttaccaccggcaggtgatactgtaccgataaaggtaatagaaccgctctcgccgttattcagtttcacgtagcctgcacggccatagaagttagaaatgattgaggacaagtccatcgggaatgcatccggtccgggcaactcctccatacggttcgacatctcacgcaatgcctgcgcccaacgggaagtggagtctgccatcagcaggactttcaatcccatggcacgatagtattcggcaatcgtcatggccgtatacacagaagcttcacgcgctgctaccggcatgttcgatgtatttgcgataataatggtacgctccatcagcttacgtcccgtgtgcgggtccaccaattccggaaattcggtaaagatttccacaacttcatttgcacgctccccacaagcagcgataatcacgatatcggcttcggcctgttttgaaatggcatgctgaagtaccgtcttacccgtaccgaacggaccgggaataaatccggtaccgccttccactatcggattgacagtatcgatcacacgcacaccggtttcaagcaacttgaacggacgcggtttttctttataattcgtcatagcccgcttcaccggccatttctggatcatattcacttcaacggtatttccttcttcgtccaccaaaacggcaaccacatcttcaatcttgtaatcgccttcgggaacaatcgacttcaccgtgcaaacacctttctgagtgaaaggcaccataatcttcaatggctggaagttctcgtccacctgtcctaaccaggcagatgcttccactttatcccccacactgacaaggggaacaaaatgccatacacttcctttatccaacggataagtatattgtcctctcttcaggaatactccatccatcttatcaaggtcgttttgcagaccatcataattctttgataacataccgggacctaaagtcacttcaagcatgtgtccggtaaattcggcctcggctcccactttcagtccacgagtactttcgaacacctggacatatacatgtgtacctacgaccttaatcacctccgccattaatttgtctccgccggttgagatataacagatctcattctgagctaccggcccatcaacgacgagggtcaccatgttggcaataacgccactaacagttccttttgttgccatatattttttagtttatttatccgagtttggcagtattacctgaattcagcaggaatctgcacttcattcttcagtgactctatgatacttcggaacaattgattgcctctttccttatccagagagatccaacgttcaatcatttccagtttcaacagaaaagcaaaaatacgttcgattgtgaaataatcgaagaagatagcatcttccatccagttccaccgcaaagcatccagctttttctcacgttccaccagttctgttatttcgctgattttcaccaactggtcaagaaagtccacttcgcccgacagtccgaaatctctggctccggaagtccgcaatgcctcacagatctccgtatcacccacaatattgcaggcaatatcccatttatatttacgcgcagtcaatgctacgagaatattgttaatagtgagattaaattcgaaccaggaagccacaaacttatttccacacttcatcgcataatcataataaagtgcagccagatgatcttccaataaaacagcattctctgccggagtattaaaataagcggaaatgaaagtagcaagataagcgggaaactccttggcactgacttctcctccctctttaagggtagaaatatattccgccagttcctccgcggaaaaatttccccgagtatcaatagcggcttccttatctttcaagagcttcagcacattggcattgtcaaacttcaaataaaacagatcaatcaatttctgatctgaaactgacaagcccgtgtaaatttccgttttaaaatcagctactgtatagctcagcttgctgtcctcaagtgtgagttccggcaaaccggctaccaagtaataatatttactcataacgcatccctttagaataacatttctaccaactgaggacgcaggaatgctttaaagtaattcataaattcctcttctccgaaattcactttatatgaaccgtctgcaggagatacggaaaacaatgcctttatgccattcacttgttctatggtaacacctttatctaacaatgctttagcattggcagcaaaatactttttcaaagactccgcatcagaagttgagatgataatcggttcgtctacactccatttagaagccagagctacgataaatgcattcagaaaatctttattttgtgcaaactcctttaccggtgcagtcacaatcttgtcagtcaccatagtggctatttccgattttaaagcattcacagcctgaccggcaaaaagtttcagttctgatttggtgttttctgtcagttcgtcggcagatttacgagaggaggcaataattgattcagcttctttatgagcatcttcaacaatttttttagcttcttcctgagcattcgcaataagacggcgggcctcttcattacctttttccacgccttcacgataaatcttatcggtcaactcttgaattttgttttccatattcacggactatttagaagtttatattataatatctaagtgtttcttatcagattctcgccaaaagtacaaaattcaatctgataataaaagagaaaagagcaagaaaactgttcattatcaagaaaagaatcgtcaaaaagtaaaggatatgacgatacggacacatttatcttcacgtttcatcttttaaggcaacggcaaagataaggagcctgataatacatcaaagacataattatgataaagccggaaaactgaaggttgaatctggaatatatcggatgaaccaaggaagaggtgttcaggaatccttgttaaacagggtatggtataaaacaagcatccccttcggtctttcgaccgaaggggatgaaccatctgaaaaaaacggcgactacctactctcccactgttacgcagtaccatcggcgtgatcaggct

SEQ ID NO: 5037 - DNA, 20559 bp, Unknown
  gut microbiota DNA sequence
tacaaaggcaatttacgaaactacacaaccacaatatcgcaagatcaaagaggaaataaacatatccggcaatgtttttccgatgaaggagatcgaaataaaatcgcagatatcgggagtactggacaagattaatgtttcgataggagataaagtgcgcataggagatcctgtcgcctccatcatgctggtcccaaacgcatcggatatggaacgactggaatataacttgaacactgcccaaattgagtataaagcccgactggaagattataaacgagaacacaaattgtactcaaaaaaccttgtggcacaggcagagatggactcttacacacaggcatacgaattatctaaggagaagctcgcctctgcccaaaatcaattgaacatcttgaaagaagggcgtatctctcctgaaacggcatctaacatcgtaaggtcgagtattagcggcgttattattgatacccctctggaaacgggggcctctgtaatagaacgcaataattttaatccgggaacaacgattgccgttgtggcggaaatgtctcggtttcgttttaaagcccttgtccctgaaaaatatctgaaagatatcgctttacaagacacgatctcactcttattcaatgcctatgataatttacgaacccgggcagtagtaacaaaaatttcatccaaaggaaatgcagagaacggaattatgaaatatatgcttgaggcagaatttcccgtctcggaaaatatgcctgttataagatcgggatattctgcaacggccaatatggtgataaaacagaaaaagcacactttatccattgatgaaaaatatgtcttatacgagaatgactctacatacctctatctgctggatactgtgacacaacagaaaacaaaacaaatcatcaacatcggtatttcagatggaaattatgtggaagtgataaaggggatttcattaaaggataaaatagtaactaactcaaccgataaataaaattagaatccacatcctgacgtataaatgtcaccctcttttatccaaccggttcgattccggataagttttgtccgaaaccggaagcaaaagtaagagaattatgatatatttgcagccggaacccaaatgtgtttaatcagaaatggcagaatcgactatcatcacaggacaattcgtacgaatcagtcaggtacccgccagtcttggcgaacggatactggctcgtattattgactattttctgctgtttatctacattcttgccacttcttatatattggggaaactcaatatacatgctttttccggaagtacgtttttcctgttgttcctgttcatctatctgcctgtactatgttactcgttactttgcgaagtttttaaccaaggacagagtgccggaaagaaacttatgaatatccgtgtggtaaaagcagacggtacgacacccagcctgagcgcctatctgctaaggtggttgctctatgggatagacgtaactattaccggaggattgggcgtactggtcatactattgaccaaaaacagccaacgtttgggagatctggctgccggtacaatggtaattaaagaaaagaactatcgcaaaatacaggtaagtcttgacgagttcgattatctgactaaaggatatcatcccagttttccatcagctgccgacctgtctttggaacaaataaacgtaatcagtaaagcattagaattacatcataaggatcggacaagacatatcgcacaattggcacccaaagttcgtaccctgctatctgtaaatcaaacaaatataaacgatgaaaaatttcttcagaccgttgtaagagactaccaatactatgcattagaagaaatttagtatatcttatttcgtaaaaacagactaaaccgggcttttattcatcccactttcaagtaaatatccggactcctatacacacctgatacttcgaaaaaacataatgcactttagtaggaggagaagaatcaagacgaagtaaactatcacacatacatgcaacaaaaaagcgtgcagaagtgtttctacacgctttttatctcttggtttacgaagactggcttactccacctgtcccagagagttgccgtattccatttctccctgcaccacaaataagatatcttccgggtcatattcacccacttcatcttttttggcttctttcacgatgaattctactacctgctccaagtcgatgtcaacataaccgtcagcatcgggctgaacatccaggattccgctttcagagtagtactcatcaatcaaatcgaggaaatagtacaactcgtcttccgaaaacttttccttcaattcctgaggcaaataattccggatgaactcgatggtcttttcatcatcggcgtcatttaacaaaaaatcgtcttccagtcccataaacaaatatttttaatgaaagtatattataataatttctcaactttctctacaaatgcaggtttacctacggcaccgacttgtttgtctaccaattctccattcttaaaaaatagaacagtaggaatattgcggataccaaattctgcaggtagatcactgttttcgtctacatcacatttacccatgatcacttttccttcatattctttagccagttcatcgatgataggacctaccatcttacaaggaccacaccaaggagcccaaaagtcaataacaaccggtgatccttctgcgaggatttccttaaagttgttgtcagtaatctctaaagccattttctataattattaattgttagttattaagtatctatcactgttatgcggcaaagataatcaatttatatgaaacgcaagttcgggacgttcctttaaataggaaattaattctctgccaaccgaaagtttcacaggacgggaaatcaggtctacatacatcttcccctccgtatccgttactttgaaataaagttccgtatttcccgggtgttctttcgttaaagaagcaagctcggttaccaaagccgaattaagttcggcaaggggaatcagaatcgtaatcttctctatcagttgttccttgacatcgggcagcaattccatcgaagtaatcttgacatcaagttcatcgggacgccattgtttaggttgacaacgggctttgataaacaagaaagtaccttcacctaaatagccttggaaagtaacccagtcatttccaaagaaaggaatctccgccgaaccggaataatcttctattttagctataccataaggatttccattcttactgataccccgacggacactggtaacaatgcctcccatcgtaatctctcttcctgccaaagccgatttatcatcaagctcgctcatatgtgtattgcaaacatgttccaacacaatggcatattcatcaagcggatgtgccgacaaataaatacctaccagttcgcgttccttattcagtctctccaaatcgttccagcgttccgccggtagaatttcgggagtcgctatatcgataacgttatctccaccgaacaaagaattaacggcggcagccttatcagcttggtaacggttgccataacgcatcaatgtctcaagaaaagtctctcctttgctgttcacagcaaaatactgttcacgcttcagttcaggaaagctatcgaatccaccggcaagtgccaggcattccatatttttcttgttacaagcattcaggttgacacgctgcacaaagtcgaagatacctttaaagggaccgttctcttttcgctcctccatgatgctttgcacggcagcctcacccacacctttgacggctcccaatccgaaacgtatatttccattccggtttacggtaaacttcaggttactttcattcacatccggtcccaacgtctgtactcccatcattttacactcgtccatcagtttggtaatatcagtgatattcgacaaacttcggctcatgacagcagccatatattcagccggataattggctttcagataagcagtctgataggcaacccaagaataacaggtggcatgtgatttattgaacgcatacgatgcaaatttctcccagtccgcccaaatcttttcaagaactttcgggtcgtgtccgtttttccttccgccttctacaaacttgggtttcatgtgatccaacttatcacgcaattttttacccatcgctttacggagggcatccgattcaccacgcgtaaagtcggccagcagacgtgacaaaagcatgacctgctcctgatagaccgtaataccgtatgtatccttcaggtatttctccatgacaggaatatcatattcaataggcttacgtccatgtttacgatcaataaagtcaggaatataatccatcggacccggacggtaaagggcattcatcgcaatcagatcctcaaacgtagaaggttgcaactcacgcaggtacttctgcataccggcagactcaaactggaaagtaccgatcgttcgtccgtcactgtaaagtttataagtagccggatcctcgattgaaatggaatcgatatccagttccattcctttactcaaacgaatattttcgacagcctcctttataatagacaatgttttcagccccagaaagtccatcttgatcaatccggtatcttcgatcaccgaaccttcatattgggtaaccagcatcttttcgccggtctctttatcatcagccgtgctgaccggtacccaatccgtgatatcatcacgacaaataatagtgccacaggcatgtacacccgttccacgcacattcccctcaagcatcttggcatatttcatcgtatccctcaccaaaggatcgggagatgcttcagccgcctgcaattcgggcacatattctatggcattcttcagattcagtttcttatccggaattttatccggaaccaatttggccaagcgatccgattcggcaagcggaagtttctggacacgggcaacatctttgatagccagtttcgtagccatagtaccataggtaatgatatgcgccaccttttcctgtccatatttctccgtcacccaacgtaacacttcgccacgaccatcatcatcgaagtcaatatcgatatcaggcaatgaaatacgatcgggattcaagaaacgctcaaacagcaaatcgtatttgatcgggtctattttagtgatctgcaaacaataggctacggcagaaccggcagcggaaccacgtcccggaccaatggagactcccatattacgcccggcggcaataaaatcttgtactataagaaagtatcccgggaaacccatggtcttcataatatgtaattcaaagaccagccgctctttgacctccggtgacaacggatcaccataaaacttcttagctccgtcgaaagtcagctttttcagatagtcggcttccagtttgatacggtacagtttatcatagcctcccaaacgttttattttatctttggctgcttcctcactcaacaccacgttgccgttttcgtcttgggtgaactcatcaaaaagatccttttccgtatatttttgccgatatccttcttctgttccaaagtcctcggggattgcaaaagtaggcataatcggtgcgtgatcgattgaataatactctactttatccagaatctcaagtgtattactcaatgcttcgggcacatcggcaaagagttcattcatctctgccttcgtcttcatccactcttgtttcgtataatacatccggttcggatcgtcgagatcttttcccgtactcaaacagatcagccgatcgtgcgcctcagcatgttcttcgttgacaaagtgaacatcattcgtacagattaacttgacattatactttttggagtattcaatcaaatgcttatttacattcacctgcaacggataagcttcatgatttgctttaggcactgtcgctttatggcgctgcatttccagataataatcgtctccaaacaggttcttataccattggatggcttcttctgcttccgccaacaatccctgagttatctttttgggcacttcaccgcccaagcacgcagaacagataatcaaaccttcgtgatatttctccaactcgttccggtctgtacggggacgcatatagtaacctttggtccatgcccgcgaaaccaattttatcaggttatgataccccttctcgtttttggcgagcacaatcaggtgatacccgctctggtcaggctttccctcctttttatccattgtacggcgagccacatacatctcacagcctatgataggcttgaacaatcgcccttccgcatccgctattttagctttacagtcagcaatctcggcatctttatccgcacactccacttcaccggcttcaatagctgcaatccgcttcttcaggtcctttatttctcctttcggacctccatttttcttattaacatagttcgtaaactctttaatggcgaacatgtttccatggtccgtaacggcaatacctttcatcccgtctttcatagccttatcgaccaatgcactgacactggcctgaccatccagaagagaatattgcgtatggacgtgtaaatgaacgaaatcctgcatagttataggttgataatttgaagccataaaattacaatgtctacagctactaacaaagataaacttcaaaaagttatcaacataagtcatttctacctgcaaatgcttgctggatttttaaaataagtatacttttgcggataattatcattaaatagcgcaaatgggtcgacttaagaaattaaaaaagataagaattcaccgtgaaggaacacatattttatggggtagtttttttctgctactgatcataaatctggctctttactggggaattgattgtaaaataccattctatctggtggctttggtaagtatcgtcgtctatctgttgatggttaactttttccgttgtcccatccggcttttcggacaggatacagaaaagattgtagttgcaccggcagacggaaaaatcgtagtcatcgaagaagtagatgaacatgaatacttccacgatcgccgcattatggtatctattttcatgagcatactaaatgtacacgccaactggtatccggtagacggagtggtcaagaaagtcactcatgataatggtaaattcatgaaagcatggcttccgaaagccagtacagaaaatgaacgttcaatgatcgtcatcgaaactcctgagggagtagaggtaatggcacggcaaatagccggtgcaatggcaagacgtattgtaacatatgccgaaccgggagaagaatgttatatcgacgagcatttgggattcataaaattcggttcacgtgtagatgtatatctcccgttaggcacagaaatctgtgtcagcatgggacaattgaccaccggtaaccaaactgttatcgccaaattaaaataagaaacaataatggcaaatgctataacccgccacatacccaatacagtaacctgcctgaaccttttttcaggctgcattgccggcgtgatggcttttgaagctaagtatgaactagcttttatcttcattatattaagtgctgtcttcgactttttcgacggcatgctggcacgactgcttcatgcatattctccgataggaaaagaactcgactcactggcggatgacgtcagttttggagtagccccttctttacttgttttttcatttttgaaagaacccggattgatataccccgactttctggcaggattaagagattatatcccttatctggcattccttatctctattttttctgctttacgtttggctaattttaacgtagacgagcggcaaaccagttctttcataggccttccggtaccggccaatgccctctattggggagcgttaatcgtaggtggcaaagattttctgctggcacattgcaatgttatataccttattataatggtaatgctcttttcatggttgcttgtggctgaaattcccatgttctctctgaaattcaaaaatctttcttggaaagataataaggtaagtttcatatttctgattgtctgcattccattactactgtttctgggtatcagcggattctcagcagttattgtgtggtatatcattctttcacttttaacaagaaaaaataaataaacaatccttctggcacgtttgttgtactacaaattttaaacaatgcataaaacaaatagcccatgtttcacattttaggatttttattcattattgtcatagccgttataatcattggattggcccttgtaggcagcgtattaagagccgttttcggacttggaaaacgctcgccctcgtcaggttcagatcgtaacggacccaataataattcaggaagcagaagatattaccaccaaactcaggctaatgataaagaagaaatcatcactgggacaggagccaagcacaaaaaactgtttgatgataacgaaggagaatacgtagactacgaagaaataaaagaatagggacagtggtgaactgtcacctcctcttagcagcaaaaaagtctttcatcagcccggcgcactcatcagccaatattcctttgacaacaacagttttaggatggagtgcttgcggagcatatctctgatagcctctcttatcatcttcggcaccaaacaccagctttcccgtttgagcccaggcaatagcaccggcacacatcacacaaggttccactgtgacatataaagtacattcattcagatatttcccaccaagaacattggcagcggcagtaatggcctgcatttcagcatgggcagtcacgtcattcagtgtttcagtcaggttatgcgcacgggcaatgatccgctctttacagaccactacagcaccaacagggacttctcctctctctcctgctttaacagcctctatcaaggcctgcttcataaaataagaatcatccaacatacgtctaacgcctcatatcgtgttcaccaaaaagagtaggataatcctcctccatatttttatgtataaacatgagaatcgtctcacgaagccagcgtgatttattcgttatcttatacttatccagataacgatccacaatctgctgctcatcttcgctcagcaatatgctcatccgtcgttcccgcttaggttcgtccggagttgccttattacattttttatctctctttctcatattctttgcaaatttacttttacttctgtaatttcaaagaataaaaagagtaaatttgcagaaataatatgtccggtcggccgatacacatccatgttttatcaccggaccgacctataaatataaaaatcttctttatggcagaacacaaccttttaggaaaagccggagaggacgccgccgtcgactatctggaacggcatgactacgtaatccggcatcgtaactggcgtaaaggacatttcgaactggacattgtggcagctaaaaacggagaactgattattgtagaagtaaaaacccggagcgatacggacttcgcacttcctcaagacgccgtcactccacaaaaaatcaggcgcactgtaatagcagccgatacatatatcaagttattccaaatagatgaacctgtacggtttgatattatcaccgtgataggcaaaaccggaaattttagaattgaacatataaaagaggcgttttatccgccattattttagagttttatgaatatagaatcagcaagagaatactgcctccggaaaaaagcagtcacagaatgcttcccattcgacgaatattcactcgtcatgaaagtaatggataaaatgttcgccctgatcgatctggaaggggccaatacgatttcattgaaatgtgatccggactatgccatcgaattacgtgagcactattcggccatcgaaggagcttatcattttcacaagaagtattggaatcaagtctactttgaccgggatgcggatgacaagctgatcaagcaactgatagatcattcttacgacgaagtaatgaagaagtttaccaaaaaattacgtaccgaatatgatgccctgccctgaatctttccctgtccccctcattcatattgcaaaagcagactccaccaacggttatttaaatgccctctgcgaaaaggagaaggttagcgaactgaccacagtagtggcagacttccagactgcaggcagaggacagcgcggaaacagttgggaatcggaagacggaaaaaacctgatgttcagcttcgtgttgtatccaactttcctggaagcacgtaagcaattcctgctttcacaaatcgcctctttagcagttaaagagacacttgatctatatataggagacgtttctataaaatggccgaatgacatctattggaaggacaaaaaaatctgcggaatgctgattgaaaacgatctgatgggaatacatatcagccagagtattgcaggagtaggtatcaatatcaatcagaaagaatttcacagttctgctcccaatcccatctcaatcatacagatcacccaccgggagtctgaccgtatggaaatactcgcacaagttcttcagcagataaaagaatactataagatcttacaggaaggagatattgaatttatcaccgatcgttatcaggcagctctcttccgcaaagaaggcatacacttttataaagattcagaaggaacatttaatgccggaattgtagaagtagaagccgatggtcatttagttctacaagacgagacgggtaagatccgtcgatatctatttaaagaagtacaatacattctttaaaattgagatttaaagtttaaaccattatctttgaccctgtgttctttataaaaaaacattcttttatgaaaacagaatatttattcgttatacttttagtacttattggtttcagtagttgtgaggattccacctccgatgctacacttgaattatcccaatcaacttttgaaaacatcagcagtgacggggccactttaaccgtaaacattaccagcagtgactcctggacagcagcaagttcttctacagcatgtaatctcgttcctaatcaaggaacgagcaatcaatcactcagcattgttgtggaagctaacctggatgaagccgaaagaaatatgacagttgtcgttacttccggcggaatcaagaaaaccatcagcattagccagcaaggaagaagtacaacagcaggtgagtatcactataacctcccggttattttccatgtactatataaggataaaaacaatcctttacaatacgttaaacaagaccgtttagccaaaatactagatacagtcaacaagctttataaagataaaaccaaaagtgtggatatgaacttgacttttacgctggctactactgatgaagatgggaaacccttatcaactccgggagtggaatatgtgttatgggaggaaagttaccctatcgactgtgatgtcttcatgaatgacgaaacaggtaaatatgtaaaatacatctgggaaccgaataactatatcaacgtaatggtatacaacttcaaggacgatgagagtacgggcagtaccacactgggaattgcacatatacctttttccacagtaggaagcaattatctggaaggactgagcaaaacacaaaaatcttatttagagaaacaaaatctgaaatttccatatagtgtctccatcaacagtttattcattaatgaccagtcaacttcaacccaatatagtacagcagacatcaccgtaacattagctcacgaattaggtcattatctgggcttacaccatgctttttctgaaaatgacgaaggtatttatgacggttgctttgattcggattattgtgacgacacccctacttataataaagtggagtatgacgctgattacgcctacaccgcgaagaatgatccggcaaacttcacgtttgactatctggtaaaacgtaaaaattgtaagaccaatcagacatttacttctactaatattatggattattccgtaagttactcagaccggtttaccaacgaccaacgttcccgtatccgtcacgtcctgacatacagtccgctgatacccggtcccaaacaaggacaaacacaaacgcgttccgttgtcgaaggaccgattgatttacccatacgcacagcccggtaacaacatatagaaaaagaggtgaacagttatctgttcacctctttttctataagctttattctttctaatgtcttttgagcttcagtagaagggaattgactgatcaccttttgaagatattcccttgcctttccgtatccggtactcatcacacggctaagaccatcacgatagcgtgcatactgcatccgagtgggagcactaatctttttataatcggcttctaactgttttttctctctctccgccttcaaataaagataattaccgataaaaatattggctgccagattatccgcatccaatgacaatactttccggtaagtctccaaagcttcagactccctcccacggcatacttccatctcagcacatgacacaagacaattaacatcattcggagatttttgaagcaactctttataaaaaagatacgctttgtcatagctgcgtgattttttgtaataagcagccagttcccgccccatcctggatgatacttccagactcttatccacacctgtccaatagaacatttcggctttctctacattggtatttaccgcttggcggaacaaagtaacagcttggtcccactgtctgttatcaagggcagcagagaccttctgcaaagtctctcccaccatctgagccgaaagcacaaacgggaaagaaaagagcaaggaaagaaataaagtcaaggttttcatcttcttcatttttatttagttaggtccctacaaagatagtatttatattgtgtattcccaagtcacatactcactattattttcaatatttgtgagcctgactctttgttatattcagagctttcccacacgccggctcgccggaactttcatcccattacctttaacggtgtaaatagcatcctgatcactttcctgataacatctgcaataatcaaaatagacataggcaggtacttgattttccatcacattacctccccattctcctgcggaacaagagaaataaaccatttggtaagcacttggcacttgtttgggatcatctttccgattcacccgacgggtaaccttaccatctgtgtagaaaatcagttcttcgggggtccattccacagcaaatgtatgctctttactctgagcttcatccaatacaaaatactcggtagacgaacggtgttctttaaattgcccacttttatcgtaatccagagctgcatgttgcacttctgattgctgctcctccattgcttgttttttataccaatgaagtgtctgaaagatttgtttatctttaggaatatattcaaaaacatcaatttcagttccttttccatacttatcggcttcatcaaaatgtatccaaaaagcaggccagtaaccttcaccaatacagtctctaaatgaagcctttgtctcataataaccataacgtgccatgaacctgcccagtgataaaatcccaccggtcatcacaacattgttttgtgtcgggtatttagagacttccaaacgaagttcgccatgcaactctttggtccaatcctcatgacacagcacatagtaaggtttctcttgatacatacctctacgggtaaaaggacttcttctacttctcgtatcccattttaaagtatctatcactccatcatcgaactcatcattaaacactaaatgatacgttctacccgttatcggcgatttaaatacggtaggaatctctgatggatgaaaactcaacctaccggttgtgttcataccttttctgagtttgcctttaatcgctttaggattaagtgtaatattaatagcttctgacggaacagtttgtactgaagatgtctttaatgaaagaatagccatactatcatttacgtcaacgttaaaagctatttcttccgcattgccaatcaacaaaaaagcaggtgcctctgtttgcttaaaatgtaatccctcgggaagttttactactaatttccccccataacagttaggcgtattcgtttccataaatccagtagccgccttgccaagcaaatcaataaaaatatcatctgcttcggaataatcccatttccacgttatgtccttggaccctgcatgcacatgaatgacttgtagtaatatacaaatcattattagaataaattgcctcatatgtttttcatttagttattaaattcaaattgataatgctacctcgctgcgatgtttgttaattgtctgtaagatatctttcaatatgcagacaaaaataatattaattcctgtatcgagaacgttgcgaaccaatataattacatgattgttcacatcattttcatattctctgtttttcatgtaactttgcatgtcaatgaataaacaaatgcacatcagtaacggaaacaaacggattctgcaaatagccgttccctctattatttccaatatcacagtcccgttattgggactggtcgatgtcactattgtaggacatctgggatcggccgcctacatcggagccattgctgtaggtggcatgctgttcaacatcatttactggatattcggctttctacggatgggcaccagcggcatgacttcccaagcattcggacaacgtaatctggaagaagtaacaaaactgcttctacgttcagtcggcgtgggattgtttatcgcactctgtctgatgactctgcaatatcccatccaaaaagccgcatttgctttcatacagacttccgacgaagtagaacgtctggccactctctactttcgtatctgcatctggggggctcctgccatgctcggcctttacggttttgccggctggttcatcggaatgcagaattcccgttttccgatgtatatcgctattacgcagaatattgtgaatatcctggcaagtctttgttttgtattccttttcggaatgaaagtagaaggagtagctctcggaacgcttatagctcaatatgcaggtttcctgatggctctgcttttatggctacgttattataaacaattgcggaaacgagtccattggagaggcatttggcaaaaacaagccatgtatcggttctttcaggtaaatcgcgatatttttctccgtactttgtgcctggtagctgtaacgatgttcttcacctctgccggagccgcccaaggcgaagtagtactggctgtaaacactttattaatgcagctgtttaccctcttttcatatattatggatggatttgcctatgcaggcgaggcacttgccggtcgttatatcggcgccggtaatcgtatggagcttcaccgtaccgtccgacagttattcggatggggtgtcggattatcagccgggttcacccttctttacggtattggtggacaatcatttctggaattactgactaacgaatcatccgttatccaggaagccgacacttacttttattgggtattagccattccccttgccggattttccgcctttttatgggatggcattttcataggtgccaccgctacccgccagatgcttttctccatgttcatcgcttctgccagtttttttcttacctattacatcttccaaggagtaatgggaaatcatgccttgtggatggcttttattatctacctgtcgcttcgcggacttgtacaagcttttttagcaaaaaagatagtccattaaaaggaatcgcgtatctttgcaaaaaagtaaaccaacaatcagaatcgtatggcaaaatacaaaagagtcctgttgaagctcagcggtgagagcctgatgggagaaaagcaatacggcatcgatgaaaagcgattggccgaatatgccgcacaaatcaaagagattcatgaacaaggcgtacaaatcggcatcgttatcggtggtggtaacatcttccgtggactgagtggagccaataaaggtttcgatcgggtaaaaggtgaccagatgggtatgctggccacagtaattaacagccttgccttaagttcggcattagttgcggccggtgtgaaagcacgtgtacttacagccgtacgcatggaacctatcggtgaattctacagtaaatggaaagctattgaatgcatggaaaatggcgaaatcgtcatcatgtcggcaggaaccgggaatccgttttttactaccgacaccggctcatcgcttcgcggtatcgagatagaagcagacgtcatgttgaaaggtactcgcgtagacggtatctatactgccgacccggagaaagatcctacggcaaccaagttccacgacatcacttacgatgaagtgctgaaacgaggactgaaagtgatggacttgacagctacttgtatgtgtaaggagaataatctgccgatcgtagtattcgatatggatacagtaggcaacctgaaaaaagtgattaccggagaagaaatcggtacattggtacacaattaacttcataaactatacttattatcaacgggttaacaagtagatggaatacttctacctgttaacccgttcttcattcttcatctttcgcgttctactttgttcgccttctttttcttacagcagaccttttatcatcaatagccccgataatcggtattactactctcagatatggaaatggactttccctcgaacggcgtatgagcatggatataatacctaacctatcctctagcctttactatctttatttcttgcgttttatcaacataatcaccgaattcgattcttcattcagtccggcagcaatttcttttagcttacctttcagttctcctttttcgtttgcctcgacaaggtctgaagcatttaaagcacgacaggttacaatttcttcatctacagatttttcgggttgctgtcccaatgcaacccggtgtttattagaaaagtcatcattatatacggtatattgaaatattgctttttcctgtttatcatacactaaatcattggtcgggaaacctctccccttttcaaaattaaacttcttatcaagagtttgcataaaataataccgatcagtgataatggtcggaaaaagaaatactttaggatccatagaatgaatggaaggagtccgtacaataaatggactgagagtgccatccggtaagtaattgtatactgtgtcagatgatgttttcgtcagcagacaattaccatcatgcggggttatcagaaaaaaacctggagtcactatcgcctcatctttcgtcacaaccggtgtctcgagttctttgaaaggaatttgaatttttcgtgtaacacttccgtctttcttggaaataagtacatggcatgattcgtcggtttctatcaatggcaaataacttttataaccaatcagatgatcccggtcatagtccgataaaaactcataatagcaggtatctggaaatgggagacttctattgaactctccatataagtcatataccaatattttccttgcaggataatctacaacaaacatttcgttattatcttcatccagaacaatagacgtaatatgcgaatattcttcaccactttgtcccaaacggttaatcttccgtacccctttaccagtagccctgtcaaacacaaaaatattaccatccataatcctgtttgcaaccaacagaattttcttgccggtagctttcacaataccttgagttataaaatcgtcagtagtttccaacggaacgtattccacatccataaaatcttgaaggatcagttcctttttaggataatccgcactaacatcaaccgtgatgcaatcatctgtcagttgtttatttcctccacatcctgtcattacaaacagagatattaccaaagccgcattgatctttttcattttatctatatttaagtacttttatcatgattatttacagaaagacaactgttcgacagatgtaaccgattagttgagcaatttatataaaatatcccaaagatcaaaagttactaatgaaaacattcattcaataaggtatttaatgtgatttactaacacaataaaaagtaaatcatgagacagaaaacatttcttattgctctgcctcatacaaacgatcatacctccctcctagccgcccattacgataattatcaataacactaccatctgtattacacatttctctatagggatagttgcagataatcaaaaaataatctacttttgttttcaaaatgaatcaaagtgccaattttataaatacttaataagatggtagacgtaaaaacgattatcgaagaatcacaagagaagatggatatggcagtgatgtatctggaagaagcactggcacacatccgcgccggaaaagcaagcacacgcttgctggatggtatccgtgtagactcttacggaagcatggtgcccatcagcaacgtagctgccgtaaccactcccgatgcacgcagcatcacgattaaaccttgggataaaagcatgttccgggttattgaaaaagccattatagactccgatctcggcattatgccggagaataacggtgaaattatccgcatcggtattccacctcttaccgaggaacgccgtaagcaactcgccaaacaatgtaaagctgagggtgaaacagccaaagtcagtatccgtaacgcacggcgcgacggcatcgatgcactgaagaaagctgtaaaagacggtttggctgaagatgaacaaaagaacgcagaagctaaactgcagaaggttcatgacaaatacattgccaaaattgaagaaatgctggctgaaaaggacaaagaaattatgaccgtataattgaaatacaagttacgggctaccatacacatctgtgtataacggcctcaaagttttcttaatagcccgtaacttgtaactagctgcttataaaacatgaagggattagtaataaagaatacaggtagctggtatcaggtgaaaactgatgacgggcagctggttgaatgtaagatcaaaggtaattttcggctgaaaggcatacggagtacaaatcccgttgccgtaggtgaccgtgtacaaatcatactcaatcaggaaggaacagcctttatcagtgagatagaagatcggaaaaattacatcatccgccgttcatcgaacctttccaaacaatcacatattcttgcagccaatctcgaccaatgtatgctggtggtgactgttaactatcccgaaacttcaaccacttttatcgaccgctttttagcatcggcagaagcctatcgggtaccggtgaagattcttttcaacaaagtggatgcttatgatgaagacgaattgcattatctggacagcctcatcacgctctatacccaaataggttacccttgttttaaaatatccgcactgaccggtgaaggagtcgatgccatacgcgaggaactgaaaggccgggtaaccctcttctccggacattcgggagtgggtaaatcaaccctcatcaatgcccttgttccggggctggaagtcaagactgcggaaatatcagcttatcacaacaagggaatgcacaccaccactttctccgaaatgttccctgtaccgggagacggatacattatcgacactccgggaatcaaaggttttggtactttcgatatggaagaggaagagataggtcactacttccccgaaatattcaaaacttcggcaaactgtaaatatggaaactgcacacaccgccaagaacccggttgtgctgttcggaaagcagtagaagagcactacatcagcgaatcacgctacacttcctatctgagtatgcttgaggataaggaggaaggaaaataccgtgcggcatactgaatctctgccatttttcagagaatattctttattctattttaatgcttcacttggcaaagtaactgcttctcctacaaaaaatacgtttcgatcttccatcttccacctttttccacttactccattaataatcaatgcaatgatacggtggaagatcgcattttcagcctgtttatcttccacccgcatcttctatcttccacccgtcaacttgagtgccatccaatcgttaagacgctgataggcaacactaaggaacgtatttattaactgaatacattgtttagagcattgtgctttcctttactgtttagtcgaaaatgatccgttcttcatcccatccccgccacccgggcttatgagcccgtataccaaggcccatgagcccgcataccagggccggaataaacaaacggagattcatcataacatacttgtatacaatcgtttaatatcaaaaacaaataccgttggttagttcgtaatccgcaaagaagaaaagaaccgtcgcactttatcaagaggatgattcgatggctg

SEQ ID NO: 5038 - DNA, 4712 bp, Unknown
  gut microbiota DNA sequence
gtactgaaactgacaatgtaaacacccgtcaagggtcagctacatcaagcaaagtacgtttgtttggaggagcggcagtaactcctgtaggagtaggtggtggaaatgcaacttgcactccgacaataaaccctgatatggcgcgtgtggaagtaaagggtagtctggccggcccctggacgcatctgaatgatttaaagataaaggggatttacattaataatgttaagcttaccagaggtgcttcttcattgaccagaattgcgtcggctgcctggggtacggattatgctccatccggtcagtttgagaaaatgtttaatactgatttaggagcaggtgtaggaactggagtggctcagattgcgggtggacaagccgatggatataacttcttccctcagcaagatctttcttctcctaccacaaaggaagatgttatgaagaaatcgatccatgttatcatggaagttgagtttgataagaaagttggtggctcaggtccggaaaccggctggcttaatgtggttgctttaaaggataatacagctactaactatattacagactttgaagccggtaaggtatactttattaaccttgccgatatcaaggatattatggatgttccggttcctcctgtaactccggaccccgatccggaaactgtttctgtagatcttactgtaagcataggtcagtggactgtagttcaggttaagcctgaagtttaactttactctgtctttttccggtgcgggaaataccccgcaccggatacaatttgaatgtttcttattttatattagttgatatatgatatttgtcgggaagaaaaacagcacttcgttttttctacttatttcactcattttaggactggctctctatacagccttatttagcagttgtgtttacgaggacttgagtaaatgttcacggatgtttatgttacagccacgttatcttttgcatacgggtgaaggcgatcgttttggagaagctgtccaccatatagatgtgtatgcgttcgactccctcggcatttatcgcaaaatgtttcgggacaaaggagcacatttgaagaatggctaccggatgcctattgaccttcctgaggggaaatggacctttttatgcttgggaggtaaggttggtgattacgagattggcatttttaagacaggtattcctcaacagtttagcccggctgtctctccggggattaccactctttcggattttcgtgtaaaagcgtattttgagcagaaagaaaatttggaatactcacttggtgagttgttctttgggcgcctggactccatggagatcacagctgataacggtggaacaggtgtagtagacttaatgaaaaacacgaataagatagaagtccgtgtgaagggaatcgctgatggttcatcagcccgtatcacctctgataacggacgctttaactcagaaaatgttacgccggccgatgccggtacgattatatatgttccttattatagcgcatctcaaacggatgatacccgtgttttccagtttgatgtattgcgcctgtatactgacgggcatctgttccttaaattgctgaatcccgatggaacagatgttattccgggatttacaaaagatttaatcaatgctattatgtcctctcccgcataccatactcaggaggatttggatagagaggatacctatctgattgaattggtgctttctaaagacggagtcattatctctttgcgggtaaatggctgggaaactgtcagtactactccggaggtctgacaaggaaagtgagaattcaaacggagtggctacggatgtttttatgggtaaatagaatttgttttttagagtgaattcgtgcctctctcgtgttggaaggttgttttgtcgtcgggatgaagctactttgtcaggacaaggtaggcgtaggccggcacaaaacaccttcttttgagagtgtataaagttttaaaagtagagggcagagtatactattaatgaactgaatctaaattgattgcataaaatgagcttattaaagaaaaagtatatgagatgtgtaaaaggaatatatatattctttttgctactgtcttttatctcttgtgaactggaagataaaataggaagatatacttcgggagacaatccggtagaagtagaacttatgactcgtaatgtcactttaggaggaagtgaatccggagtgactctgaagcgcttgcgtgtaattgctgtggcgaaaaacagtggaaaggtggaaatgaatcgccgtgccgatttaagtgatccttcatcatccggtttagagcatacagggggagtgtttaaactctatcttcgtccgggtgattacgatttgtttgtgatcggtaatgaaacgacgggcatgaattccgcattaaccggagagccatctttatcagaaattaaaagtgtaccggttactctacctatagatacggcagagtttgtggtatgcaagcatctggatatccggataagaaatgcagcctcttcaactccggtcacaggggaagtcagtgtggatgaaggattaacctggaattcagcgttctcggttgagttggagcgcattgcttcaaaggcgagtctggagatacgaaaaaatacggatgaagatataaagatcaggcaggtcactgttaaacagttaccttcgttctcttttctttccccctctgcttatccgctttccggcgggcttacggttactgatacgcgttcgttttctacacctgtttctatcgccggagagaaagatgttccctcaggatatccgtatacatctgttgtacagggaaagaatagctttatcttgccggagtacatttgggataatacggcagggaaggggcgtgcttcttttatggaaatagaggctgaacgcaatggagcgtcagaaacatggcaaatattattgggaaagagtacggatattccggctgactactcacttgggcgtaacacttactatcgatatatgctgaccgtgaatccgctgaatgtcgatgtaaatgtaagtgtagaaccatggcagaatacggctgcttatgatacgattcccggagcaaagatcgttttctcacgggtcaatgtcggttattcgtatgcttctgagagtgttgttacgtttacaaccaaaaacttgcctcctgtatctgtcagcctatctcctgtactatatacttataattctacaggtgatcctgtgagttctaaatttgatatgacacggactaagatcaattacagctatgaccaggatacaggaacaggcatgggaactcttaccataaaacggaacaaagtttctcttgcggacactttgctattgatggcaggaggatttgcgcatacaatcgctgtggaaggagtggagtttgctggttctaatatctattttgatagggttctcgagaagtttacttttgatgatactcctgcaccgggatgcagagcggaacatgagaaatttcagggggcgtttttttattggggttctttacaagggtataacaccggatataattttctggccacacgtaagagtgatagaaaatggggttatatttctactccggtctggatctctgcattttctgttgttgggggagatgatgagaatctgattcttcagaagggattacatgatcctaaaaatctgaaaggtgatatctgtcgctttataacgcaaagagaatggggacccggaaataagaagtggcggatgcctactttagatgaactgaagcttttgggcgatggggtttgggaaactactgcttctactccgggttggggttatatttctggcagttcgagtgagggtagcactgttattggcaatggaattcgtacaaataaccgctattatcttccagctaatgatggggggaatagagggagatattggtctgcttccgctgcaatcagtgcttcagcccggggactttactttgaatatctaagcacttctgtgcaagattggaatacttcatcgggggttggagtcattcgttgcgttgttgattctgagaataattattcaaaagtttatcgtgttgtttattcgaataccgatcctctgaatcaagaaaataatttgtatagcgttccgccatcggcattgttgaacgaaggagaaacgataacattgccagcgctgtctacaaaattcaatgattacgaagtacgtgaagggagtaaagtggtaacaaagtattttcattccggatggcttgtaaatggacggcattttgattttggtgattcatatgtggtcggtgctgatgggataggaaacactgaagtggagattaggcctgaatggactaaactttgtaaaatagagtatgttgctacccctccatatcccggagctattttttattggcattttcccagcactactaacttcgtcaagatgggagagaaacattccttgctttatgttatggcaacagtaagatcttcacctgtcaagatatgtaccggactgctggttaatggtattcgttatagctttggagatgaaatagttgctagcactgatgtcaagatagagccttattgggtaaatacaccggagaccccgtttgcatcaactaatttaaaactttctaattcgggttctgctgatgcaacgttcacttttgcatctgaaggcg

SEQ ID NO: 5039 - DNA, 6528 bp, Unknown
  gut microbiota DNA sequence
gcctctcaaacgccgccgcaaaagacggtttcggacttggacttgccatcgtgcataacatagtggcgatgcttgacggcaaaatccatttggaaagcgagaaagggaaaggaagtcgtttcacagtggaaatacccatgcagaaagccgaagaaataccggaaaaagagatacagacttatatccaccgggaggagagaaacctcaatgttgtcgccatcgacaatgatgaggtgctgctcctgatgttgaaagagatgtatgcacaggagggaatacattgcgacacttgcaccgatgcggcggaactgatggaaatgatacgccgaaaagaatacaacttgttgctgacggacttgaatatgcccggcataaacggcttcgagctgctggaactgctccgatcgtccaatgttggcaattcacagacaatccccgtggtcgtggcaaccgcttcgggcagttgcgatgcggaggaacttttggaacgaggctttgccggatgcctgttcaaaccattctccatatcggaactgctggaaatttccgacaagtgcgccattaaagcgacacaggacggtaaaccggatttttccgccttgttgtcctacggcaatgaagttgtcatgctggaaaaactgataacggaaaccgagaaagaaatgcaggcggtacgggatgcggcaatgcgaaacgatctgcaagaacttgatgccttgacacaccacttacgcagttcgtgggagatactccgtgccgaccagccgctgaaggtgctttatggtgtgcttcatggaaaggataagtccgataacgaggcgttaagtaattccgtgaccaccgtgttggataaaggagcggagattatacagttggcaaaggaggaaaggagaaaatacgaaaatggataagacaagaataatcgtggtggaggataacatcgtgtattgcgaatatgtctgcaatctgctggcacgggagggatacagtaccgtgaaggcttaccacctgtcaacagcgaagaaacatctgcaacaggcaacggatgatgatatagtagtttctgacctgcgcctaaacgatggcaacggaatagacctgctgcgctggatgcgcaaggagggaaagatgcagccgttcatcataatgaccgactacgccgaagtgcatacggcagtcgaaagcatgaaactcggttcgatagactatattccgaagaaactgatagaggacaaactcgtcccccttatccgctccatacagaaagagcgtcagtcgagacacagccggatgcccgttttcgcccgtgaaggttccgcctttcagaaaatcatgcacaggataaagttggtagccgtcaccgacatgagcgtgatgatattcggagagaacggcacaggcaaggagcatatcgcccaccatctgcacgacaagagcaaacgggctggcaagcccttcgtggcggtggactgcggttcgctatccagagaacttgcgccgtcggctttcttcggacacgtcaaaggcgcgttcacgggtgcggacagcaccaagaaaggatatttccatgaggcggaaggaggcacgctgtttcttgacgaggtgggcaaccttgcgttggagacccagcagatgttgctccgtgccatacaggagaggcggtatcgcccggtcggtgacaaatcggacaagagtttcaacgtccgcatcatcgccgccaccaacgaggatctggaggcggcagtgagcgaaaagcgtttccggcaggatttactctaccgtctgcaagacttcgtgataaccgtgccgcccttgcgtgactgtcaggaggacatcatgccgttggcggagttcttccgcgagatagccaacaaggaactggagtgcaatgtgagcggtttcagttccgaagcccgtaaagcgttgctgacccacgcatggccgggcaacgtgcgggagcttcggcagaaaatcatgggagccgtgttgcaggctcaggaaggtgtggtcacgaaagagcatcttgaacttgccgtgacgaaaccgacctcacctgtcagcttcgccctgcgcaatgatgcggaggataaggagcggataatgcgtgcgttaaagcagacaaacggcaaccggagtgccgccgccgaactgttgggaataagcagagctacactatacagtaaacttgaagagtatggacttaaatataaattcaagcaatcataactgataatcagacactgtttcactgagtgtgcctgagcaaaagctctaaaagaaacagtatcttattcggttaatgaaagagaaagtctgattctgattatatatcgaccaagaacccaaagaatactttcggcatttaagctcctttattgtggtcaccggaagtttagtcataaatataccgttttatcatattttcaaaatttcttttaaactcttgtacttcgataggaatcgaacgtaaaaagggattaaaaaccttattaccatttcgtccccaatattccaactgaccattaaaccatttttttgcatcttgacgccccaactcacctcctgcatttatttgttccatagtatagtctcggaaacataattgtttggtatatccatttgctatattgccccataatggatctgcatcagagagattatacaaataggatgccagcagtctttcaggagagttgttccctggcaatattaaaatgttatctgcattttttattttcttaagatacgccctattcatcctaacatctccatccaatatgatgatagaatatgggtgtttaaatgcaggtatgtttttatttacaagttcagttaaggttgaacacggcagagttacatctacaaaatctaatatagatgctttagtctttaaaatagctttaacgaataatatattttcattatcctctgtatatacagtaattttgtttttcttacgtttttttccttctgcaacaacattcaaatccaatttaatacctttaaaatctacattttgtttgattgttatcttgtcatcgactttctttagataaagaatctttacctgcttagctgtttcttcttgtttacttacttcttgaactaaatcgtccataaccttaagaagagacattgaatgagtagtaaataaaatttgcaaattaagtttagacgcatatttgcgcaaaatctttaatagctcaacttgagacgctggatacattgtagcatccatctcatcaatggcaagaattccacctttatattgttggggatatttgtcatgcaatcttttaaaagaaaataatgccaagataattttgcccagattatcttgtcccatagagttttgattccaatcgtataattcagtggatacgcctatagattgcttattttttgaggttattgttgttgcagaagaaatgggagtttgtactattagaattttattgtgtaattgtttaaactcacttagttcctctggagttaataatgtgtcatcagttataatcttggcctcctctgccataggaactaaccgctttaaacttaaaaagattgtgggaaaggagatatatccatccccttcttgccttgctcctttcttccaaaatcgcacattagggtctccagtacgtttgatgctttcgacagtaaagtcatctactcctatatcaaaagaaatggtccattcatgacctttaggtctatcaaaaatgggcgataatctaaacttatctttgaatgcagaaatatagctaccaccacacaaaggtttttccgctctcattggatcctcaggcttaagagtgaaggtttgtgttacaatacccagtaatgttgacttttgagttccgttttgtcctgcaattgctgttaattgagagcctacttcaaagtcttcattttggaagcctcgaaacctttcgatatgaatgtgagttattttcactttgttgaatgattaaataatttgtgtttgggaataactatatcgtcacaaaatatcattatttcttcaccttttcctgagttactcgcactataattcaattcaaaacattgttgcctatattttgaatataggttggttatgaatggcacattatcataagagacaatccacttacaatttactattgcacctatagcatttgcgatgttttgatggtctgtgtcattatagtagttcagataaagcccttttccttttatatagtatggcgggtctaaatataatagagtattgtaaggtaattcatcttttaatcgttgcactaaagtaacagcatcgtcatttgttagatgaattctctccgcgtagtctgctatacgttgaatcctttttatcaaatcttctttgttaaacctcgcatcaatcttgtaatttccagtttggtcgtatccacctatgattccagcttttaaaattcctgaacgatttgttctatttaggaagaaagtggaaaaccctaaatttaataaatcaacatttctattttctttattctgctgaaactctttttgcttaaaccatgtttcgacatttatgggagtatccttaattaattggcaaagagcatccgtgttattaagaacactataccaaaaggcataaatagatatgtctttatcgtttatatatatatcactaacatattcattaaagagcaaggataaagcaacagaaccacctcctacatatggctcaacataagtaccatcaagcaatgcattttctttgattaaacactgtacgaaatcagcgacttttgcctttccaccgggatatcttaaaggtgataaaaactccataatgtcattctttatttatagattcccataattggataaaaaaactttctatgttgtcccatcctataatcaaattgtctgctttaggatagaaaaactcattatgaacatatgcattcaaggattcaatggataggactgaatttttatcatttatttcagaccttatacctttagataaatcattactcattgttcctaattgggtcatatgatttaatactttacaaactttcccgttcaaatcctctttggaagaacacgcagttatagcattgttttttaccaaatcatatctttccaaataagcatcaactgacaattctaaaaacactctcagcagtacagaagatgcattaggacatgttttaacttggatatgttttaactcctcaaaaattttattgattttggggttgttgatatgcaaaatcaaagtcttgggcactaagccagctctgtttctagctttctgattattagccttttttatttctctgcgttcactatttattaatacctgccctttattgtctacaatatcttgaacactccattgttcagacgcttcattagataggtctggcttttggttcgtgtcaaaattgtcaatatattgcttccttttttctctattatagatttctgaaactttgaattctggattaagaatatccgtaacaacttttataagccccttgacgacttctgacacttcaacctttgaaactaaagttccattgttaattcccaaaccaaggtgttctctaacataagggtctgacatcaaacgttgcaggttggtaatatttagtttggataacgaatccttaatcgtatcagaaacattatcttgtgatttcaataaagtgataatttgcaatggaatcgatgattttccttctgtcttctcctcgaatctttgcttttgttgagcattccaagtaactgtaccgataccattcagctctcccgagtgtttacgttttatccaaatatcagcttccgttgggttttcaaaaacagcgcaagcaatattcttcaattcagaaatagcattaggattttctttttgcaatttctgaaattttttccttaaagaaatgtacttgtcatcaattaatgttggattgtttaataattttaatgatgttattctcctattaccttcgagtactatatatttgttgttatcttcgttaggcgttacaatgattaaatcgactggactaagaccattagttacaatatcgtctacaagagaatataatttatccccttggtcctctaccatcttgtctatcgcttccttttgtgaagacagaggctcaaatctataattttcagtattgacaaatagtgatgtcaattttattgtttttacaaccatggtaacactcatacttattaaagtacaaaattactcatttttagtgaagttagcagtaattgagcaataaaaatatatggaattcactttttgtaggctaaaacctattataatccaattataatgcctatctttgtaatgctaaaaggcgttcttttgaattactgcaaaacgaagtggaatacagattttcgctggtttctaaatcgttacctgtcaaactgggatattttgtaagctattgatttttaagaaaaaagaaaatacactatggcttgccacatgaaaagtaatatgcttttgaataccggctttag

SEQ ID NO: 5040 - DNA, 42235 bp, Unknown
  gut microbiota DNA sequence
aatatttcattggttcttcctaaactgataagccctttgaacactttctctgtatcaggtacttttccgcggacaggaagttgtttcaaagcctccttgctcagaggaagagagaggatttcctgagttttctgttgcgtcatatgcagctccattttaccgacttttccctttttcagatttccccatgtaagtgccactatatcactatgtctcagtccacaaaaacaactgaatagaaaagccttttttaaagtcgcattatgaaaatctgtttgtgacaatattttcaattcatcaatagtcagaaatgcccgttcagtccttctccgcttaggcttttcctcattttttatcttatccattggatttgaagttataatttcatcaattacagcactattcaggcaatgatgaaaaaccttataataatgaacttgagtattggcacttatattcttcacacttttacagtgtttctgagttgccgtcttcaagtattcaacaaagccaagtatatactttttatctacctgtctgagcctgatacccatcttatcataatgctgaagatggtatatcagtgtatacatagacactttccttgaagttttttctatatctttgtctgccaaatacttgatataatctatcagcattatatctttcttttcctgttgatggttaaagccgtatactccattctgcaattctataatcctttgtgccttcactgcactggccagtttcatggtactctgatttaaatctttatccgtccgtgtatgctcgggtattatatatagctttaaaaattcatatcgtcttcttccatccatataaatatctaaatatatagactcacaaccgttcgacagacgtttagtcctgatcctgaccggttctttaatccttacttcttttttcatattatttgtttgtatgtttttagttataaatatagacattattctgttataagtaacaaacaggtaacaaaagtccatgaaaaaagatttctaataaaaagcgatcagacaaaaaccggttttcaaaatccactataattctgataaccaaaatattataaataaaacaaagattctttatgaatcttaattaaagtagcagctcagtaacagagatacttccatatagaagcaaccagccaaagtcctaatagaaccgataaatctactaaaacatcaatcctatgtatatcaatacattaggaaacgaagtaagtgatgtgatattctacaaatcaaactactgattacccgaaagaaagccatgccgtattatcgttttgaataacaatgtgccgcaaatatctctttattatcagccatctttcaaagatagtacagtaaatattagcagacaagactgggaagttagttataatctgggaaatagctggaacaaagtaaaaaggaataaaaaagcaaatagctctttgtacaaagtagatatcacaatatatccggaattatcactaaaaaacttggtaatcacacagatttatcaagtgcttttcaatttatcacccgccatagaagtctctttctggaaagggatgaaattcacggctcaaatggtgattccggtatataatgacggatatgccagcagatacgataaactacatccgggtttccttgaactatcgcaaacagtccgtctgccctataatttttgggcaacattggctatcggtagctttaataatagccgatatggcatcgacttcaacctgatccaccactttaaagatgaacgtttcagtatagaaggccgcatcgggtataccggtacaggatattgggaaggttttactatgcattatggaacaaagatgcgggctacatggtcattgggaggaagtttttattggccacgctataatgtagaattaaatgcaagagttgaacaatatctattacaggagaaagcagttagagtagaagcaatccggcattttcgctatgcttccattggattctatgcaatgaaagccaaagacgtgaaagccaatggaggattccgtttccaaatagctttacccccttaccgatataaacgcaaagggtatattcctcggatcactccttccaataatatgggaatgtcttataatgcgggaaatgaacaatattactataagacttatcgctcagcacctgacgataacataatgaagaacaatagttttaatccatattttataaaatctgaattattaaatttttaattttattgagatgaaaatgaaaagtaaacttttcggtaatggcgctaagttagcgctaaccctgttggcaatgtgcggtatgttcgcaagttgctacgaaaaagacgagattgatgttcccaaagtgaccgaccctacagctacgacgtaccaagtagcaggtattgttacagatgctgaaagcaatgctgtaatggacggtgtcacagtaaccaatgtcacaaactcaaagtcaatgactaccgcagcagacggtaagtatgttctggaagctaaagtgggagaaaccaacgtagtaacttttgcaaaaagcggttataaaacagtgacaagctcggtattcgttactaaacaggaaaacggttctatcgtagcctataccatcgatgctaaaatggaaaaaggcaaagaaacaaaaccgacaaaagatgtagaatatcaaattgaaggttctgtatttgatgcggaaagcggtgagcctgtagctatcaaaaccgcaactatgccaggcatattgacagcaaccatccaaaaaggcaacgaattcaccatgtctaaagtaggtctggggcagcacacaatatacatcactgctgacggatacaaaccgactacagccgatgttgtcatcagtgaagtgtctggtccggaaggcgaaggtattttcattgcaaagacctcaattactgttgctatgcagaaaaaagaagtagaagttgcccccaaatactatctatcaggaaatatctacaatcaggatggtggtatggttaccaaagctgaagtaacactgaatatgtcaggatacgaaacaacagcaactgcttccaacggtttctacaaattcgagattcctgccgacaaagtaaaaggtctgactaaagcaactgtaacgatccgtcataacagctataagatttatgtatatactgcatttattgcaccggtagacaatggccaagtatctaacaccacagtcaatgtaactctgatactgaaaccggatacagaaaaaccgaatgatgacgataatgtatttatcggtggcaatgtagagattgaagttccaacagagaatgctgttgaagccgcaccggaaaaagcagaaggtgaaaaagttccaagtaaatctgctgtagaagaatcaattaacaaggttttggaagctgcaggatcggacatcaagattactccggcacaagcagaacaggtggttaacaccatggaaaaatatgtagccaacggtactttgacagaaatcgataaggtagcagttcttccgatcgagaaagaaacgaccttcaaactggaatctaaagtaattgatactaataatgataaagaagaaaccgttattgacgaaatcgttcttccggctaacactataatcatttttacaagtggcgtagcaagtaccctgaacatcagccgtactgacgaaggtaaagaaggtgcttctgtccgtgaatacgacggtactccaaccggaactattttcgtaactccgatggaagtgaaatttactcctgcagttgtcgtagctcaaggagaaactcctgaagttgcattggctactctttacttcaatgaaaagactaatacttgggaagctgaagaaaactatgctacttaccagaacggagtatttgttggcaatgttcaccacttctctaaattcaaattcggtttcgaagaagccgacagcaaagctacggctgaagcagccttggattctatgaaattcgacaaagcatgctacactgaaggtgaaactgccaaagtaaaaatggaaatcaactggaagggtggtatcaagtgtgaaggtggtgcttctgtagaagaaattatcaagaaagcacattccacactaactacaactactatcaagatggtcagcgcagctttggaagaagctatcaaagacgataatgccaatgttactccgggagctgcatttacagacaaaaagttcacatatgaacttgaagtaccagcttatactcagttgacaggattcgacgtaacaagaaacgttatcaagactacctatgtattgccgtttgctgtttataataaagcaacgaaagcaatcgaaaagaaaacagctgaggttacaatcagcaagatttcttcagtagttgttagaacgattgaagctatcggtcacggacatggtcacggtcacggcgatgacctgaatgccggtggtggtattatcatctctgaataaccgagagaataaaatgtagtaattgaaatcattgaaccgaaagcgtagagaatgtatacagtaaatttaaaacgaatcttcatagtatcgctatttatagctataccctttatgctttcggctcaattgacctacggtactacaggattgctgcatgctccctcggcagaaatgcagaaggacaaaacagtcatgctgggtgcaaactttatgaataaggagataactcctccaacgtggtactaccacacgtacaattactacctgaatgtaaccattttaccttggatggaagtagcatatacctgtactttatttaaggcggaagctcttggattaaaaccttatggttactcaggctttacgaatcaggaccggtatttttctctcagattacgggcactgaaagaagggcaattctggaaatacatgcccgctgttgtagtaggcacttccgatccttttacctcgtccggcaacggagttgtggctccgacggaaggtaacggatacttcagtcgtttctacatcgcagccaccaggcatgtccaattaggaagagagacagtgggagtacacctctcctatctttataacaaaaggatagagtacaaactgaatgggatcgcggcaggtatcagttataacccgtctttccatccgcaattgagattaattgccgaatatgattcgaaagattttgcgttaggtgccacctatttgcttttcaaccatttgcatgcacaagtggaactccaaagaatgaaatatttcacaggtggattgactttccagttccgcttgtccggaaaagatggaatgaaaaagcaaaaacgaaacaaagagttaaaacaaaaaatgaaataacatgaaaagtaaaatagcaatattgtctttactgttgacaggcgcagccctctcagcctcagcgcagacaaaagagcattattatagcgaaaaagctaaagataatatctttatcagcgtgggtgtaggagcacagggatgtgtcaaccctgacaactttgattatggctttggacatgccataactccactgatacacgcatcagtcggtaaactgttcaaccctatttgggggatccgtggccaggtagccggatgttggagtacattatactccgaatatggaatgccggaaggcgaatacaagaagatgaagaataaaaaatacttcactctacgtgccgacggattgttcaacttgtcaaacgctatcggaggctataatcccgatcgcttgttcactgtatccgtatttgcaggtccgggacttacgtttgccaaggcctatggcaatcaggataaactgaatgcgctgattaatggttctgtcggtttgatgggacaattcaacatcaacaaatatttggatatcaatgtagaagcaagaggtgaagtctctccttctgtcttcggacattatagttctgctcgtaccgacggtgctgtttctctgacagcaggtgtgacttacacattcggtggcaagagattcgtttcttgcggtgcgcaggtagaccaaaacgctatcaacgaagagctgaatcgttacagaagtgaactgtcaaaagcgcaatcggacttagccgatgctaaaaacgcactggctaacgtaaaacctgtaacgaaagaagtggtgaaagaaatcgaagtagccggccctcgcgcagtcttcttccagattggtaaatccaagatcgacgactatggtatggttaacatccaactggccgctaagatcttgaaagccaaccctgataagaaatacaaaatagccggttatgcagataaggctacaggtagtgccaagtggaaccagaaactgtctgaggcccgtgctcaagccgtttatgacgctcttatcaaagaaggcgtaagcaaagatcaactggaactcgtcggttttggtggaacagccaacatgtttggcaagaacttcctgaaccgtgttgtaattttagaataatagggtttcgattcccaatagggcgggaaagtttttggctctatactttaaagagtgcgtcgctgagacgcactcttttttattcttccgccatcactgttatacgttctttctgaatttgaaagaagaaaattatccccccaatttatccatcatttgtttttttatataaaaagtagagattgtaaatctatatccggtatataaaccttaaagcaataacatggacaatcggacagagcagtattcacttcgggaactattagaaagcatcacagaaaatattaaaaccaagcgcctggctgacgtttttcgtttcatttcattccatcccggtgagatgtatggatcacatcagcatttacgtatcgaaataaactatgtgaaaaagggaagctgcattctccatccggatcatgagagtatcacttttcgtgaaggagaaattatgattaccacttcggacatcagtcatctgtttgaagccggagcagatggtacgaccttgatgcaattggaattcctacccgaaatcttttcccatttcagcttaaatgccacagtcgattcgaacggctctgccctgctatggacaaatcgatttaagattaaaatagaataagtcgacataacagtagttatagtagttattgatacactgcacagacaggcaaaaccgcagcagccagattcggatttatagaaaagtatattaaactcttaattcctaaggctgaaagtccggttgccacataaagctaccataactactgttagcttgaactcaacttaaaacctgtttaaattttacccggaaagagaccggaaagaaactctaaacgggtcaataagcccatataaaatttaatctagaaaaatttaagcagggacttaatagatcagttttacattgtcaatgtagagcgaatttcccggtgaaccgatataagcaccaccatgactggatgtaaactgaagtatcatatgcgtcggcacatcatcagcttccccccacgccacttcatgaatcggcacactttcgcccttactgtttaccgtaaaatattcagaggcctgaagtcgcatcatgtgtgctttatacgccggatctttcgtgatatcaccatacatgatatcgtattttgaaccatttttccaatcagtcgaatggtagtaatagttcaccattgtcccgatacgtttagcatacacattgcctttggcatcttcccaacgtttctgtagcaataaaataacagccggaaaatccttacccggcacatccgttatcttactgaatcccgttgcacgtatacggttttcacgatcggacattttcactttatagtcgaactgaatagccgacggacggtcagtgaacggtattcccatctgcaacaccttattcggattcttggtactcttaatcggttcatgaaccgttcccaaaaacatagatccggcagcaagtacggtgatatctacaataccaagtacttttacactctccatacgagtatccagacgggcacagaaaccgtctcctctggtttcgggaaataccgaagtattggttttggtaatacccgacacacgtgccattacgttagaagttccccagggtgaaccacctttatttgcataaggcttcgcacccacaatggtttcggtagggccaatggcatatacttttttggtatttccgccaataatgcccgactcttttatttcacgcgtcacccattgatccatattcccaaaagggagtatctctactttctgctgcgctacagcagaagctgaacacaaagttagcagacttgccacccacaggcgatatgtcttctgaatcatttttcctcctttttttataaactataatcccattgtttcagtgcaaagtcccaatgatcttgcactaactgcacagtacggtcatcgtacttatatttgttctttttatatccttttttacctcccacatatttctctatcgagccgcgcgcttcggcaaatcccggaatatccaaagcatgataaatattctcagtcattcccatagcatctgcctcaaagtcttcaaacttcacctccatcaggtttccttcaggaatgaattgcttatcggcctcgtatttatgatacaatttggcataaatagagagtatattgttctccaactcagccggagtgatatcctgcaacttcaagggttgaatcgtattagtaaagaaactacgagtagactcaaatacagtatacggattacgcatcagataaataaatttcgcattggggaacattttcaccaattccttcacgcgtcccgtgtgagggggattcttgctaagaaactgagtaccctgcgtattccacaaagagatcttaatcaatttggtaaaagtctcctcaaaaaccttcaattccgcttcactgatagtatcgaaaagcaagtatttatctgcatattcctgctgatatcttggcaagaaccagaaattatagtaggtataaggcatcatgttggcaagggcaaactcttcctcctgcggcaaatcgacagctagctccatattatccgttggccgcttatccggcatcagccaactcatgttctttttaaagaatggctgtccccacatcattaaatgcggaaatacagtctgataagtggtgttatagccaaaatgtgaatcgcacgaaaaaacattgtgtacaaaagtagttccgctacgccagtgaccaaggataaagaccggatcgtgttccaacggcttatttgccagcagcttctcataacgtttatcctgaagtggagccaaagtagacagtaagcgacaaactgcctttgtcagacgatatttacctgtataagccgcatcgatctcccttcctccggtaatagctttaaatgtccgccagtctgcccctactaaagtatttatcggaagtttgttaaattcaagtaatcccataataatgtgttcattgttaatgtgccgacaaactgcatgcagcaggcatatcggcacaccgaataatcatttacttctctattctgacttcgaaaccttgttcacttaatgattttaccgccttctcaatagcttcataatgttcaggagctatgcccagttcaggcagattcaaaaccggaaaatcatcggcaatattcatgtctttcttttccacacgatcgataatcattcccacagcactggtattattggttatcggatcgatcaggataaacgaaccgcacgatttattcttccggtacggatcaaagaacagttctttagctgtagtaaacaccacacgtgcaatttcgttcaaagacaaaaagggaacagacgaatgttccatcgtattgacatccactttatattttatgctgtcgatacgcgtgcggctgacattcgttgtctgcttaataaagaacgatttgttgatatccatcggttcttcatccatccacaccaacattgcttcaaaattacggtccacaacaggcaaattatccggatgaaccaacatttcccctcttgagacatctatctcgtcttcaagtgtcagtgtgaccgactgtgggggaaaagcataatccagctcaccatcaaaagtaacgatactcttcacatgagatactttaccggaaggcaaagccattactttgtctcccttgcgtatgatgccggatgccaccttaccacagaatcccctgaagtcgaggttcggacgaagtacatactgtaccggaaagcggaaatcactaaagttattatcgctgtcgatatggactgtttccagaaaatcgagcaaggaaagtccttcataccacggagttctttccgacttatccaccacattgtctccatcgagtgcggacagtggaatacaagtcacatcgggaatccccaagggagctacaaacttcttatactctgctacaatctcattgaagcgctcttccgaaaaatctaccaggtccatcttgttgacagccaacactacatgcttgattcccaacagagataccagaaatgtatgacgtcttgtctgagtaattactcccatacgggcatctaccagaataatagccagattggcggtcgaaccgccggttatcatattacgggtatactgttcgtgccccggagtatcagcaatgataaatttacggttattggtagaaaagtagcgataagccacatcaatcgtaatgccctgttcacgctctgctttcaagccatccagcaacaaggcataatcaatgtgttcgccggcattgcccaaccgcttgctatcacgctccaatgcatcaagctgatcctcatacaattttttgctatcgaacagcaaacgtccgatcaatgtagactttccgtcatctaccgaacctgctgtcaacagacgaagcaaatccttctgttcgtccttatccagaaatgcttttatatctaatttatctgccatagttgtaatgtttaaaaatatccttcgcgtttcttctgttccatgctaccttcctggtcgaagtcgataacacgggtcgtacgttcgctcttagtggtagtcatcatctcttcaacaatcttctcaatggtgtcggcctcgctttcgacagcaccggtcaacggccaacatcccaatgtacggaaacgtaccattttcatttcgatctgatcacgatatttttccggcagacgttcatcatcagccataatcaagttaccgtccatctgcaccacaggacgctctttggcataatacaacggtacaatcggaatattctccaaacgaatgtactgccagatatccagttcggtccagttactcaacgggaatacacgtatactttcacccttatgtacacgggcgttgtagatatcccacaattcgggacgctggtttttaggatcccattgatggaacttatcacggaaagagaatatacgctctttagcacgcgatttctcttcatcgcggcgagcacctccgaaggcagcatcaaatttatatttatccaacgcacgcagcaaagcctgtgttttcatcaagtccgtatgcaccttactgccatgcgtaaaaggccctacccctgcatgaaaagcttccatattgctttccacaatcagattccagccatactttttggcatattcgtcacggaactgaatcatttccttaaatttccactttgaatcgatatgcatcaaaggaaacggtactttgcccggataaaaagctttttcggcaaggcgtaccataaccgaagaatccttcccgatgctatacagcatgaccggattctcaaactccgccgccacttcgcggataatatggatagactcggcttcgagttctttcaagtggcttaacttatattcttctttcatttttatgattatttcttcatctatattttatttatgtctgcttacccgaggcaacacaatttccagcaatcgattgacagactcctcaagtgacaatacggaagtgtcaagtgacaaagccggatgttcgggagcttcgaaaggggcggatattccggtaaagttttttatttctccccgacgagctttggcatacaatccctttacgtcccgcttttcacattcggcgagcggagtgctgacaaatatttccagaaagtcatccggtccgacaatgcgggcagccatctcacggatatcgttgttagggctgatgaaagcagcaattgtaataatgcctgtatcaataaaaagtttcgaaacctcggctatacggcgtatgttttctacccggtcagtttcggaaaagcccagattattgttgatgcctgtacggatgttatctccatccaagatacgacacaacaatccgcgtttatgcagttcgcgttccaaagcgatggtaatggtactcttacccgatccgctcaacccggtaaaccagatcatcacaccacgctgtttcaagagttcttctttatcctgccgggtcagcatccggtcgaatatcggatatatattattactttcttccattataatatgttagatgttgtttcaattactaaaacggccagattaaagggatcagaaatatggaaatcaggaatgttataagatttaatggcaatccgatcctgacaaaatccataaacttatagttgccgataccctgtactattaaatttgtctgataaccgatcggtgtagaaaaactggcagatgcagccatacaaatgaccacaaagaacggtgtagggtcgacacccaactggaccgaaagcgacagagccaacggaaaagccaatgcagcagcggcattgtttgttatcagctccgtaaacaaattggtgataataaataaaactgccagtaatacatgtgggccatagtcatggctcatgccgattataaatcctgcaaccttatcggccacacccgaatttaccattgctttactgatagcaaaagcacaagcgatcgtaatcaatatatcccaggaaatatatttagtgtatttacgtgccggaaaaattttagtccaagccatgataatggtagtgacagaaacaaagaagaacatatccaacttcatgtccggaaacatttctttcactaccggaagctcaccgatagtagcaccggcaatcatcaggatcagcagaatcaatgcaaaccaacgttttccttttcccggtatcggttcattatcatttccgttagccaacagcacaaacacggaagattctccccaagtgggtatgaacgtgtcatccgccattaccaccaacgtatctccttcacgcaagatcacttcttcaaggttgttgatgaaccgctgtccgttacgtttctttatttctttaacttcggcaccatagtgacgtttaaaattaaactctcccaaagttttgttgatacccgggaaacgggcaccaagtactgcctccacgcggtgaagcttatcgccttcttctacttcttcatcgggcacagctgtatcggggcgtgcatccggaagcagtttcttagaaaaagcaaacagataaataataccggctattgcaataaagatacccactttgcccaattcgaacatggtaaatccttcatgaccggattccaatatcattccatgcacaaccaggttggtagatgtaccgatcaaagtgcagatacctcccaatatagttacgtacgaaagaggaattagaaatttagtggcaggtaaatggactgtccgtgcccatcgtttaataatcggggcaaaaatgacaactaccggagtattgttcagaaaagcggaaataaaagcgaccgcaggcaataagcgtaattgtgcccggaagaccgtcgtccgtttctgaggaagcaacttcttgacaacctgccccaacgctcccgactgcctgataccttcactgaccaaaaaaagcagggccacggttatcatccctttattactgaatccttcgagcatttccttcggagtcaaaatacccgcacagagaaacaacaccactacagagaaaagtatcatgccgggacgcattttgtccaagatcaaagcaattaccatccctaataaggataacagcacaaatgcaatttcaaatgtcataaacgcaaacaattagtggtttaccttctcttctcaacaataaaccagggattcagcaaatcttctttattatactgcaaaggaacatcttttttatccgcctgataaatttccattcccgcagcacgcgcaatggcatgcccggcagcagtatcccactccatcgtaggagcaaaacggggataaacatccgctttaccttcggcaaccaaacatattttaatagaactgccgctggaaatcaactcgacatgtttgtgtttttgcttcaccgcatcaatgtacgcttcggtctccggagtcaggtgtgaacgggaagccactactacaaatcggtcccgctgcaggtcttgcggcaaccgtacggaagcagctaccagcttatcgagtgttgcatcgtcttctaaagtcgtaatgcccgacagcttgtaggcaccgatttcctgaccggcaaagtaaagttcttttttgaccggtaaataaatcactccgataatgggaactccggctttcactaacgcaatatttaccgtaaactcaccgtttcgcttgataaactctttcgtaccatccaatggatcgacaatccacatcacatcccaattgcgacgggtatcatactctaaatgtttcccctcttcgctcagtacgggaaaaggagtttcgtccagaatggtggcaattgttacgtgtgctttccggtcagcaatagtcaaaggagagtgatccgctttccgctctatttcgaagtccgaagccggatcggtataaatagacaatatttcctcccccgccttcagggctgcatcaacagcgacaaataagtatttatgttccattttattacgctttaacgaccttgtttcctacaaggcataatatcccccatttaatagaggtacaaaagtaaaaactttatctctttaaaaagtttttaaacagctaattataacttcttttagtagaaaagggcaaaactctaaaaaacctttcatcgctgatgccggttgagtacatcactaattaacattgttaagtctttgctccctattattggttctctatacacaaataacacctcttttacattcaaacaacaagtcttttgaatgtaaagaagcagatttaacacaatgttaaacctaagctttccaaagcttcaaacaaacaattgtaaatatctggttccaaaacaaatagaatatcaaatcattctccgttcgagttttttcttcctcaggttcccaaagagacagttgttatttaagtaaccatatactctttcaatatttttccaatagtataaaattatctcaagtcatgccgtttttatattaatctttcagattatgcatacaaagcattcacatatccttgcgaatatatttttttttcataactttacatcattctatcaaaaaggactataaaattattcaaaaccatcaataataactaatcataatccctaccacaatgaagaaaagtattattctgttattcatcagtttacttttatccccgctatgcataaaggcacatcaacccgaattctccactgccggatttttccggctggcagactccggacgaaacgtctattccatgaatcctgcatggcgtttttataaaggaaattgccccggagctgaaaccggaaatttcgacgaccggtcatggacagtagtttctctgcctcatggtatcgaatatctgcctacagaagcaagcggctgtatcaattaccaaggcgaagtctggtatcgcaaacactttacaccggatgcggcattgaaaggtaaaaaactttttttacattttgaggcaattatgggcaaaagcaaaatatacgtaaacggtaaattgctagccgaacatttcggtggttatctgccggtggtcgtcgatgtaactgatgcattggaatttggaaaggaaaacctgatcgccgtatgggctgacaatagcaatgaccccaactatcctcccggaaaacaacaggaagtgctggacttcacttatttcggaggaatatatcgggattgctggttgatagcacacaatcaggtattcatcaccgatccgaattatgagaacgaagaagcaggcggaggactatttgtcgcttataacaatgtatcggaccactctgccgaagtattactgaaaatacagattcgcaactccgggagaaaagctttcaaaggtgtagtcgaatacgaacttcagcaaccggacggacaacaagtggcttctctaaactccgtcatccggatcaagcccggaaaatcaacctattcatcagataagctgaccgtaaaaagtccgatgctatggagtccggaaaatccggcattatataacctgatcgttcgtatccgtgacgaaaagggcaatccgatagatggttaccggcgccggatcggaatacgcagtatcgaattcaaaggagaagatggattctggctgaacggtaaaccttatgaagctccgttaatcggagccaatcggcaccaggatttcgcaattgtgggcaatgcggtacctaacagcattcactggcgggatgccaaaaagctgagagatgccggaatgaaagtaattcgtaatgctcactgcccgcaagacccggccttcatggatgcttgtgatgaattgggattatttgtaatcgtcaataccccgggctggcaattctggaatgatgccccggtctttgcacagcgggtatacagcgatatccgtaacctggttcgtcgagaccgcaatcatccttgcgtatggatgtgggaaccgatcttgaacgagacatggtatccggcagatttcgcccggaacgcacatgacattgtagaggcagaatatccatatccctattgttatagcggatgcgatagcgaagccaaagggaaagaacatttccagatactttttacccatccgctcaatggagacggaggagcctattcgactaacgatatcaagaaacagctgacttacttcacacgcgaatggggtgacaatgtggatgactggaactcgcacaattctcccagtcgcgtagcacgcaactggggagagcaggccatgcttatacaagcacagcactatgcccgcccatcctacaaatacaccagctatgatgctctttaccgcactccgcggcaacatgtaggaggctgcctctggcactcgttcgatcatcagcgcggctatcatcccgatcccttctacggaggtgtcatggacgtattccgccaaccgaagtattcttattacatgtttatggcacaacggtcgcccataaaagaagagcgccttttccaaaccggtccaatggtttatatcgcccatgaaatgacaccgttctccggcaaagatgtcaccgtctattcgaactgtgacgaagtaagactcacttatctcaaaggcggacaaacgcaaacctatgtacataaacaggaaaaagaaggaatgccccaccccgtcatcacattcgagaatgtatacgacttcatgaaagataaagcactttcacgccaaggtaaacaagctgacgtttacttattggcagaaggattgattgacggtaaagtagtcgctacccacaaagtggctccggcacgacgtcccgaaaagctgctcctttgggtagacaatgaaggaacagacctgaaagccgacggttctgacttcgtcacagtcatagctaccgttgccgacaaagatggaaatatcaaacgcttaaacaactataccatcaaatttcaaatagaaggtgaaggacgtattttaggcggagcaggcaatttggctaacccggcccctgtccgttggggaacagccccgatattagttcagtctactttgaaacccggaaaaataaaaatcacagccagtgtcttgttcgaaggctcgcagatgccaagcagtgccgtgctggaattggaaagtaaaccgggagacttcccccagatatacgaccgggaagagtcagcacttattccgaacttcaccggacaagaggcagtaaacaccctggccccaaaatcagaggcggcattggaaaaagaaagactacagaaagctgaaaatgctgccaagctaaaagaagtagagcaacagcaggaagagttcggtgagaaaaaataatcatattcctatttactaaaggagaaatgtgtcaaaactcaccacaggagacacagagtaacacagagccgattttaagttattgattattaataaaaagactctgtgatactctgtgttactccgtggtgaaaagagttatgactttacctttgcaccgacagatatgcttgatgccttatagggcgatatcctttagatcagattcccctgccctacttagaacaactgtttatataggcatgaaaagaattacagccttatcttttttgcaataaaaaatgtatagccataatactctttatacttatggtacagttcttcttcaatggattgaagcatactaaattcctcagcaattttatttccggcatatttagttaaaaaaatcttctgagctgcaactttgggggtaaagtaatgatctgtccaacaattttcaggcagaataaatgtagcgacaggaagatagcctgccttgtgaattttggctacttgattaggaatcgtatcgatttcgggatatgcatccatccagaagtcattgatttccgccggacgttcgtccgtaaaccatgaacattcagaaactgcaagataccctcctttcttcaaatacttacgccattcattcaatccccgttcaaaaccaatattatagatagccccttccgaccaaatcaagtctaactcttcatttcggaaaggaagatcatccatggaaccgacaatgcctgtcaccctgttttgcaagcccgactgtcttgcattacgattgaaaatatcaataaagccggaaagaaaatcgagtcctgtaacctgccccgtcacatgaccggccaataccatggtctgacctccggttccacagccgatatcggcgataagggatttttcagtgagattatctataaaactcaatgctttcaatgttacctcaggacttccgggaccctgtcgttccatattggaaaaaaaatcgcagattaaattaagttcgaaatcgtgaattgttttattttcgttactcattatcttaatatatttcgcatacacgaaaagcatagtaatactttcagcattgcatgcagattaaacttgaattataataataaagaattgctcccgaaaagagttttccgagagaagacgaaaggacaatctgttgcaaaaaaacagattgtttacaaaaccaaatccgatctaagagtatttgtcatgccgcaaagatacataatattttgagaacctgttttaatgttatcaataaaaagtgtatctacccaagtggtgaaacaaaaaagaaggcatccttcacaggataccttctttaccgggagacaacatccgtcactcccgaaattaccaaaaagatttttttattaatagattctatataacaaccaggcgccctgaaagtcttttctactaggatatttagccttgaaagcatcacgtgcctgcgcagcagaagccctatcggcaaatgtatttacaatcacacgatacatagctgtctcagcattaaaagcaatggttgcattataaccttctttgtccagaaaatctttcagaccttctgcatttgctttcaaaccgaagctaccgcatactacgctataatctttcaatccatcagcacctgaaacaactgttaccttttcctgacgaacgcctgcagcattatcaacagcctttttagtttctaccggagcagcaactaccggagtaacttctacgggagcttctacctgaggctcagccaattcctgttgtttagctttctcgtatgcctttttataagcgctttcgctggatttacatgaagcaaatgccaaggcaacgcatacgcccatccctaatactactaattttttcataatctatacacatttagttaataatcttgtatccattcttttgaaggggacaaaataatagaatttttatcaccccacaaaacaatcttcctaaaaaacacttttttagatacctcagcagtcttttttcttataagaaatcgtaccggttgcctgataagtgggcatcaccagcacttctgctatctgtatatgttcgggagcagaggcagcataataaactgtttcagctatgtcgtctccagtcaacggacgaatacccttataaaaagcatcggcagcatccttatctccacgataacggacaaccgtaaaattagtttccaccattcccggttttatgtttgtcacacgaagcggagtatctaccaaatcaatacgcaaaccgtccgaaagtgctttgacagcggctttagtggcgcaatatacgcttccgccgggataagccgcatcaccagctatcgaaccgatattgatgatatgcccgtgtccgcgttccaccattccgggaaccactatacgcgtcatagccaacaaggcttttatattagtatcaatcacaatatcccattcgtccaggtttccctcaaattctttatccacaccaatcacaagaccggcattattcaccaatacatcaatacgtttccactcttccggtaaagaagccagtgccatggtcgctgcattccgatcacgtacatcaaacggcaacaggcagatacgtactccgtatttagcttccagttctactttcaactcttcaagttttgccacgttacgggcattcagaatcaaatccgaaccttgcgaagcaaacttacgcgcacatccttcaccaatgccactgcttgctcccgttataaaaacgattttacctttcatttcttcttatacaaatttagattacttatataatgaaaggcaaaagtacgcttaaacctccgatgatatgcccttcaccttagttaaataagattaaagcattacagaaaaaaggatttacgtcttacgattaccctatctttgtgctatataacataacagagccgagaggctcattcaattattgtacatgacatttgaaaatttgaatttgatagagcctatcttaaaggctttaagacaagagggttacacctctcccaccccaatacaagaacagtcaatccccattttacttcaaggaaaagatttattaggttgtgctcaaacaggtaccggtaaaacagctgctttttctatccctatcttgcaaaaattgtataaaaccgaccatcgtaaaggtatcaaggcacttgtgctgacgccaacccgggaacttgcaattcagataggtgaaagtttcgaagcatacggacggtataccggtctgaaacatgccgtaatctttggaggagtaggacagaaaccacagactgacgctctacggagcggtattcagatactggttgccactcccggcagattattggatttgatatcacagggatttatctccctgagttcacttgatttttttgtattggacgaagcagaccgtatgctggacatgggatttatccatgacatcaaacgcatcctgaaactgctaccggcccgaagacaaactttgtttttttcggcgaccatgccaccggaaatagaaacgttggcaaattcgatgttgactaaaccggagaaagtggaagtgaccccggcctcttcgactgtggacatcatctcacagcaggtctatttcgtcgagaaaaaagaaaaaaaggacttgctgatccatctgttgaaagatacatcaatcgaatcggtacttatctttacgcgtacaaaatacggagccgacaaattggcacgtgtactgactaaagccggtatcggagctgaagcgatacatggtaacaaaactcaaaatgcacgccagcgtgctttgaccaattttaagaaccatacccttcgcgccttgatagcaaccgacattgctgcacgcggcatcgatgtagaccaattatcacacgtaatcaattacgagttgcccaatgttccggaaacttacgtgcaccgcatcggtcgtaccggacgtgccggacatgaaggagtggccatctctttctgcgaatcagaagaactgccctacttaaaagatatccaaaagttgatagggaaaaaaatcccggtggtaaaagaccacccgtttgtcacgaccgaaggtatcaaggcccaggaagaaaagcaggaagaaatcaaggttaaagccaaagccaacaaaacataccgcgggagccgggctaatggcgacttctggagacggaaaaagcaaaaaacaaatcaaccgtcttccaccaaacaggaaaaaaggaaatagatactctcggattcagacaaaaacaatcctgcccgaagggtatgccatcattcaccacagagtagtacagatcaagcttaatctattgataactaataacatttatctgcataggcctgtataatctgtggtgaatgagagtttcagcacatcctcccaaacgccgcccggcatttacattaagattacttctgattttaagctgagtattttttttctaaaaaaattaaggcaaacagaacaagttttcaataaaaatgttagctttgtaatatgatcatttaaaaacaaaagattatgaaaggacttaatgtattagcagcttttctgggtggtgcagccgttggtgcagccctgggtattttattcgctcctgaaaaaggagaagatactcgtcacaaaatcgcagagattcttcgcaaaaaaggtatcaagctgaatcgtaacgaaatggaaaacctcgttgatgaaattgcagctgaaatcaaaggcgaagtaattgactaaatgaacaagatcaaaacagagctatcatgtttacagacgataaaagcattgaaaatatccagcagctgtttgctgagttcaagaagttccttgtactccagaaagaatataccaaactggaattaacggaaaagttaactatactcttatccacgttaataatgattttagtgctcactatcttaggtatggtagccctgttttatctgctttttgccctggcttatattcttgagccgttagtaggcggtttgatggtaagtttcggcatcatagcaggcatcaatgttttattgattgccatcatttattttttccgcaggcaacttatcatttcgccgatggtaaatttccttgcaaacctatttctcaacgactccaataaaaaatgaagcaatgaacaacagcacacctactccaaagaaaattacgctggaagacattgctcagcgtaaacaagaagtgttgcaggaaatctgtgaccagaaacaagccatggcggataccacccgccgaattttcgccccccttgcacctgccgcctccggtggtaatgcgttaatgcgctctttcagtaccggtatggccatttttgacggtgtcatgctgggtatgaaaatgatccgtaaagttcgcggactcttccgaaaaagatattaaaaaaacacccggacatacatcattgcatatccgggcgtctaatataaatacgttgaagaatgtccttacacgtatgtttccaataacttcacattcccttcttgaggcacaatggtcaattcctgagtagtggcaggaagcaaaacagtttctcctgcacccagtcgcacttcgttgccttcattatctgtcatcaggcaagagccttctatacaaataaagattacgaatgaatccagctccgaataatcacagctgatctgttcactcatatcataaaccgaagtcgtgaaataaggacatgccaccaactcaaccggttcatctttcaaaggttcatatttggtacgatagtcatcgagcacttcataattgatcgcatcaagtgcctggctggtatgcaattcacgtgtttttccattagcgtctttacgattaaaatcataaatacggtaagtgatatccgacgtctgctgaatttcggcaataaatgccccggcaccaatactgtgaatacgccctgcaggcaggaagaaaacatctcccggatgaatttcatattcctgaagaacatctgtaattgtattattatgcacgcggtctttatattctttcggtgtaatctgttcagaaaatcccgaacgcagtttggctccttcgtcagcacccactacataccacatttcagttttaccttttgagttgtggcgttttttagccagttcatcagtgggatgcacctgtatagacaagtcttgcttcgcatcaatgaactttatcagcaaaggaaactcattgccaaaacgggcatagtttgcttcgcctaccagttcctcacggtattttttcaccatatcggtcagtgtaaggcctttatccgggccgttagctacgacagattcgttgttctctacgccggatatttcccagctttccccaactcccttcaaatcatcattcaaatgcttgaacgggataattttgtcgcccccccaaagcgtctgcttcagaatgggttcgaattttaacggatacatttttgtttttcttgttataaacttagattaaaaactcatgattttaacaatcaagggacaaacatacgaaaaatatcaaataatacacaaaatccgggcttttaattaaaactaacatgaattttttatcttcgcattacaacttaggatgctttcacggaaaacgctaaactttcctaaatcgccgaacagatttacaaagaataatttgggagaacgaaagaatttccctttatttgcaagaaattttaataataccagacatgattaacacattcccaactgaaggaaatcggtcagggctcagccggaaagattttcaaaaggatataaacgataagaaaaccgatttgtttatcctcaaaaacaagaaaggaatggaagttgccgtaacaaactacggatgcgccattctatctatcatggttccggataaagacggaaaatatgccaatgttgtactcagctatggtacactggatgcactgatgcacggaccggaacctttcttaagtaccactatcggacgttatggcaatcgcatcgccaaaggtaaattcaccctgtatggcgaagaacatagtctcacgatcaacaacggtcccaactcacttcatggtggccccaccggatttcacgccagagtatgggatgccgagcaacttgaagaaggggtgatccgattcaactatacttccgctgacggagaagagggcttccccggtaatctggaagttgaaatgacttatcgccttgaagaagaagagaatgcgattgtcatcgaataccgtgccactacagacaaagcaacagtcgtaaacctgaccaatcacggtttcttcaacctggcaggaacagccaatcctactccgactgtagaaaataacatcgtcacaatcaacgcagatttttatactccgatcgatgaagtatccatcccgacaggagaaatagccaaagtggaaggaactccgatggatttccgtaccccacatactgttggcgaacgaatcaatgacaaattccagcaacttatatacggtgccggctatgaccattgctatgtattgaacaaggcagaaacaggttctctcgacctggcagctacctgcaaagagcccaacagcggacgcaccatggaggtatataccacagaagccggcgtacaattatacacaggcaactggctgggcggcttcgaaggaacaaacggagctactttccccgcacgaagcgctatctgcttcgaagctcaatgcttccccgacacaccgaataaagcacacttcccgtcggctacattactgccgggcgatgaataccagcaggtaaccatctataaattcggagttgaaaaataaataaggaaataactaacctcatttttataactaacaactttttaaaaaccatgacacaacaaaaaaagaattatgtgttgcctattgcaatgatgtttgcgctttttgcaatgatttcattcgtaacaggacttactaacccgctcggacttattgtaaaagagcaattccaggctgccaactggatgacgcagctgggtaatgcagccaacttcatagcttatgcctttatgggactcccggcaggtatgatgctcaaaagaatcggttacaaaaagacagcccttactgccgtagcagtaggatttatcggagtcggcattcaggtgctttcgggacagatggactaccagcccggtgaactgactgtattttggatctatctgacaggtgcttttgtttcaggtttctctatgtgtatgttgaatgcagtagtaaacccattgctgaatacacttgcaggtggcggtaagaaaggtaatcaattaattcagttcggtggttctctgaactctatttcagctacaatcgttccggtattgggtggttacctgatcggtactatcagccaggacacacgtatcagtgacgctaatccggcattgttcattgctatgggtatctttgctgtcgtattcatcgtgttggccatcatggacatccccgaacctcacaaagaaagcgccagtgatcataaagtaaaagacactcacagcccgctttcattccgtcacttcgttttgggaacagttgccattttcgtatacgtaggtgtggaagtaggtattcctaactttatcaacctgttcctgactacttcacctgatgcagccggtgccaaaggtttcggtatggatacagctatggcaggttcaatcgtaggtacttactggttcctgatgatgatcggtcgtctgtgcggtggtgctttgggagctaaattctcaagtaaaactcaattgacagtcgtttcttcactggctttgatcttcttgctgatcggtatgtttgcccccagcgcaacaacagtagctatgcctgtatttaaaggaggtgccagcatcggtttcggtatggaaacagtacctgtaggaatcatgttcttcgcactttgcggactctgtacatctatcatgtggggtggtatcttcaaccttgcagtagaaggactgggtaaatatacggcaatggcttccggtatcttcatggtaatggtttgcggtggtggtatcctgccgttgattcagggtgcagtagccgacgtgaccagcagctacattgcaagttactgggtaatcttcgctgccgtagcatacatgctgtactatgcacttgtaggttgcaagaatgtaaataaggatattcctgttgaataaaacttaaataataactttttaataccaaaacgatcatggatatagaacacgtaagaagtcgcttcatcaaacattttgatggaactacaggatttgtatatgcctctccgggccgtatcaacctaattggtgagcacaccgactacaatggcggatttgttttcccgggagctatcgataaaggtatgatcgccgaaatcaagcctaacggcacagataaagtaaacgcttactctatcgacctgaaagattatgtaactttcggattgaacgaagaagatgctccacgcgccagctgggcaagatatatattcggtgtgtgccgcgaaatgatcaaacgtggcgttgacgtgaaaggattcaataccgctttctctggagatgtgccattgggtgccggaatgtcttcatcggctgctttggaaagtacttatgcctttgcgctgaatgacctgtttggtgaaaacaaaatagacaaattcgaattagctaaaatcggtcaggctacagaacacaactattgcggtgtgaactgtggtattatggaccagttcgcttctgtattcggtaaagaaggtagcctgattcgtttggattgccgctctttggaataccagtacttcccgttcaaaccggaaggttatcgtctggtattgctggattcggtcgttaaacacgaattggcttcatcggcatacaacaaacgtcgtcagagctgcgaggctgctgtggctgccatccagaaaaaacatcctcatgtagaattcctgcgtgactgtacaatggatatgctggcagaggcaaaagctgatatcagtgaagaagattacatgcgtgccgaatacgtaatcgaagaaattcagcgtgtactcgatgtatgtgatgccctggaaagaggagattacgaaacggtaggtcagaaaatgtacgaaactcatcatggcatgagcaaactttacgaagtaagctgcgaagaactcgacttcctgaacgactgcgctaaagagtgtggcgtaaccggttcacgcgttatgggcggcggcttcggcggttgtactatcaacctggtgaaagacgaattgtatgacaacttcatcgagaaagctaaagaatcattcaaagctaaattcggcagaagcccgaaagtgtatgatgtagttatcagtgacggttcaagaagactggtataaagattcaaaaactaatattcagaagacaaggcacatcctaaacagatgtgcctttctttttgttatgtaaaaaagctatctttttatggtagataagtcccactaaaaggttatctttgcgaaaaatctgaaaaaactaaattaatcaatagatatgaacgatagtaaacttatgaatcgtgcggctgataatatccgcatattagctgcgtcgatggtggaaaaagccaattcgggacaccccggaggcgccatgggcggtgctgattttgtgaacgtactcttctctgagtttttggtatacgatccgcaaaacccacgctgggaaggtcgcgaccgctttttcctcgacccgggacacatgtcaccgatgctttattccgtattggctttcaccggaaaatatacattggacgaattaaagcaattccgtcagtggggcagccctactccgggacaccctgaagtgaatgtagaccgtggcgttgaaaatacttccggcccgctgggacagggacacacttatgcagtaggcgcagccattgcagccaaattcctgaaagcccgctttggcgaagtaatgaaccagactatttacgcatatatatccgatggaggtatccaggaagaaatctctcagggtgccggccgcattgccggtacactcggactggacaacctgatcatgttctacgattcaaacgacgtacagctttctaccaacacagaagatgtaacaacggaaaacgtagccatgaaatatgaagcatgggactggaaagtaatcacaatcaacggtaacgatcctgacgagatacgcaaagctctgactgaagccaaagctgaaaagaaccgtccgaccctgatcatcggtaaaacgaccatgggtaaaggagcacgccgggccgatggaagcagctatgaagccgactgcgcgacacacggcgcaccattgggcggagacgcatatgtaaatacaatcaagaacctgggtggaaatccggagaatccattcaccattttccccgaagtagccgaactgtatgccaaacgtgcggaagaactgaagaagattgttgctgacaaatatgcagcaaaagcagaatgggcaaaagcaaaccctgaaaaggcagctaaactggccgaattcttctctggaaaagccccgaaagtaaactgggatgccattgaacagaaagccggcggcgcaacccgtgccggatctgcaaccgtattaggagcattggccactcaggtagaaaatatgatcgtttcatcagccgacctgtctaactcagacaagacagacggattcctgaaaaagacgcacgcattcaaaaaaggagatttcagcggcgctttccttcaagcaggagtttcagagttaagtatggcttgtatttgtatcggtatgtctctgcacggaggtatcattgctgcatgcggcacattctttgtgttctcagactacatgaaaccggccctgcgtatggctgccctgatggagcaaccggtaaaattcatctggactcatgatgcgttccgtgtaggagaagacggacctactcacgaaccggtagaacaagaagcacaagtacgcctgcttgaaaaactgaagaaccacaaaggacacaactctatgttggtacttcgcccggcggatgtggaagagacaaccattgcgtggaaacttgcaatggaaaacatgtcgactcctacagcactgatcctttcacgtcagaatatcgttaacctgcccgcaggaaccgattattcacaagctgcaaaaggtgcttatatcattgccgacgccgatgaaaacccggatgtgatcctagtagcttcgggttcggaagtttcaacgctggtggccggtgccgaacttctgcgcaaagaaggtgtgaaagtacgtattgtttccgctccgtccgaagggttattccgtaatcaaagcaaagagtatcaagaatccatacttcctgcaggagccaaaatctttggtctgacagccggacttccggtgaatcttgaaggtttggtaggttccaacggtaaagtgttcggtcttgaatcatttggtttctcggcaccctacaaagtgctggatgagaaactgggattcaccgcagaaaacgtatacaatcaggtaaaagcaatgctctgatcaatcattaaatgtgctaatgcgctaatccggcaggatcagtgcattagcacattcattatattagcacattaaaaaggacatgaagaaaattggaatttgttgcgaccacgccggtttcgaattgaaagaatacgtaaggggctggctggaagcaaaaggttgggaatacaaagacttcggaacttactcgacagacagctgtgactatcccgattttgcccatccattggcactggctgttgaagccggcgaatgctatccgggaattgccatctgtggtagcggtaatggtatcagcatgacattaaacaaacatcagggtattcgtgccgcactctgctggacagcagaaatcgcacacatggcacgcctgcacaacgatgccaacgtattggttatgcccggccgttatatcagcacggaagaggcggatatgattatgacggaatttttctcgacagagtttgaaggcggacgccaccagaaacgcattgataaaattcctgtaaagtgagagtctcccctatcgacctccatatcacatcgatagaagactgactttaataacaacatgggagtgtatcaagggttcactgcaaattagcgaacttttgatacactcccctttttatagccccctcgcaaatgcccgggaaggatacaatagcctctattcatcctcagaacagtaccagattgacaaatacctattttatctccaccctctatttttttctgttttcctatttttcacagtagagatgaacaggttaaaagataaaaagctatctttgtgactcaataatccggaaaatcaaaagatatggatcaactgaaaaccatcaaagagcttatcaatcaaggagatatagaaaatgcgcttcaagcacttgaagaatttctccagactgaacccgtcggtaaagacgaagcttactatctgatgggaaatgcttaccgcaagttaggagactggcaaaaagccctcaataattatcaatccgccattgaactcaatcccgacagcccggctctccaggcacgcaaaatggtgatggatatattgaacttctacaataaagatatgtataatcaataaacgtaataaaaatagattatggcaaaaatcaaaggagcaatcgtagtcgacacagagcgttgcaaagggtgcaacctgtgtgtggtagcttgtccgctcaacgtaatatccctcgccaaagaggtgaatgtgaaagggtataattatgcccagcagattcttgaagatacctgtaacggatgcagttcatgcgcaaccgtatgtccggacggatgtatctctgtttataaagtaaaagtagaataaaagaaaagaatatggcagaagaagttgtattaatgaaaggaaacgaagccatcgcccatgcggccatccgctgtggtgccgacggatacttcggatatcctattactccgcaatcggaggtgttggaaactcttgccgaactgagaccttgggaaactaccggcatggtagtcctccaggcggaaagtgaagtggcagctatcaatatggtttatggtggtgccggaagcggcaaaatggtgatgacctcatcatcaagtcccggtgtcagcctgaaacaggaaggtatttcttatctggcaggtgccgagcttccatgtctgatcgtaaacgtgatgcgcggcggccccggtttgggtactatccaaccaagccaggccgactatttccagactgtaaaaggtggaggacacggtgactataaactcatcgcattggctccggcttctgttcaggaaatggcagactttgtcggactcgctttcgaacttgcgttcaaataccgtaatccggccatcatccttgcagacggtgttatcggacaaatgatggagaaagtggttcttcctcccgcaaaagcccgccgtacggatgcggaagtcatagcacaatgtccatgggcttctaccggaaagacaaaagaccgtaagcccaacatcatcacttcgttggaactgcgtccggaagagatggagaaaaacaacctccgcttccaggcaaagtacagagtaattgaagaaaacgaagtacgttttgaagaaattgactgcgaagatgcagaatatctgattgtagctttcggttcaatggcacgtatcggccagaaagcaatggaactggcccgtgaagaggggattaaagtcggtatgcttcgccccatcactctatggccgttcccgacgaaagcgattgccgagtatgccaataaggtaaaaggtatgctggtaaccgagctgaatgccggacagatggtagaagacgttcgtttagcagtgaacggaagagtgaaagttgaacatttcggccgcctgggaggaattgttcccgatccggacgaaatagtaactgcattgaaagaacaattaatcaaataactacagtacgatgaatcccgataaaataagaaacgtattgaacatactgtttatgatattggctctggcagctattatcacctacttcgttgcgaaggacgactttaaggtgtttatctacgtatgcggcgcggcaatttttgtcaagctgatggagttttttatacggttcaccaacagataagtatccgggccttgaagcattttaagtctgcgtagtttaagacacccgaacttagaacaagcaagcccggtcacttaaagataaaaaaaagaagttatgacgaaagaagaaataatcaagcccgagaatctggtttataagaaaccgactctgatgaacgacaatggcatgcactattgtccgggttgcagccacggcgttgtacataaactgattgccgaagtaatcgaggagatgggactggaagacaaagcagtcggtatctcacccgtaggttgcgctgtatttatctacaattaccttgacattgactggcaggaagctgcacacggacgtgcgccggcacttgccactgccatcaaacgtctttggccggatcgcctggtgttcacctatcagggagatggcgaccttgcctgcatcggtacggcagagactatccacgcattgaatcgtggtgaaaatattacgattatctttatcaacaatgccatttacggtatgaccggaggccagatggctcctactaccctgatgggaatgaaaaccgccacttgtccttatggacgtgatccggaactccacggatatccgttgaagataactgagattgctgcccaactggaaggtacagcttacgtaacccgtcagtcggtacaatccgttccggctatccggaaagctaaaaaagcaatccgtaaagcttttgaaaattcaatgaacggaaaaggctccaacctggtagaaatcgtttcgacctgtagttccggctggaaaatgactccggagaaagccaacaaatggatggaagaacacatgttccccttctatcctcttggcgacttgaaagataaataataagttaatatcattaagatgaaagaagaaataattatagcaggattcggtggacagggtgtactgtctatgggaaagattttagcctattccggactgatggagggcaaagaagtgacctggatgccggcttatggtcctgagcaacgtggcggaacagccaacgttacagtcattgtaagtgacgacaagatctcttcaccgatcttgagcaaatatgatacagctatcattctgaatcagccttcactggaaaagttcgaaagccgtgtgaaacccggaggtatcctgatctacgacggatacggcattatcaacccgcctacccgcaaggatatcaaggtgtaccgcatcgatgcaatggatgcggccaatgaaatgaacaatgctaaagcattcaacatgatcgtgctgggaggattgctgaaacttcgccccattgtcactttagaaaatgtagtgaaaggtttgaagaaaactttgcccgaacgccaccatcacctgatcccgatgaacgaagaggccatcaaaaaagggatggaactgatcagagaagcttaaactgactgagaattgagaatcggaatttaaaaattattagctatgccacaggcagagatagcggataatttttaaatttcaattctcaattctcattttaataagtatctttgcggctaattatgagacgaatcctacttacatatatactccttgttgtaggtttgctgaccgcacaggcacagttcaaccctacacaacaagttgatccccgtaccggcagagatgccaacggcaaccagatagacccggccatgcgggttcaggaagatagtacagacgttgagatacagggacttcctccgacactttatatgtggcacgtcagcgaaaacctggggacgattcaaagaatcccggctgataccgcaacccacatgtttcagaacaccaacctggtagaaggtctgacaggacattataattatctgggcaatttaggttctccccgtctgtcccgcctcttctttgaacgtcgggacgcggaaccgaccatctttatggaacctttttcaagcttcttcatacgtcccgacgaattcaacttcaccaacagtaacgtacccttcaccaatcttacctactataaagccggtaataagatcaatggagaagaacggtttaagtcttacttttctgttaatgtgaataaacggctggcatttggtttcaacttcgattacctgtacggacggggatattataacaaccagaatacctcttactttaatgccgcacttttcggaagttacataggcgaccgctacgaagccactttactgtacagcaacaactatctgaagatgaacgagaatggcggtatcaccgacgaccgttacatcacccgtccggaagagatggcggagggaaaaaaggaatacgaatcgcagaatatccctaccctgttgagcaaaagcgccaatcgtaacaaagacttttacatattcctcacccaacgctataaactgggattcacgcgtgaagtggagaaagccaaagatgacacaaccaacactcaaaagacagagttcgttccggtcaccagtttcatccacacgatgaaagtggaacgcagccgccaccagtttacttcggaggacgaactgtacaaaatttatccggaggcttatatccaacccggaaacaaattggtgaatgactctaccagttatatcggagtcaaaaacacattgggaatcgcactgctcgagggtttcaataaatatgccaaagctgggctgacagctttcatctcgcataagttaagcaattaccggcttatggaccgggactctgtaagcgtggataaatacagcgagcatgaagtctttgtcggaggtgaactggccaaacgccagggaaaaacgctccactaccgcgccatgggtgaagtgggaatccttgataaagcgatcgggcaattccgtgtcaacgctgacctcgacctgaacttccgcctatggaaagacacggtcagctttattgcccgcggatccatcagtaacactcttcccgcattctatatgcgtcattatcactccaagtacttctattgggacaatgacaatatggaaaaagaattccgtacccgactggaaggtgagctgaacatagaacattggcaaaccaacctgaaagccggagtggaaaacatcaagaactatacgtatttcaatcaaaaagcattgccccaacagaatggaggtaatatccaagtgctttccgccactctgtcacaaaacttccgcctgggcattcttcatctggacaatgaagtgacctggcaaaagtcgagtaacaacaccgtgttacccctgcccgaactttcactataccataacctctatatccagacaacactggctaagaaagtgcttcacgtacaattgggagccgacgtacgttatttcaccaaatattatgctccggcatatactcccgccatccagcagttccacttgcaaccggaagacgaccaggtaaagattggcggttatccgatcatcaatgtatatgccaacctgcaattgaaacgtacgcgcctttttgcgatgatgtaccacgtcaatcagggaatgggtaactcgaattatttcttgtcaccccattaccccatcaacccgcgcctgtttaagattggtgtttcctggaacttctatgactaactgccgccatgaatctactgagacctaagtatctgaaatacgttgtattgggactgatatcagccctcgttgtcacctgctggccccgcaaagagaagcccaaaggacatccgcgggattatgccgagatcaaagaaagcggcattcttcatgctgcaacagaatacaactccatcagcttctatgtggatggagatacggtttcgggattccattacgaactgatagaggcgtttgcgcgcgacaaaggtttacaggtacaggtctctccggtgatgagcttcaatcaacggctggaagggctggccgacggaacgtatgatgtagtggcttatggcataccggctacgagtgaactgaaagactcgctgctcctcacctcccccatcattttaagcaaacaagttctggtgcaacgcaaagtcggagaaaacgattcacttgccatcagaagccaactcgacctggcaggcaaaacattgaatgtcgtcaaaggatctccctccatcctgcgtatccgcaacctgagcaatgaaataggcgatacgatttatgttaacgaaatagagaaatatggttccgagcaactgatcgcaatggttgctcacggagacatcgattatgccgtatgtgacgagggcatcgcccggatggctgtggattcgctaccccagctcgatatcaataccgccatcagcttcacgcaattctattcatggggagtcagcaagcaatctcccgccctactcgacagcctgaatacatggctatccgacttccggaaaaaaggagaataccagtccgtttatcgcaaatattacgggaaacaataaccggctttcttccctcctcccgtttcttttaaagataacagttaccagttgtacaactggtacagtacgagttgagcaactggtcgtgtacgagttgtacaaccgataccatcgtactaaggaacgaacgcgaacgatctctatcaggataactgtaaatcattctttgctttcggcagaattgagtatatttgcggaacgataaataaaaagatatgagcaataagattataaaatggggattcattggttgcggagaggtgaccaaatacaaaagcggacctgcttttcagaaagtagaaggctccaaagtagtggcagtcatgagccgtgacggtaaaaaagccaaagcctatgctaaagagcggaacataccgaagtggtatgacgacgcacaagagttaatagacgatccggaagtaaatgccgtatacatagccactccaccctcttcacacgccacttatgccatcatgtccatgaaagccggaaaaccggtttatatcgaaaagccaatggcacagacttacgaagagtgtgcccgcatcaaccgcatctcacaagagacgggagtcccttgttttgtagcctactaccggcgttacctgccttactttatgaaagtgaaggaactggtggacaaaggtacgatcggcaatgtaatcaacgtacagatccgttttgcacagccccctcgcgatctggactataacagagagaatctgccctggcgtgtacaggccgatattgccggaggaggatacttctatgacctcgcaccacaccagatcgaccttctgcaggagatgttcggctgcatactcgaagccagtggctataaaagcaaccgtggcggactctatccggcagaagatacactgagcgcatgtttccagttcgacaacggattggtagggagcggttcgtggtgcttcgtagcccatgattcggcccgtgaagaccgtatcgaaattatcggcgataaaggcatgatctgcttctccgtatttacctatgacccgattgccctccatactgaaagaggacgtgaagaaatagtggtagaaaaccctgaacacgtacagcagcccttgattcaggccgtagtagaccatcttcttggaaaatccacctgttcgtgtgatggcgaaagtgccacaacgaccaactgggtgatggataaaatattgggaaagatctgataatgaacgatgaacgatcaaccataaacgatagagatcgtcttacctcacactacattccacctgtcaggacactacttattgttgatcgttcatcatttttttatcttttccatgtcacgttttccttccttctccgtcttgcttatgtaaatggaactaaaacaattcaaaatagccgttcttccactccgcgacaaactgcttagttatgcgcggaagttgacagatgaccactcggatgccgaagatgccgtgcaggaagtgatgctgaagttatggaaccttcgtccgaaactggacgaataccatagcattgaggcccttgccatgactatgacccatcatacctgcatggatatcctcagagggaaacatcccgacaacctatcgctcgacagcgtacaggctgccagtccggtcgccacccccgaacgcttgcttgaagagaaagacgaattcagcctgatgcgacatatcatcagtacacttccacctctgcaacagaccatcctccggatgaaagatgtagaagagtacgaaaccgaagaaatcgccgagataacaggatgcagctccgaagccatccgcagcaatttatccagggcacggaaaaaagtaagagacatttacctgcagaccatacaacaaagaaaaaggagaaacgaagcatgaatatagaagaattattgaacaagtattttgaaggggaaaccacctgcgaagaagaacgtgagctccgccgttttttcacccggggcatcataccggaacatctgcagatgtaccgcccgatgtttgctttcctcaacgaagagaaccggcagagcaagactgccgtccccgaagttccgaaaacttctgtccctctgcgccgccgtctactttacatattcagcggaatggctgccggaatattgcttatattgggtattgccggtctcaaccgacatttcaacacctcaaccgctaattatgtaatcattgacgggaaatgctataccgatgccaagctggtacgcgaacaagccatgatcgcgtttcgtgatgtcagtatcagcgaggaggaagtattcgctacgctgttctccgaataaaaaaagaaaataataaaagaaacgaagtatgaataaagtcattcgcaccacatggattatcctgctacttactgtcgcctccggcatggcaagagcacaacagggactacaaatagcttccgtattccagaaatacggtaaacaaaaaggagtgactatggtagagctgtccaacgaaatgctggaaacctaccagatgactctctataaaagccttgtctttaaagacgttgaagaagcactgcccaccattctcaactgtctggatgctgacaaaaaaaaggcaaagaaagtgaaggaagtggtggcaggcggacaaatccagtccggctattatcaattgccccagctaaaagaagatgtcaaccggttcatcctgttcaaaaccggtaaaaaaggctcggctaccctgatttacatcgagggcgagttggatgcagacgatctggtaaccatgttatttatgaaaaaaaactaaacattataagaatatgaaacacatttatttattactgtttatgctgatcccgatgacgggaatggctcaagaaggcatttcgcaagacacgactctttacgtcaacggacgcaaaatcctgattaaagaaaacgaagggaaaataaaggtaaaactttacgaacagtcttcgcacggcgatacgatagagaacgatcagatttttgagggaatctatacggacggacaaactaccgaacgccgcactgcattcaccgtccccttcgtcaaaagaaagaaccattatcggttcgacccgcatattgctggattctatatgggatacacacggctctctgacggcatcaacttcaatactccggacggactgaatataaacgccaacaagtcctgggaaatcggtttcaatctgtttcaaggctccctgacactctcacgtgatcgccaatggggcataacgaccggtttaggctggggataccgctctttccgcttgggcaacaactatgccttcagacaaatagatggagtcaccggcattgttccgggtgttcccgacgaggaagtgtataccaaaagccggttacgctatttctacttccgcattccggtagccctggaatggcaaaaaagattcagccacagcaatgctcacggtcctctattcttttcagccggacttgaagcggaaatccgtcatggagccaagtcgaaagcaaaggtcaacggacataaaaagaatctggacagcggcctgaatgtccacccggtaggcattaacctcctggcacaagcaggttacggtgacatcggagtgtatttgcgctactctacctacagcctcttcgaacacaaaaaaggtcccgaactttatccctactctttcggtctgtgctggtattggtaacaggaagcccgacggatggcaaccatatatccgcccgacggcatcaacagtccgactattcaaaaagaataagctgatttctctgccgtaagaaacaatctatcgttcatattgtttatatttgcaaaaaacgtataacaatattaacgatagattttttatatcacatgaccaaagaagaactaatgaggaaagccatcgaactttccagagaaaatgtagcaaacggaggaggccccttcggagctgtcattgcaaaagatggagaaatagtggccacaggcgtcaatcgcgtaacagcctcatgcgaccccactgcccatgcagaagtaagcgctatccgcgcggctgcctcaaaactgggaacttttaacctgagcggttacgagatttacacctcttgcgaaccctgtcccatgtgcctgggtgccatctattgggcccgattagacaagatgtactatggcaataacaagacagatgccaaaaacatcggattcgacgactcgtttatctacgatgaattggaactgaaaccggagaaccgcaagctgccatccgaagtattactccacgacgaagcaatcaaagcttttgaggagtggatggaaaaagaagataagatagaatactgataaaaatgaactttatacagggctatttctacctcaaaaaatagaaaagccctgtatagagtataattaaaaaaacaaagtaaactgaaatgg

SEQ ID NO: 5041 - DNA, 776 bp, Unknown
  gut microbiota DNA sequence
gtacttcgtgaacttgaaaaacaaagcgattacactttcttctacaatgacaatcaggtaaaactgaacaagaaagtatccatcaacgtatctgatgctccgatcgaaaccgtattgaacgaagttttcaaaaactcgggatatacctacaagattgtagacaatcagatcgtagtgtctacggcagccgcagcagcgaaagaggtacaggctacccagcaacagaaacaaagaaaaatttcgggagttgtgaaagatgcaatgggagaagccatcatcggagcatcggttatagaaaaaggaaatccgactaacggtactatcactaatattgatggtgagtttactcttaacactgccggtaaggaacttcaggtgacttatattggttatatacctcaagcgattgttcttaaaccgggagttaatagttatactgttaccatgaaagaggatactaaaactctggacgaagtggtggtagtaggttatggtactcagaagaaggtaaatttgacaggtgctgtgtcttctgttggtacagaggaattgaaaacccgtgtgaatacagatgttctggcttctgttcaagggcaggttccgggtgtaacagttattgcgcgtcccgacggttctaccagtatcaacttccgtggccgtggtaatttaggaacttcatcacctctttatgtaattgacggagctattgccgatgccaatttcttttcaagtcttgacccgaactctattgaaagcatttcgttcttgaaagatgc

SEQ ID NO: 5042 - DNA, 1344 bp, Unknown
  gut microbiota DNA sequence
ccctttcgggcatatacatccggcaaatcggtgaagtccgcatcgctttatcaaccgccataaagcaaaaccatacaaaattgtctaagagaacccaagtacttgacagactgcactgaagcatcttactttgctcccgataatcggtcgaggtgcttgccaagaccacagttaataacttaattaatttgtttttttacaatgaagagagaaccaagcattacagagcagcaggctcgtgaaatcgtggaaaagatgggacgcagggaagcctatactcccaagtcgatgaatgacatctacaggcgtatcggtctggaaccggatgagccggaacagcccggcaaaactgtcacggaagaaacagagaccgctgtgacggatgaaccgtcaggtatggcggtcgaggaagctactatgccgcagaagcgtgtcagcagcaagcaacgcagactgtcgctgaaagagtaccgcgccacctatctccaagtccccaagattgtcaaccgcaagcccgtgttcgtcagcgagacggtgcgtgacgagctggacaaggttgtccgcttcctcggaggaaagggcatgagcgcatcggggctgatcgagaacctcgtccgtctgcacctcgacacctaccggaatgacatcgagcagtggcgcaagctctgacgggatgacggaaagtcggttgggctggtgaatacacttcatcggcttaaccgatacccaagatgagtgattacactcggaaaacaatccgacaagcggaggattgttatgtcttcaaagacatagcaagatatattttcagttacccgaataattctaagtaactgaaaacaccttcaccgccgtgggcagaattatcctccgcagtcggataatttcggggttcattaatcaaagattaaacaatggacaagccataaaattgaaaaaataagaagtatgaaaaagaagagcaagtacgggagaaatcccaagttgaacccgaagacgcactgcgtgatggtgcgcttcgatgatgtggaatggaacagattcctgacgatgtacgaggaatctaacgtgtacgcgaaagccgtctttctcaaggcgcacttcttcggacagaagttcaaggtgctgaaagtggacaagacgctggtggactactacaccaagctgtcggatttccatgcccagttccgtggcataggcacgaactacaatcaggtcgtcaaggagctgcgcatccacttctcggagaagaaggcgatggcgttgctctacaagctggaggagtgcaccatcgaccttgtgaagctgagccgggagataatggagctttcaagagaaatggag

SEQ ID NO: 5043 - DNA, 2036 bp, Unknown
  gut microbiota DNA sequence
gtaccccaatactgtgctttatcagaaaggaagtggaattgattattatataggacaagccggtggttttggaaaccgggccttgaaacggcatgcttatgttgtatatatgaatggtacagtttcccgattgagaagaaatacggcaaatgccattgaacccgggtgtgaaataattgtgcccagcaaaggagaacggaagaaaatgactacagcaggagcagttggcatgagtagctccattgcttctatagctgcgatggttgcttcaatggtaagcttggcaaaataaaagaattgatctatttaccacaatgttagatagaaaaatatagaagtacttttttatttattaattgtttttatagtggtgtttggatggctattatcagttaggactatccgattgtataaattaaaaaaaaagagctgtccgtgatttttgatttgtataaaattacggacagtattttatggagggaactcaaattttaaatgtaatatatacaattcgttcattattcaagcatatcaacaatttctttcttaatatcatcgtctatctctctatacctagtaaatgccctgctaccttctgtatgtccagacaatgaacctactaaattagggtcttttactcttttataaaggttgccaataaacgtcctacgagccatatgtgaagaggatacttcataaattggtcgtttttcttcttctcctgtagtggggttaagtatggttacatatctatctattccacataaccggagtatatcttttatgccgtcattatacctttgagcactaatgaacgggaataaacgcttttttgtatcaacgcccttatatttttcaattaatttttttgcgcgtcgattaagaggtacacggaccaccgtaggacgttcatctttgattttatgtggtatatattctactgcttcattaatgatgttgtcctgggtcatttttagcaaatcagaaacgcggcatccgattaagcactgaaagatgaaaatatctctttgtattgctaattgtggtcgtgctgagagatcaaagtccgctatgatattacgttcgtctaatgttagatagaaaggggttccgtacttctctgttgtattgccactgtatttttcaaaagggcgattgttggttattccttgtttgttgcaccaattatagaaagctctaaatttgctgaagagtgcgcatatagtattattgcctctgggctgaggctttggtactttgcgtatcgtaccgattactgccgggattttttcgtaaatctcaggatattcattataaagtgtatgttcattacgaagaaagctttctatatcttcaattgtatcggtgtctatcttgttaatgtctagtttaaaatcttttttatggcaagctgaaatgaatagttcatatcgcttcaatgatcgtaagagtacctgaaagtttctttctctaacttctgacaacttcttcttttgcagatagctttccattagatcgaaaaagttattgttgcttttatggtacttctcaggatgtagatgttcatctacaagttgttccagcttctcgctcgttatgtctggggtttcattgtagatagaaaggagtagttttttacgatctgatatcgctgtatttaactgtatgcggtcttctgttttgacgatgcatttagctttatattgctctctcttttcatcccataaggaaggtagtattaagagttcggatttgtggtatagttgaacatttcgtccatctgaaatacgaaacctgatattagcttctctatcttttttgccagttctaataaatgcttttacggttgccattctttattgttttaggttgtgcaaatataaggcttttgcacaacatatatgcaatattgcacaacaaaatcaaacataattaggagtagttatttggtaaatatgcagtaaatcaacgaaatatgtttattcctgtttggctttgttttgaaataattactcccttcgggagtacaaagaaat

SEQ ID NO: 5044 - DNA, 165357 bp, Unknown
  gut microbiota DNA sequence
ccaattaatgtaggagccggactaatttctcccaggattcacataaggcttgcattgaagggaataataaatcggcaccggcattcagtagtatttccccgttcagaggtccggtgttgacagcaatggtgaatattccggctttatgtccggcttctacacctaaaggggcattttcgatgacaatagcttcattaggtttcaatcctcctttttccaatgccatcagatagggttccggattcggctttccgtatttgacatcgaaggcagtcaccatcaattcctgacgaaacattcccggaaagttatgctcgagtctatccagcagtgaggcttgtccggaaccggtaaccacggtcgggatgataccttccgctttgattttttgtagtaattcccatgcacccggcatgcgttcggcttggggatgcttgttgaattcgatgctcttttcgagataaatactctctatttcttcttgagtggcgtcacgtcccaattgacgttgacatacgatgttgatagttccggcccccgtacggccttcgtgcatgtaagcttcttcccgacttaaattcagcccatgggccttcatggtcttgtgccatgcttcggcatgataaggcatggagtcgaaaagtacgccgtccatatcgaaaagcacggatttcagttggatagattcataatgattttgcttgagatattgcgcaattgcttcctgaaacatgatatatacctattgatttggagtgcaaagatacgattattttggtgaatcgaacagaatatgtatttttgcaaaatctattaagtgatatgattgcatgaaaaaactatttttccctttactgtcgttatgcttgctgactaccgcttgcaaagattctgttccaagtcctacgatcgaaatgcagggactgtacgtcaatgacggagagatggattatacccggcaaatggaggccttacctcctctcaaagtagatgatgaactcgaaatttcattgaaactggacggcaatggagaggagttgaatacgtttctggtaaaagaggaaactccgggtagtaaagagactgctgtggagattgattttaatgatttgccggaagagacgctcagtgatgataaagagtttacggataaggataatggcaagttagggtttaaggatggagtttctcagactcaaataggtatcagggcaaaggtgcagcaagtgaccgaagatggagtgaaacttaaattctaccttttctccaaacctgttaattgtgaaggggccaagtatgaattggaaatcaaaacttccgataaacaagacgattgatctgacggatcggtatataatagaaaagagcggtactatcggaagtatcgctcttttctattatatacctgttttattgggctcttacagtcttgcctgaatagcttttgattcttcttcgtatccgggtttgttcagtaaagcaaacatgttctttttgtatgcttctacacccggctggttgaacggatttacgcccagcagatagccgctgataccgcaagctttttcgaagaaatagagtaattgtccgatgctgaattcgctcagttccggaatcacgatacgcatattgggaactcctccgtctacgtgagccaattgggttcccaattcggccattttgtttacttcgtctacgcgcttgccggccaggaagtttaagccatccaggttagcttcatccgaaggtacttctaacttatggttcactttgtctacagagatcactgtttcgaagattgtgcgttcaccttcctgaatccactgacccatcgagtgcaggtctgtagagaaatcgactgctgccgggaagatacctttattatcttttccttcagattctccataaagttgtttccaccattcgcttacgtagtgaagcttcgggcagaaattaacaagaatctctatcttcttgccgttcttgtataactcgttacgagtagcggcataaatcgctgcagggttttctgcgaaaggaacatcagctccacaagctttctccatgtcggcagcaccgtttaccagttgctcgatatcgaatccggctactgcaatgggcaataaacctaccggagtcaacacggaaaaacgtcctcctacattgtcagggataatgaaagatttgtatccttctttatctgcagtaacgcgtgccgcacctttcttggcatctgtaacggctacgattactttctttgccatctctttgccgcgttgatcttcacactgtttcttcagcaggcggaatgccagagcggtctctgtagttgtaccggatttagagatattgattacaccgaattttttatctttcagaaactcagtcagttcgtacagataatcttcaccaatattgtggccggcataaatcatgaccggtgctgttttcttttcctgtaaccaagtgaagctgtttgacaatgcctcgatcaccgcacgggcacccaggtaacttcctccgataccggctacgatcactacctcacaattgtctctcaatacttgtgcggtagctttcaggtcggccaggtgctctttactgatagaagagggcagatgcaaccaccccagaaagtcgttacctttaccagtgccgttttccagcgcttcctgtgcggcttttacctgagcttcgtaggcagaaaccgattccttggaaatgaatccaaaagttttttcaatgttcaaactaatcatatctttctttatttaggagttaaagagttatttgtctgcttccttgtttatctaaacgagtcagtcagcaattttatttcaatcatcggagatatgcgctcatataagatgttgtatacagcatccagtatcggcatatttacgtgatgatgtttattgatttccttaatacactttgttccataatatccttccgctatcatctccatttcaatttgggcactttttacagagtatcctttaccgatcatggtaccaaacgtacggttacggctgaagttagagtagccggtcaccaacaaatcacccagataaacagattcatctacgtttctgtttatcggatgtaccgtatttaagaagcgattcatctcttggatagcgtttgatatcagtacggcctggaagttgtctccatatttcaaaccgctacagatgcctgctgctatggcatatacatttttcagtacggaactgtattcaattcctatcacgtcatcgctaacagaagtcttgatgaaactgctgcccagtcggcgggcaaaaacgcgtgctttatccttgtccggacaagcgatggtgagataagagagacgttccagagccacttcttcggcatgacatggaccggccagtacggcaatattttcgggaggaacgccatattccttgttaaagtattccgagacaatcagattgtcatcggggacaatacctttgatagcggtaataatgaacttgtctctgatccgtgttttcagctttttcaggtgagctttcagatatggagaaggggtgacgaagattagcgtatcagactctttcaccacatcgttgatgttggagctgaaattgatgcgcttcatgtcgaactttacgcctgtcagataggctggattatgcccgagccgtttgaaatcggcgatgcggtcgtcgcgccgcatataccaattgatagactcttcctgagccagacacatctttgcgatggctgtagcccagcttcctccgcccattatcgctatcttaccgggtaatttcatttctataaattaagaattaaaaatgaagaatgaagaatggtgcagggaagaccggaggtcaaatgctccggctcctcatcgccattcttcattcttaatttatttaattttctgtatccactcggctacatcgttaactgacggattggtcagttccaatttgtatttcttgttgataccacaaatatcctggtggaatttctgcggattaacctctttcatgtcggccacctgattgtatcctgctttctggatgacaggtacccactcttcggcaatgcccagttccataaatttggaagcactgtctttcggtacgactttctccggacgcatctgcgggaagaacaatacttcctgaatggtcgactgaccggtcatcagcatagtcagacggtccataccgatacccatacccgaagtaggaggcataccatattccaatgcacggacgaagtccttatcgatgatcatcgcttcatcatctcccttttcgctcagcttcatctggtcttcgaaacgttccaactggtcgatcggatcgttcaactcagaatatgcgttacacaactctttaccgtttaccatcaactcgaaacgttctgtcagttcagggttgtcacgatgcttcttggtcagaggagacatctcgatcgggtaatccgtgatgaatgtaggctgtatataagtgccttcgcagaactcaccgaagatctcatcgatcagtttacctttacccatcgtatcatcgatttccatgttcagtttcttgcaaacttcgcgaatctgctcttcattcattcctgtcagatcgtaaccggtgtgctctttgatggctcccagcatagtgacacgcttatagggcgctttgaaattgatgatgttgtcgcctacttttacttcggtagtaccgtttacgtccagacagatcttttcgatcattttttcagtaaattccatcatccagttgtagtctttgtaggctacatatatctccatacaggtgaattctggattgtgtgtacggtccataccttcgttacggaagtttttaccgatctcgtatacaccttcaaaaccgccgacaataaggcgtttcaggtaaagctcactggcgattcgcatgtataaaggaatatccaaagcattgtggtgagtcatgaacggacgcgcggctgcccctccggcaatggcctgcaggatcggagtttccacttccatgtatccctttgagttgaagtattcgcgcatggaactgtatactttgctgcgtttgatgaaaatatctttaacgccttcgttgacagccaggtcgacatagcgctggcggtaacgcaattcaggatcttcaaaagagtcgtaagttacgccgtctttgtatttaacaataggcagtggtttgatcgatttggcgagcaccgtcagcttttgtgcatggatactgatttcgcccatctgtgtgcggaatacgaagccttcgattccgatgaagtcgcctaagtcgagcaggcgtttgaacacagtgttgtacatttccttgtcttctcccgggcagatgtcatcacgggtgatatatacctggatgcggcctttagagtcctgcaattcaatgaaagaggctttacccattatgcggcggctcatcatgcgaccggctacggatacctggcggggtgtctcgtcatctttgaattcggctttaatatcagttgagaaagcattggttacatactctgctacgggatagggttcgatgcccatcgcgcgaagttcattcagactgttacgtcggatgatttcctgttcacttagttctaatatgttcatttcgttagatattaactcaattttggaggcaaaaatacgaaacttttcttagaaatacggcattgtaactcttattctttattcttcacctttaattctaaatagatttgtatctttgcaccctcaaaataataggtatgacaggacaaaagacgcccactgcgctgggcaccgaaaagattggaaaactcttgatgcagtatgccattccggctattatcgctatgaccgcatcttcactttacaacatggtagacagcatttttattggtcacggggttggtccgatggctatttcggggcttgctctgacatttccgctgatgaatcttgcggcggctttcggttcgctggtcggagtgggggctgccacgctggtttcggtaaagctgggacaaaaagattacgatacggcgcaacgtgtgctgggaaatgtattggtgctgaatatcatcatcgggcttgcttttacgatacttacccttatttttctcgatcctatcctttattttttcggaggtagcgacgagactgtggggtatgcccgcgattatatgaaggtgatcctttatggtaatgtcattacccatctttacctgggactgaatgccgtgcttcgttcggccggtcatccgcaaaaggcaatgtatgccactattgctacagtggttatcaatacgattctcgatcctctgtttatttacggcttcggctggggcattcaaggagcagccatagccactatcctggcacaggtcatttctctgatgtggcagttcaggctattcagcaataaggaagagttgctccattttcatcggggcattttccggttgaaacggaaaatcgtattcgactcgctcgccatcggtatggctcctttcctgatgaaccttgcgtcgtgttttatcgtaatcctgattaaccaggggttgaaaaaatatggcggagatcttgctatcggtgcgtttggtattgtcaatcgtcttgttttcttgtttgtgatgattgtgatggggctgaaccaagggatgcagcccatagccggatataatttcggcgcccggctctatccccgggtgacccgtgtgttgaagcttaccatttacggagccaccattgtaacaactacgggtttcctgatgggaatgttgattcccggtttggccgtatctatctttacttcccacgaagaattgatccgtcagtcggccgaaggacttcggattgtggtgctgtttttcccgatagtcgggttccagatggtgacgtcaaacttctttcaaagcatcgggatggcgagtaaagctatctttctgtctatcacccgtcaggtgctgatactgattccctgcctgttgatcctgccccggtatttcggtcagacaggcgtatgggtaagtatgcctgtttccgacttgatagccagtctgatctcggcggggatgttgtggtggcagttccgcttgttccgtatccatgacagacaggctgcctgacttcggtggcaactgccggagaacgttgcggcgtataccatgcggaccgtcttccttcatgcacaccttattctattctttcggttgaagcaaaaataaggattgactactttcatgccggtgggctaaacaaattgcagccggcatttgtcttttatctgtaatgatcagaaaccaatgtagtagtcatgaaaaagcgaatctgttttgtccttatcctgtgtatcagtctgtttgttttctcacctgtacatgcccagcagcgtaagagtgttgctgtggtcttgagtggtggaggtgccaagggagtggcccacatcggcgctctgaaagtgattgaagaagcaggtatccctatcgattatattgtcggaaccagtatggggtccatcatcggcgggctttattccatcggttatactccccatcagctcgatagcatggtcaatcatcagaattggcctctcttgctcagcgaccgtatcagttgggaagaccagaccatgaccgaacgtcagaactcggaaacctacgtcctctctgttcctttaaagaagaatctgaaggccaatgtgttcggaggcgttatcaaaggccagaatctggccaatcttttttcggaactgacagtcggttatcacgactccatcaacttcaataaactgcctatcccgtttgcctgtgtttcggagaatatagtaaacggagatgaagtcgtatttcataacggagtgttggctaccgccatgcgcgccagtatggctattcccggcgtattcactccggtgcgcctgggtgataagattcttgtggacggtggcatgaaaaataatttcccgaccaacatagcccgtgccatgggagctgatgtcattatcggtgtcgatgtgcagaatgatctccggactgccgatgaattgaacaacctcagtgaaatcttcaatcagattatcaatctgaccgggcagacccgatacgaagagaatatcaaactggccactgtctatatcaaggtggatgtgaaagggtattctgctgcaagtttcaatattcccgcgctcgatactttggtgaaccggggcgaagaggctgcccgtgaacagtggaccgctttgcaaaagctgaagaaggaaataggactgcctgagaactatgttgccccgcgtcatggtccgttcagttcattgtggtcttcgaaagacatttttgttaaggagatcacttttgacggcatcgaggatagtgacaagaaatggatcatgcatcgctgtcacctgaaggaaaacagcaagatgcgtatggaacagctttatgaagctctgaccaccttgcgcggcagtcaggcttactccaatgtcagctataaactgaccgacacccctcagggatatcagttgcacttcatcctggaagagaagtatgaacgtaatcttaatctgggtatccgttttgattcggaagagattgcctcgcttctgttgaacgtcaggagccggctcgatacgcgtgttccttcgtgggtttcggtgacgggaaggttgggaaaacgttatctcgcccgggtcgaatatacattggcaccgatgcagatgcgcaatttcaattttgcttatcagtttgagtacaacgatatcaatatctacgatcacggaaggcgttcctataacactacttataagtatcattcgggtgagtttggattctcggatgtatggtttcgcaacctgcgctttggcgccgggctgaattttgagttctttaagtataaagactttctttacaacaccggcgggcagcgtctggaggtgaagccccaacacttcttcagctattttgcacagttgcattacaatacgtacaacaagggatatttcccttccaaggggaccgatgtgcagggacgctactcgctctataccgataatctgacacattataaaggccatgctcccttctctgcccttgcggcatcatgggccggtgtcttttcactgaccgatcgttttgccctgattccctctttgtatgggcgggtgcttatcggtaaaaatataccttatccgtatctgaatgccatgggaggcgagaatttcgggcactatctgcctcaacaacttccttttgccggcatcacgaatctggagattgtggacaactctgttctggtgacaagcctgaagttgcggcagcgtatcggtagcaagaactatgtcacctttaccggaaacgtggctttccggaatgataacttttttgatatctggggagcaaaaccggtttggggcggtagtgtgggatatggttacgatagtctgttcggtccgctcgaggcttctttgggatactccagcagatctcataaggtgggattttatgtaaatctgggatatgtcttttgataaaccggttcgggaacgagacagagagcttgtcccggaccggtctcctttgccgcagaccaccggatgacgcaggcctgaagttcaagtcggttcgtcagtttactcatgaatccggagggctgctgtcatctgtctgtaatgggatgtatcagattcctcttttgatcgggcagagatgccggacaagctccatgtttttatgcagtatccgtttcattcgtcatcgtcaggaatgaactccggttcctcttcccgagtctcttcttccctgattgtttcgggtcgtaacaagtcctttgggaaatatttggatagtgggtagcgaaagaatttcatccggctgacacgttgggtaaacttgcggtcggcaatgaaatatactttggatacccgtacctcgtgaggcaatacatcttccggatgctcgaagccattgcttgtaatggaggcatgaaacgatcccaaccctctgatggatacggattctccatttttcaatatctcttctatcacgtccggcagatcggtgaggatgctcaatacttcccctttgcttcgtgaactgtttgccgaaaggatttcggcaaggtcttcttcgttcttgccacctcttttctgaagtttccgctggatggcaaaatagagttctctgatcccttcggctgttctgaactttttctttctgactaaataaatgagtcccatagtgctttgtatgaaaggttaatatgattcgatgtaccggttacacaacttgtacgttaccagttgtacaactcgtcgtataccagttgtacaactcgtcatgtaccagttgtgcaactcgtattcggttccttacaaaggtaactaaaaagagatagaaaggaaagagattgaggactaaatggagcgaatgattggtataacgagagaaatatggaaagaggagtatggcaaagcctctgttgaggtcttcacccgctctgtcgctgtgtcaagctccgaaattacattttcatttctctccggattctgctcagcgactgtggtgtaatccacaaataagaggctatatgctttaaaggcacattttgtaatagttcgggatgttctttgataagggtcagataacgttctttagctttggggcttccggcgctgatcagccagttttcgaggctgagcagttgccgttccatcagttgccgtcccaggttggcgagtccgagcgatgaagcataaagattgttcagggttgatcccggaatacagtaggctatgctatcgcacatgacttcaatcgtgatgtgcgatgcagtattttccacatatccccataccgaaaaggcagcttcgcctgcaccggcaaaccaaatggtagtgtccactccatctttcagataatgggcacgccagatgccctgctttatcagatacagatttccgtttttggagccttcatggacgatgacttctttctttttgaaacggatctcctccatatagctgagcagggtttgcgtgtcgttttctgaaagatgatagctgtttctgaacttttcaataaatgtttccataagactctttgcatctgtttgaatgatgcaaagatacgtatcatcggcgaacggcgaaagagtccttcaggtaaattccgataataagcaataaggtcagcagttcggccaaaggaacggccagccaaatgccccttactcccagcaccggaggcaagagcaggaaacctgccagcatgaacaaggttccccggaaaagagtgatgacagtggcgcgccgggcacgttcgatactttgataatagccgatgcccactatgttgagcgcaaaaaacagatagccgactgcaaagtaaggaatgccgtttaccgcaatatcataggcttgatagcttttatcgataaacagcccgactatctggtgattgaataccagagtggcggcaaagaaaaaaatgccgcagcctaaagctgttttcaatgccaaccggatggtacgtgcgacccgtaccgggttctgttgtccgaaattatagctgatgatgggttgtgccgattgggcgatggcattgtataccataaaaatgataggaaagaagtaacatacaatgctgaatgcggctacaccgctttctcccaaatggctgataaacacataattccccaggaacatcatgctggcaatggatgcctcgctgataaaggcggaagatcccagcctgatcatgtagccgatgttacggcaggtaagccgcatgcttttccagctcagcttgatacggtaaatacctacgttacgggaaaaacggaggagataaatgagtgtcatcaatccgccgaccatagtgcccaggctggtggcaaaagcagctcccatcattccccagcccaattggaaaataaagacataatcgagtatgatattgataatggccgatacggcgttgcacatcatggcatagttgggcgatccgtccaggcggatgtaaaacatgccggcgcttaggagcaggtagaatacgaggaaaggtacgtaccaattcatatactccaccaccagaggcaacaaccgttccgagctgccgagtaatcggccgataggctctgcgaaatagcagcagagtgccgatagcactagaataagtaaggccgaaaaggcaagtgcctgtgtgatgttgatactcgcaacttttcgtttaccttgtgacaggtgaatggaagctacaacagatgcgcccactccaaacatcagtccgatgccggtggttatcataaatagcggagccgtgatgttgaccgctgccagggcatcactgcctatacctttaccgacaaatataccgtcggtgattacaaacacggcggaaaagaccattccaagtactgttggaatcaataatttcctgaatagtctcggaatttccatatttccgaagtcaatgctgtccttcataaaaacaatgtttattttttttgcggctgcaaagatacgactctgaaaatggataaaagttaccaattgataagaaatgcggcactctgtatattggtacattatttattttcttctttcggaaataatgtgtatgtttgctattgaaccaatatacaaaagtactatgaatggtaattatgtcatcaatatcggccgtcagttgggcagtggcggaaaagagatcggagaaaaattggcagccaggttaggcatcgatttctatgataaagagctgattaatctggcttcggaggaaagcggactctgtcgggagtttttcgagaaagccgacgagaaagcctctcagggtattatcggcgggttgtttgggatgcgttttccttttattagtgatggtgccatgccttgcaccaattgcctgagcaatgatgctctttttaaaatccagagtgatgtcatccggcatcttgcggcaaataaatcctgtgtgtttgtggggcggtgtgccgattacatcttgcgtgaacatccccgttgtgccaatattttcatttctgcttcgcaagaggatcgtatagcccgtctgtgccgcatccacggaatttctgaagaagcagccgcagaaaaaatgaataaggcggataagaagcgttcagaatattataattactatagctataaaacctggggagcagctgcgacctatcatctttgcatcgattcttcggtattgggaattgatgaaacggtaaggtttatagaagaatttgtggtgaagaaactggctttgtaatagaagctgttaccatatagaaatggccaattactatgtaaataaaaacatggtaactggccattgctgtatcagggtgtatcgttatcacatcattagcaacaatatcatttgtcccgcaaggatacggagaaacatcgatagcggatatacggtagaataacctactgccggtgcgtcgctaccggttgcctgattggaataggccaatgcgggagggtcggtattgctacccgcaatcaatcccatcagcatgaagtaattgattttataatacgaacgtgctatgaccccgattatcagcaaaggaataatcgtgatcaggaaaccgcaacctacataaagcagaccatctccatggattaccgtatccacgaaatttgctccggcttcgatacctacactggcaaggaagagaacgataccgatttcacgtatcatcaggttggcgctttgagttgtataagttaccagatgtagtttgtgtccgaaacgtcctatcagaatggctaccaccagcggtccgccggcaaggccgagcttgacaggagtcggcatacccggaaatgcaatgggaagactaccgcacaggatacccaggaagatgcccacaaacaatgtgataatgttcggttcgttgaggcgtttcaaagagttaccaagcacgctggctacccgttctacagcgtcttcggagcctactaccatgacacggtcacccacttgcagtatcaggttggggttagcaaacaggtcgacacccgaacggttgacacgggtaatgttgacattatacatgctgcggaagttcagcataccgagcttctttccgtttatttccggtttggttaccaagatacgacgtgataccatcggcatatcctgtttctcccagtctacttgcacttcgcgtccgataaaggctacaatggcatctgaatcttcttctgaacataccacaaataactggtcattctgttccaggatagtgccgtggttcggaatgctgacgtgcccgtttttacggatgcgcgaacaaacaaacggacgtccgaggaagctgctgattgtgcccagggtttttccgtagatggcttcgttgtgtacttccagactcataaggtgtggcttgtggtgagtgccgtcagtctcttgattccagttctcttcttctttggcgaagttgatgcggaagatgtaacgcactgcgatgatagagcctatgatacctactactcccaacggataagcacaggcataacctaatgcaatctgcgggccggagtaactcaattgattcagtgcttcttgtgcggcaccgagtcccggggtgtttgtgactgcgccgtacaggatacctaccatcatggggagctcgattctgcctcccagaatgaaatagagcgccattgctacggcaatgttcaataccacaattcctacggccagcatgtttagggtcattccgcctttcttaaatgaagagaagaaagaaggccccacctgaagaccgatacagaatacgaacaatatcaatccgaattcgcggatgaaatgtaggatatgggtatcgcctgtgaagccaaaatgtcccattaggatgccggcaaacaaaacaaaggtaacccctaaagagactccgaagatcttgatctttcccaaatagacacctgccgccactacgaaagcgtagaggaagacgatgtgggctacggagttggggttccataataaatcttgtaaccaatccataatatagtagtttataattttatgtaaacgggtgcaaaattagctataacctcggaggtaatcaaatatttgcctgccttttatttggggaagtcacaggggtagcaggtagtgcgaattttccctaaaaaaagcgtgaggtttagagtatttcagtatatttgcaagtcgcaatcttacattttgattaaagaattagagacataaattgagataacaatcttattttaatttaaaataaataaactatggcagacagtaaagaaaaactcttctcagatttttctcctgtttccaccgagaagtggatggagaaggtcacagctgacctgaaaggagctgattttgagaagaaactcgtttggaagacaaacgaaggattcaaggtaaaacctttctaccggatggaagacctggaaggacttaaaacaaccgatgcgcttcccggagaattcccttatttaagaggcacgaagaagaatagtaatgagtggttggttcgtcaggagattaaggtggaatctccgaaagaagccaatgcgaaagctctggatattctgaacaaaggcatcgattctctttctttccatgtaaaagcaaaagaactcaatgcggaatacattgagacattgttgaacgacatttgtgcagaatgtgttgaactgaatttttctacctgtcagggacatgtagtggagcttgccgatttgttggtagcttatttccagaaaaaggattatgatttgacgaagttgcaaggctctatcaattatgacttcttcaataagatgctggccaaaggcaaagaaaagggaaacatggtgcaaacagccaaagccctgatcgaggctactgcacaattacccaaatatcgtgtgctgaatgtgaatgcactgaccctgaataatgcgggtgcttatatttctcaggaactgggatatgcattggcatggggcaatgaatatatgaatcagttgactgaagccgagattcccgctgccatcgcggctaagaaaattaagtttaattttggtatcagttctaattatttccttgaaattgcaaaattccgtgctgcccgtatgttgtgggcgaacattgtggcttcttacaatcccgaatgtctgcgtgattgcgaaaacaagggacctaacggtgagtgccgttgtgctgccaagatgaaggtacatgctgaaacatctactttcaatctgacattgtttgatgctcacgtgaatctgcttcgtacacaaacagaagcaatgtctgctgcattgggaggcgtagattcaatgacggtagttcctttcgataaaacctatgaaactcccgatgaattctccgaacgtctggcccgcaaccagcagttgctgttgaaagaagaatcacacttcgataaagtgattgacccggcagccggttcttactatattgaaaaccttacggtatctatcgctaagcaggcatgggaaatcttccttgccgttgaagaagaaggaggcttctatgctgctttgaaagccggtactgttcaggcggctgtaaacgaaagtaacaaagcgcgccataaagcggtggctcagcgtcgtgaagtcctgttgggtactaaccagttccctaatttcaatgaaaaagccggtgataagaaaccggtagaagcgacctgttgttgtggcgggcacgatacttgcgaaaaagatgttgctacattgaacttcgatcgtgctgcaagtcaatttgaggcattacgcctggaaacggaagccagcggcaaacgtccgaaggcctttatgctgacaatcggtaatctggctatgcgtcaggcacgtgcacaatactcctgtaacttcctggcttgtgccggatatgaggtgattgataatcttggttttgaaacggttgaagcaggcgtggaagcagcgatggctgccaaagctgatattgtggtgctttgctcaagcgatgacgaatatgcagagtacgctattccggccttccgggccttgaacggtcgtgccatgttcatcattgccggaaatccggaatgtgccgaagagctgaaagctgccggtatcgagaacttcatccatgtacgtgtcaatgtactggaaacacttaaagagttcaacgctaaattattgaagtaagatgagaaaagattttaaaaacttagatatctacgcagcattccagcccgctaacggtgcggaatggcaaaaggctaacggaatcgaagccaactggaagactccggaacacatctgcgtaaagcctgtttataccaaagaagaccttgaaggaatggaacacctggactatgctgccggtcttcctccctatttgcgtggtccgtattcagtgatgtatactcttcgtccctggactatccgccagtatgccggattctctacagctgaagagtcaaatgctttctatcgccgtaacttggcttccggacagaaaggtctgtcggttgcgttcgacttggctacacaccgcggctatgaccccgaccacgaacgtgtggtaggtgatgtgggtaaggccggtgtatccatctgttcactcgagaatatgaaagtcttgtttgatggtatccctttgaacaagatgtccgtatctatgactatgaacggtgctgtactcccgatcatggcattctatatcaatgccggactggaacaaggagctaaactcgaggagatggccggtacgatccagaatgatattttgaaagaatttatggtgcgtaatacttatatttatccacctgcattctcaatgaaaatcatctctgatatttttgaatatacctcacaaaagatgccgaagttcaactctatctctatctccggttatcatatgcaggaggctggtgcgacagccgatatcgaattggcttacacattggctgacggtttggaatatctccgtgcaggtgttgccgcaggtatcgatattgatgcttttgctccgcgtctctctttcttctgggccattggaacgaatcactttatggaaattgccaaaatgcgtgcagcacgtatgttatgggcgaagattgtgaagcaattcaatccgaagaacccgaaatctctagcactgcgtacgcactctcagacttccggttggtcattgacagaacaagatccgttcaacaatgtgggacgtacttgtatcgaagccatggctgctgcactgggacatacccagtcgttgcataccaatgctctcgatgaagctattgctttgccgacagacttttctgcacgtattgcccgtaatactcagatctatattcaggaagagacttatatctgcaagaacgtagacccgtggggtggatcttattatgtggaatctctgaccaatgaattggctcacagtgcttgggaacatattcaggaaatcgagaagttgggaggtatggcaaaggctatcgagaccggtattccgaaaatgcgtatcgaagaagcggctgcccgtgcacaagcacgtatcgacagcggatcgcagaccattgtcggtgtaaataagtatcgtcttgaaaaagaagatccgattgatattcttgaagtagacaatactgctgttcgtaaagagcagatcgagaacctgaaacgtttgaaagaaggtcgtaatcaggccgaagtggacaaggcactggccgctatcactgaatgtgtgaaaaccggtaagggcaatttgctcgagttggcggtagaagctgcccgtgttcgtgctacattgggtgaaatctcgtatgcttgcgaacaaatagtaggacgttataaagcaataatcagaactatatcaggcgtgtattcatcagaaagcaaaggcgacgctgactttaagcgcgcttgcgaactcactgagaagtttgcaaagaaagagggacgtcaaccccgtattatggttgcaaagatgggccaggacggtcacgatcgtggtgccaaagtagtagctaccggatatgccgattgtggcttcgacgtggatatgggaccgttgttccagactcctgccgaagcagctcgtgaggcggtagagaatgatgttcatgtagtgggagtttcttcgttagctgccggacacaagaccttggttccgcagattattgaagaactgaaaaaactgggacgtgaagatatcgtagtaattgccggtggtgtaatacctgctcaggattacgatttcttgtataaagctggtgtggctgctatttttggtccgggtactccggtggccaaggctgcttgtcagattctggaaatcctgatggatgaggattaaagaccatctttaaagaatgacaataaagaggcgaagtatgaaaaatacttcgcctcttttgggttctatccgttggcttattatcggatgtttgtcctttgcgctttattgaatagcttgtctggtaaaagagaatgcgagtgcattaacttctgtctttaggttttgaggcaggtagacacgtactcggttattctttatttcccattttacttttttcccgttctgtaaacaatagatggcacttctttttgcagggatattgttttcccattctatatagtcgggaaacttttcagcttccggattactatataatgcatacatcgtttttccatctttattcatggtaaaccagataccttcactataatattggggtgttgtaacagtgttgtagatagccgtaccattcttcttcatccatcctcctatggtttgcagacggctgacaatctcatcctgtaatatcccttcgggggtaggacctacaccaagtaataaacttcctccttttgctacgatttccattagttttgctattactgtaactggtgatttgaatactgcatgcggagtatatccccagtctactcccagtgtcatacaagtttcccacgggtaggggagttgtttgtccggaatttgctgttccggggtctgatagttttcatatttgccatggatggtacggtctacgaataaaatacccggttgtgcctgtcgtgccatttgtgaaatacggtccatgtctaaaactgacttcgttccgggattgtttacccatccgccgtctaaccataaaatgtcgatcggaccgtagttatgcattaactctccgatttgattgtaagtgaactctttgaactgattccaacgccagggattcttgtcaatgttgtaattttgtgtacgtcggggagtggcgtagcgcggccaccaataatattccgaatgccagtccggtttagaaaaataggctcctaccattaaatcattgttgcggaaagcctcaaacacgtatttggcaacgtctgcccggggatctgtttggaagggacctttggctattgaaaaatcggagaaagccgtattgaacatattgaatccgtcgtggtgcttagttgtaaatattgcatagcgcatacctgctgacttcgccgcttgtgcccattgctccggattgaaacgggtaggattgaatgaatctttcagcccccaataccattttttgtagtcttcataggccatagtgctgtcgcgtggaatccaatctgcctcttccgaacagatagaccatgattctacgattcctgcaacggaatataaaccccagtgaatcagcattccaaatttctggtcctgccagtgatgtagtttttgtattaccagactatcttcaggaggcgtatattggtcggaacgttcgtgaacgtattgtgctttcatattgaaagcaaatgcaaggaataaggtaaatgccaataataatttgtagcttttcatgttttttcggattttaaagattatacgaagcaaagctacaaaataaatggagacggattactacttctcccttcctatttttttgtacctttgtctgctcaattctcattataataagaaaaacaaatgatagtttgcatagccgaaaagccctctgtggcacgtgatattgctgatattttaggagcccgcgaaaggaaagaagggtatattgaaggaaacggataccaggttacctggacattcggtcatctttgtaccctgaaagaacctcacgaatatactcccggctggaagtcatggagcctgggcagcctgcctatgattcctccacgttttggcatcaaactgatagagaatcctacttacgagaaacaattccatattattgagggattgatgcaaaaggctgatgagataataaactgcggtgatgccggtcaagagggggaactgattcagcggtgggtgatgcagaaagccggagcgcggtgtccggtaaaacgtttgtggatctcttcactgacagaagaagctattaaagaaggatttgcaaaactaaaagatcagaaggattttcaaccactttatgaggcggggatgtcccgggctattggtgactggttgctggggatgaatgccacgaggctctatactgtaaaatatgggcagaatcggcaagtgctttcgatcggacgagtacagacccctacactcgcactgatcgtcaacaggcaactggatattgaaaattttcagcctaaacaatattgggaactgaaaaccatgtatcgtgatacaactttctcggcccttattcgtaaaagtgatgaagagctggcggctgaagaagaaaagtccggtggtaaggctaagaaaacagagaaccggggcattgatccgatagctaatcgtgaagaggggatggcattggtggaacgcattaaagatctgccttttgtcgtgacttctgtggctaaaaaagatggaaaggagtatgctccccgtctgttcgacttgacttctcttcaagtggaatgcaataagaagtttgcctattctgccgatgaaactctgaaacttatccaatctctttatgaaaagaaagtgaccacctatccacgtgtagatactactttcctgagtgacgatatttatcctaagtgtccgaatatcctgaaaggactgaaagattatgaagtacttactacgccgttggcaggagcttcattgcctaagtcgaaaaaggtttttgatagttcgaaagtaaccgatcaccatgccattattcctacaggagttcatccgcaaaacctgacggatatggagcgtagggtatttgatttgatagctcgccggtttatagcggttttttatcctgattgcaaagtttctactacaacagtgatgggagaggttgatagtatcgagttcaaggtaaccggtaagcagattctggaaccgggatggcgggtagtatttgccaaagacgtaaaagatccgaatgaagaaaaagaaggtgaagatgaaaacgtgcttcctgctttcgtgaaaggggaaagtggtccgcatataccggatttgaatgaaaaatggactcagccgcctaaaccctatacggaagctaccctgcttcgtgcgatggaaacagccggcaagctggtggataacgatgaacttcgggatgcattgaaagaaaatggtatcggccgtccttctactcgtgcagctattatcgaaactctctttaaacgtaactatatccgtaaggaaaagaagaatctgatagctacccctaccggagtggaattgattcagttgattcatgaagagttgctgaagtcggctgaactgacgggtatctgggaaaagaaattgcgtgagatagaaaagaaaacttacgatgctcgtcaattcctggaagaattgaagcaaatggtgtctgagatagtaaatagtgtgctatctgataatacgaaccgtcgtatcaccattcaggaggctacagcggtagaagaagaaaagaaaaagaaagaaccgaaaaaacgggaacggaaatctgctactccgaaggaaaagaaaggtaaatcggagcctgcaacagtcgatgtgtcttctaccggtcaatctgttcgggcggatgccttaaaagaaacagattctttggtagggaaactttgtccggtttgtggaaagggagtgataatcaagggtaaaactgcttatggctgttccgaatggaaaaatggatgcacttatcggaaagcgttcgaatagggcttctgttttgttaatacataattttaactgaactattttataaaaagctcgttattaataccacttatcaattaataacgagccttatgaatacaatgtttttcaacgcggtatcttgtttttttgtatgcgccggtcttatcatagcccttattctggcaattaatgtaatatttcacaggcaatccatgaaaataatgaatatagtgtgggtacttaccggattatggggccattatttcgctttgtttgcttattatacttttggtgtccgaaaagataatatggtggcaacagtacctatggagaatatgaaaatggatatgaagatatcgatggagatggatatgtctgaagtacgtccacaatggcagtctatcactttgtcggcacttcattgtggagccggttgcactttggcggatattatcggagaatggtttacatactgggtacctttgcagataggaggaagtttaatagcaggtagctgggcactcgattttgtattggcattgattctcggtgttttctttcaatttattgcaattcgcgaaatggaagctatctcttttcgtgaagctgtttctcgtgcctttaaggccgattttttttcattattagcttggcaggtagggatgtatagctggatggctgttgctatttttatactttttaaagatgaatctctggaaaaaacatcctggacattctggtttatgatgcagattgccatgcttttgggattcatggtgtcctatccggtgaatgcatggttgattaaatcgggtatcaaaaaaggaatgtaatttccgactactggaaaaacatcaaaaagatgattgattattggtgaaatatctatgcatttgcagatacacatctccttaaatatgttattatgaaccgacatcttctttttgatcggttttcacagcaggcattgcagactttgcatagctatcgtgccgttatgttcagccctacgatgtttttgtgattgtaaggtgaaacatattatcttgactggtggaacggatacggcccgtagcatagcaaaagctattccggctactccgctttcggcagagaccggagggaagaatgtcattattctgactgcctcgggggatcgtgatcatactattatgaatattgtcatatcagtttttggtaatgcgggacagaagtgttctgcctgttcgttgttggttgagcgttcggtatatgaagataagaacttccaaaagaaactgattgatgtggcttccagcatgaaagcggggagtgtttggaatccgggtaatgtagtggggtcaatgataacgaataaaaaatgaaaaattactgcgggcattgacattggaaccgggagaatcatggttagtaccgtgcttgttcccttgagataccgatgaaaatatataaggcggctgcacaggctgacaaacatattgcagcggcgcttccggtgaaaaacggaagggtagagctgataattatattaaggagcaaagtattgcctttgaatatcatagatacggaagtatttcggaagtacccgcctttgaataaaactaatactctatggttttgttatctaaatgcagataacaaaaccattttaatataaagagtatgagaagaaaaataatgatggcaacattgattgtcatagctgtaaattttatctggagtggacaaccggtaaaagcatgtacgcgtgcagtatatattggtccggacaatatggtaatcaccgggcgtacaatggattggaaagaggatattcagtctaacctgtatcttttccctcgcggtatcaaacgggccggatataataaaggaaatacggtagagtggatttcgaagtacggtagcattgtagcaaccggatatgatatcggtacttgtgacggcatgaacgaaaaaggactggttgccagcttgttattcttgccggaatctatttatgtccgtcctaatgatactcgtcctgttatgggtatcagcatttggacacagtatgtgctggataattttgctacggtaagtgaggctgtagaagagttgaagaaacagactttccgtattgatgctccggatatgcctaatggttcggcatctacattgcacatggctatcactgatgaaacgggtaattccgctgttttggaatatatcgatggaaatctgattattcatgaaggtaaggagtatcaggtgatgactaattcaccccgttatgatctacagttggctgtgaatgattattggaaggaagtaggtggtttaaatatgctgccgggcactaatcgttcaagtgatcgttttgtacgcgcttctttctatattcatgctattccgcagacctcagatgcaaaaattgccgtaccgagtgtgttgagcgtcatgcgtaatgtttctgttccttttggaattacgactccggataagccttacatttcttccactcgttggcgttcggtttccgatcaaaaaaatcgggtatactattttgagtctactttaactcctaaccttttctggatagatttacataaagtcgattttagtccgaatgcaagtattaagaaattgtctttgactcacggagaggtttatgcaggagatgtagtgaaagatttcaaagacagtagatcgtttacatttatgtttgaattacccaaataaaaatgtctaccgaggcagatacagattaatacagaattttttagttgaattctgtattaatctgtgttatccgcagtggatatattatttctttccatatatcagatggaattctactacagcttcaattccttttctgaatatatccaaagagaagttttcgttaggagaatggatagcatccgattctaggccaaatcccattaatacagtttttatacctaacacctgttcgaaagttgatataataggtatacttcctcctcggcgtactgccaatggcttttttccgaaagcaatttcaaatcctttttccgctgcctgataagcaggcagtgatatgggacatacatatccctggcctccatgcatggcagtcacttttacttctaccgtagcaggagcgatctgccggatgtagtcagcaaaaagttttgagatcacatgatgatcttgatggggaaccaggcggcatgatactttggcataggctttggaagggagtacagttttagaaccttccccggtgtaacctccccaaataccacaaatgtcgaatgaaggcctgcaactgtttctttcgagagtgctgtatcctttctcaccgaaaagttcttttactccgatggcttccttatatttttcttcattaaaagggatgtgggcaatcatttctcgttctgcttgtggaacttcttctacagcatcatagaatccgggtattgtgatacgtccgtcggtatcaattaccttacttaacataccacaaagtacgttgatcggattggctaccgctccaccaaagtgtcccgaatggaggtcacggttaggacctgttatttcgatttcccagtaagccagaccacgcagtccggtggttagtgaaggaaggtcggcccccaacatactggtatctgataccaagataacatcggcttttagtaattctttatgctcttcacagaaagcttccaggcttggtgaaccaatctcttcttctccctcaaagataaactttacgttattctccagcaggttgtattttacgagatattcaaatgctttcacctggataaatgcttgtcccttatcatcgtcggctccgcgcgcccaaatatgtccgtcacgtatttccggttcgaacggttggctcttccacagatcgagaggctcggcaggcatcacgtcataatgagcgtatatcaacactgttttagcattcggatccactatcttttgcccaaatacaatcggattacctttcgaaggcataacgatggcttcgtctgctccggccttgagtagcaattgtgtccagcgttgtgcgcatgccagcatatcatcatggtgttccggcaatgcactgatactgggaatacggatgaggctgaacaagtcttccatcatcgtcgattcattctctgcaatgtatttctgaatttcgttcacgttcaatagttgttaaagttgtgtcattctatctaataaataatagtcgagtatggtcattgctgccatagcttccacaataggcactgcacgtggcaatacacacgggtcatggcgtccccgggcctttagtgttgtatcaataccgtctatgtttacagtttcctgctccatcaaaacagtagccaccggtttaaacgctaccctgaaaaagatgtcctgtccgttgctgatgcctccctgtatacctccggagtggttggtacgtgtttcaatccggccattattgttgtagaatacgtcattttgttccgatcccttttgtttgagccccttgaatccgtctccatattcaaaagcctttgcggcattgatgcttagcatagcattgcccaatgcagcatggagcttgccgtatacgggttgcccaagtccgataggacaacctttgatgacacaagtcagtacaccgccaatggtatctccttctcctttgattttgtaaatcaggtcttgcatttcttttgctttctccggatcgggacagcgcaccgggttggtttcgatcaagtccagatcgtaatccgtgtaattgccttccagttttataggacctacctgtgaagtatatgccgtgatgtgaatacccaattggcgtaatgctaatttggccaatgcaccgcctactacccttgaaatggtttcacgtgccgaagaacgaccaccgccacggtgatcgcggattccatactttacggtgtatgtgtagtcggcgtgtgacggacggtatactttctccaggttattgtagtcattagaatgttggttttcgttccatacgataaacccgatagggcatccggtagactttccttcgaaaatgcctgaaaggaattctactttatcagcttcttttcgggaggtagtaattaccgattgtcccggacgacggcggtttagttcttgctgaacaaactcctcatcgatgacgatacctgctggaaatccatcgatcactcctccgattcctttaccatgggattcgccaaagctggttagtctgaaaatattgccaaatgaattgaacatattgaataaggctttaaaatttagtatatgcaaatataacaataaaattcaggaaagagttgttctctcgagttttcctttatccgtggaagatgaatcttattgtaattggcatcaaacatagtccgctctctaattattccgatagaggaaattagcaactataaaggaactttataattaaaaagagagctgcattaactacatttgatgattttttatttattttgcgcaactgatattgttagaagccgtgcaatatgtataatgatgaacttattgaaagtagtaagataaaatggcagtcgtttctgaaaggagatgacgatgcctatgcatggctatattcccggtatgttcagcaactctatcagtacggatgccgttttacgacggatacagagatggtgaaagattgtgttcaagatgtttttgtgaatgtttataggcagaaggataggtactcttctcctccggataatgttaaaatctacttaatgtcttcattaagaaattctatttttaatgttttcaataaagggaatttgcatgacacttatatctccaatatcaattatgaactcgatttgtcggttgaagaaaaactgattgagacagaagatgaaacctctcagaagcatactgttgctcatttgctaaatacactctctcccagacagcgagagattatttactatcgtttttttgaaggattagattacagtgccatttgtgaattgatggggcttaattatcagtcagcctataatttacttcagcgttctctctccagattacgtgaaatgtatggtatattaccattcttttttctattttaatattctgtttatcagtagataataaaaaagtaataaaaaaaaaccatttacactgagtagatttcgaaactctgtttgtctttttatgaaaagaagaaaatggagaaaaatcactatatacattatactgctgccgatttgttgaatgacgggactttcctggattcgatgcaacaccctacggagcaaagtgaaaagttctggtcacaactggaaaaggaaaatgaaacttttgccggagaattacgtatggcccgaagctttttaatggctgtggcggaaagccctcaaaaacggatgacagacgatgaagtggggacactttgggagcgaattagccggcaggtagcgatggaaaaaagagtgaaaagaaaaaaacagttgcttttcttacgtgtggccgggattgctgcttgcatatcagtgttggcattgagcagttactttgttttttcacttatttcattttatgaagaaagttcttgttacagtttggccggtatttccgagccggatagcagtaatgacatacagctgattttatcggaaggacgtaagttggttatggatgggaaagagagcaggttgcactacaaggaaggtggtaagatagctattagttccggaaagacccaattggacgaagaaaatgaaaccggttacaatcaattaattgttccttcggggaaacgttctttcataactttctccgatggtacccgagtagccgtaaatgccaatacccgtgtagtatacccgtcagagttttcgggacataagcgggaaatttatgtgaatggagaagtctatcttcaagtatctcctgataaaaagcatcctttcgttgtgaaaaccaatcgcatggaagtagaagtgttgggtacggaatttaatgtgagtgcttacgattttacaaaaaatcaatcggtggttctagtatcaggtaaagtagaagtggatacatataaatatcctaaaaaagttctgaagcccaatgatatgttgacttatgacggacaagacgacgggctacgggtaaatacagtagatgtgtctgaatatataagttgggtggatggttattattgtttcaaccatgagaagattgaaatcataaccgaaaagctatctcgatattatggaaagcgtgtcatacctgattccggattgataggattgacttgtagtggtaagctcgatttacgagacgatttacgggatgttctggaagtattaagtaaaactatacctgcacaaatagagaccagagataattattttttattaaccaagtgatttttaatactatgaaacaaggaccttaaattttaaaagaaagggttggataataccctcatatcatccaacccctgattagattaaactacgtaaaaacaaatttgttaatcaaatcgtacaaatgtatgaataatcatggaatttttagtcccgataggactaaagtaagaactttattatcaataaaaagtatttttttgtttttgttattcacttttgcattcgaaatggcttatgcttcaagtgtttactctcaaaccaaagtctttactatgcaatctgccgagaaaaccgtattacaggtttttaaagaaatagagaagaatagtgagtttataatcttttatagagacggtgttattgacttaaaccggaaggttagtgtaaatgtggttaaccagtctgttgataaaatactggagcagttactggcacataccgataatggtttcaccattaaagaccgtcaaataatcatttataaaaaagagacttctgcgacaccttcggtttcacagcaaaaaaacaaaattaaagtaaccggggttgttactgatgcaaaaggtgagtctatcatcggtgctaacgttgtcgtaaaagggaatcctaccataggtgccattaccaatatggaaggacgttatgaagtgatgcttccctcggacgatgtcattttattggtttcatatttgggatataataccgaagaaatcaaagtaaagggacgtcgtaatatcaacgttgttttgcatgaggactcaaaagcactcgatgaagtagtgatagttggttacggtaagcagaagaaggaaagtgtggtggtctccatgagttctatcaagcccaaagatattgttgttccttcccgcagccttaataatagtcttgccggtcaggtagcaggtctgatcgccgtacaacgttctggagaacccggttatgacaatgctgaattctggattcgtggagtcagtacttttgccgggggaacttctccgctcgtacttgtcgacggagtgccgagaaatatgagcgatattgaaccggatgaaatagaaacattttctgttctgaaagatgcagctgctactgctatttacggcgcagaaggagctaacggtgtagtattggtgactactaaacgtggccgtgttgaaaaagctaaaatatcttttaagaccgaacacaccatttcatcacctacccgccttcctgagtttgtaggttctgccgattatcttagtttatataatgaggcattgcgtaatgatggtgaaggaccgcagttttcagatgaactgatagcccattaccgtaacaacgacgatccggatttgtatcccaataccaattggattgacgaacttctccggaagaacacctttagtcatcgctatacactcaatgtacgcggcggtactgaaaaagccaagtattttgtgtcgggagcctattataacgaaaccggattattcaagaacaggccgaatgggatttatgataccaatattggtatagaccgttttaacttgcgttcgaatatcgatatggctgtatcttccaccactactgtaggggtagatctcgctatgcaataccttattaataattatccgggaacgggtacttccaccattttccgttctatgttaatcacgcctccttatgctttccccgcagtgtacagtgatggtaccgtagccacgtatgcccaggaaagagatgcgaacatgcgtaacccttataacttattaatgaattccgggtatgccaaagaatataggacaggtatacaatcgaaagtaaatgtcaaccagaaacttgattttattactaaaggtttgtctgcaaacttaaatgtaagttatgactacgatagtgagatgattattcgtcgcgagtataatccgacacgataccatgccacaggccgtgatgaattagggcagctgattttttccacagtagtatcgggtaatccggatattcaagatcccaaaaacagtgcgacatctgctaccaagaaaatttatatcgatgcatctatcaactataagcgtacatttggaaagcatgatgtgggagcaatgttactatatatgcaaaaagaaacgcaacagcataatgttccccttccattccgtaagcaaggattcgtaggacgtgctacatatggctatgatgggcgttactttattgaaggtaattttggttataccggttctgaggcatttgctgaaggcaatcgttttggcttttttccggcaataggtgccgcttattacctttccaatgaatcattttatccggaagtaataaaaaaagtggtaaataaactaaagctaagagcgtctgtcgggcggactggtaacgataaaaccggacgggaacgttttttgtatcgtcccacttttactaccaatgccggcggatttacgcagggtatcggtgatacgggcggaactaacggaattggtaacggaattgttgaaggacgtttcgccgctccttatctggcttgggaaattgaggacaagcagaattatggtttcgatctgggactgtttgataaccgcatcgatattatcttcgattatttccgttctgagcgtagggatattttgttacagcgtcgtactgttccacaattgggcgggcttcgtcaagacccgtggcagaattttggtaaagtacgtaatcagggtatagatatgtcgatgaatctcaatcaacagataggtaaactgaaacttagtgctcggggaacctttacttttacccggaataaaattcttgaatatgatgaactacctcagaagtatggatatcaagctgttacaggtacaagagttagtgagaatactctttatatagccgaccgcctttatacagaagacgattttatagtcagtaccaatgctaacggattgaaaacctataaactccgttcggaacttccacgtcctactttaggaggactgattggcccgggtgatatcaaatatgtcgatgtaaatggtgatggcgtgattgactcttatgatcaggtaagaggagtgggtaatccgagtactcctgaaattatttatggatttggtcttaacgctgagtacaaaggcttctatgcgagtatcttttttcagggagcaggcaatacatctgttcttctgggaggagccacttccgaagggtggtatccgttctcttggggcgtcgaccagtccaattatcgcacgtttgctttagaccgctggactgaaaacaatcccagtcaggatgttattattccgcgtttgcataagaacaatgccaataatgccaataatcgggtggcaagcacttggtggttgcgtaatggttccttcttacgactgaaaaatatagagttcggttatcagcttcctaagaaatttatggataagattggttttgaggctgcccgtatttatattatgggatataaccttgctgtgtgggatgacattaaatatttcgatccggaagccggtaatgccaatgcgggtttgaattatcctttgccccgtactttcactctcggtttagactttacattctaaaaagacaaaattgattaataaatagaaagatgaaaaagcaaaattctatatacactttgttgatagcgctattgtgctttgttagttcttgcgactatttgggagtttccgatcaacttgcaggaggtttgcagaataccgaacaggtgtttgataatgtatcgtatacaaagagatggtatgccaatgtttttgccggtatccccgattattcagggattaacagcgtgaatgtgggagctttcaaaaatccctggacgggtatgtgtgatgagctggtcgttgggtatggaaactcttccaaatacaataattcggatagaaatgctgccaacatgggttttcatcgttatggtgactgttacaaatacattcgtcaggctaatatttttttgcagaaagcacatccgataatgactacgggaacccaaggagaccagttgttggaagacgagctgacacaaatgaaagccaatgtgcgttttatgcgggcattttatcactatttgttgtttgaacaatacggtccgatcatcttggtaaaggacaaaatatacaatgcgactgaggatcaggatgtaccccggaatacagtagatgaagtaatagagtatattgattccgagctcacagctgttgcttctgaattgactcaggagcctatttttgaagataaggactatcgtgcctggccgactaaaggagttgctttggctgttcgggcaaaattgtggttgtatgctgcaagtcctcttttaaacggtggataccgcgaagctctgtcggtgacaaatccggatggtacccgtctgtttcctgattatgacgccggtaagtgggagaaagctcttgctgcttgtaaagactttattgactatgctgaggccggaagatatgaattatacaaagagtataaagacgataacggtgctgtcattgatccggataagtctgtgtataatctgtttcagaaatatacacatgagattatctgggctacggcaaataatgattgggggggaatgaatggtgatgctttcgaccgtcgtattgctccccgttgcgaaaaaaatggcttaggttccactggagttactcaggaactggtcgatgctttttatatgaaagacggtttccctgtttcggctacagcctatttgccgcagtctacactttatcaggaagaagggtatgggacttacaaagatcagaatgatatcttttctaagaagtataccaatgtgactgtcagcaatcgctatctcaatcgtgaacctcgtttttataatacagtctttttcaatggacgtcaatggccagtgagctgtaatcaggtattattttacaatggtggtaactccggcgtacaggaaggacaggctaccctgaccggttatatgcttttcaaacgtttcaatcgttcggtcagtttaactaatccgggagtagcctcccagttccgtccctctattattttccgtttggcagatttctatttgatgtatgctgaggcagccaatgaagtcaatcctaatgacgcgagagttttgaaatacctcaatctggtgcgtgagcgtgcaggactccccgatatagagactttgaatccggctattcgtggtaatcaggaattgcaacgggctgccattcaacgtgaacgccagattgaactggccacagaggggcagcgctattttgatgtgagaagatggatgattgctgataaaaacggggaaggtcgtcagaatggctatgtgcacggaatgaatgtacgcggtgagtcgaatgataaagaagatttcaatcgcatagtggaagcaagccagattgtatttaaccggaaaatgtatctgtatcccatgcctgattccgaaatgagaaagaccaagaatctggtacagaatccgggatggtgatttttgaataaataaaaaagatgtacttatgaatagatttaattacataggaatgttagcttacgtcgcactgtctatgagcagttgtgatgatagttttgatgtaagttccaaagccgatggggttttggctgtttctcaggaagggtttaatacattgcaatcttataatgtaggcgaaaagtatacagcagatttatggatacaacaggggggcttgaagtcaactgccagtgtagtaagtttttctgtggacaaagctttgctcgattcaatgaatattgccgatggaacctcatatgaacttcttcctgctgactgttatcaattaacaaaaagttctgtcgatattcccgcaaacgaaaggctgttgaaaggtgagctcacttacgacccggctaagatacaagagctctccggatatgatcatttgaaatatgtgttgcctttacgtgctacatccagtggaatgccttttgtttcaggacgttctgttgtgttgttgggttttaaagtttcagagccgattgtaactattatgaatgccggagtagaagagatcaacctggcagaagtaaaggagttacctgtacagatcggggtcccattcaccaataaatgggaaatcagctgtcgcttggaaagccgccagtcggtgattgatgcctataatacggctcacggtacttatttcagcatgcttccgtccgatgcctatgtggctcccgaaactccgattcttcatagtggagtaaatcaggttacagcaacttataaactgaaagacgatgtcctgccgggaaattatatgttacccgtgcaaatagcagaggtaacttctgatgctactatacgggctgataaggatgtttatgcagcttatagcattattaaagaaggggataaactttctaaaacagattggaaaattgtatcgttcactaccgaggaggcttcgggtgaaggcagcaataatggacatgccaaacatttaattgacggaaatgtcgagactttctggcattcgcgttggcagggaggatctgatcctttaccttatgaaataattatcgatatgaatcatcgggtcaaaatagctcagatagagttattgccacgtgggcgaggaagtaataatccgataaaggtaatacgttttgaagccagtgaagacgggacgaattgggaatcgatcggtcagtttggttttacgaatcaggatgccgcactaaaatattatgtaaaatcatccacggcacgctatatcaaattggtcattccggatggggtgggtaatggtacagtagctgcgattcgtgaattggatgtaaggggtacagtcgtcaactgatataaataaattaataatgcgagttaatagttgtaaattcaattattaactcgcatttatattttagtgtaatgtcatcagattgttttcatgctaccaaagatataccgtatacaacttttgacttagtaattattttacaatgatcttctataaaaatgttattaatatgcacttctgttgggaaataaataaattcaaaagtacttgagaaaagttcctgtagaacttggaaagttttatgcattatacatacagatgctaccttttagattgtgaagttaacagttttaaaagttcgtaataaatggttctttttcgtggcaaatatactaataactttaataaaacaattatttaagcatatctttttttaaaatatcgtaattatgactctaaaagttcctttctataagatggctttctatactatttactatcaatgatttgaccttctagcttttgattatatactttttcatggaaaatatccaggggtggaaaataggtatatttctttaggattctgaactacactttacaatttctccttttcgtttatatcgtttacctgtttatttcataggttttttcttttcttaagttctacaggaactctgataaaatcagccgttttgtgcaaattaatatcagcatggttcagtatagatgaagtataaaccatatttattacgcctatgaaaacataagaaagacccgatcccagacagaactatgcatcgatagatggatagtatctcttttcttgaaaattaattttaaaacctacacaacaaaaaagatttaagcttatgagaaaaccttttatgctaatatcagttttaccgataactgttcatattagtcatgataccgatactggcagtaatcgtatcggtgggataccagaaaaatatgcgtttaagaataaagtattaagatcaatttgctttgttctgtttttattatctatcggactcaattcagcctttgcccaagtccgtaatgccgccggacttgtggtggatgagaatggccagcccttgattggagtacaaattaaattggaaggaactactacaggagttattaccgatgtagatggcaatttctcgataaatgccaaaaaaggggacatacttcttttttcgtatgtgggctacgagccacagcggataacctataaaggtgaaaagattttggctataaaaatgcttccaaacaccgaattgttggatgaagtagtggtaattggttacggcaaacagaaaaaaaatagtgtagtaagttctattaatgccatcgggcctaaagaactggcagtatcatctaacagaaatctgaccaattccttggccggacaggtgccgggcctgattgccgttcaacgttcgggtgagccgggatatgataactctgagttttggattagaggtgtaagttcttttaagggaggtacgaatccgttggttttagttgacggtgtgcctcgtaatatgcaagatatcgaacccgacgagattgaatcgtttactttgctgaaagatgctgctgcgacggctgtatatggggcagagggtgccaacggagttattttgatcacttctaagcgtggaaattcacagaagcccaaaatatctcttcgtgccgagtccactttgcttactccgactcgtctacctaaattcatgaattcggtggagacactcgatctgtataatgaagctttaaataatgaaggaacagccagtatacgcacagcggaagaaattgccatgtatggtccgggagccgatcgtgatctttatcccgataccgactggttgaaggagatgttgagagagcatacttacaatatgcgttatactcttaatgtaaggggaggttccgaacgtgcgcgttattttgtttccggagcgttttatcaggagaacggtatctttaaagaaggtaagaaaaacgagtatgacaataatatcgggctaaaacgttataatttacgtagtaatattgattttgatgcaacgaaaacgactttagtaaaagtagatataagtgggcaatatttgcagacaaactatccggggacaagtacaaatactatttttaattcgatgtgccgcaccccgtcttacctgatgcctgctgaatactcagacgggacaattgccggacatccgcgtccttcgggtaatcgggtgaatccgtataacttgcttatgaattccggatatgccaaagaatggagaacatctatccagtcgaaactggaagtagaccaaaaattagactttatcaccaaaggactgaactggaaaggtctgatcagtttcgatgcagacatgaaatatatagtaaaacgtacaaagacacctactcaatatctggcgaccggacgtgatgaaaacggtggattgcaatttaagaaagtagtggaaggcagcgacgtattgaccgagaaactggaaaactcttcgaataaaaagatatattttgagacttcgttcaactataaccggacttttgcgcagaaacacgatgtgactgccatggttctttacatgcaaaaagagactcaatatcataataatgctctaccttacagaaagcagggacttgtgggacgtgctacatatggctatgacgggcgttattttatagaaggaaacttcggttatacaggttccgaaacctttgccaaaggatatcgtttcggctttttcccggcaatgggattggcatggtatgtcagtaacgaacccttttatccggaggtattgaagaaggtggtcaataagttgaaatttagattttctatcggccgtacgggaaatgatgataccggtggcgaccgtttcttgtatcgtggtacgatgaaacaggataatggaggatatgatctcggtttcagcgatacgggaggtatgggaggtattggtaatggaataaccgaagcccggtttgaagctccttacctttcatgggaaattgaggaaaagaagaattacggtattgatctcgggttattcgacaaccgtattgatttgcaagtagactatttcaataataagcgtaaaagcattttgttgcagcgtaatacagtgtccaatgtaaccggcttccagcagatgccttggcagaatttcggtattgtgaagaatcatggagtggatgccagtctgacccttaaccagaaaatagggcaggtcaatctgagtgcacgtggaaactttacgtttgcccgtaatgaaattatcgaatacgatcaagtgccacaggtatatccttggttggagaaaagaggcacccgactcaactcaaataaactatatattgccgaggggctgtatacatatgatgactttatcatcaatggtgaggggctcaaccgtacttatgaattaaaacccggggtcgtttccggcctttcaagcggtgtgcgtccgggtgatatcaaatacaaagacctgaacggtgatggtaagattgacagtaatgaccagaaggaagatgtaggaaatcctactgttcccgaagtggtctatggttttggatttaatgctgaatggaaaggtttttatgcaggtatcttttttcagggagccggtaacacttcgacagtattgggaaccggagctgacgcaacttttttccctttccagtggggagttgaagaatctgctgtgcgttcggtggtagccgatcgctggacagaacagaatccgagtcagaatgtaatgtttccccgtatgcatagtaacaacttccagaataatacggtagccagtacgtggtggttgcgtgacgcaagtttcctgagactgaagaacatcgaattaggttataattttgataaaaagttgctgaaaaagttgaatatagaggcattacgtttctatgtgcaaggaaacaatctgtgtgtatgggatcatattaaaatgtgggatcccgaacaaggaaacagcaatggaggattcccttatcctttgaaccgtacatttacttttggtcttgactttacattctaactaaattaataatagtatttatatgaaagtatttaagaatttatccacctatatactggcacttggatttagtgcgactctcttttccggttgtgaagattatctgaatgtttctgatgatctggctgcggagatgactatggaagaagtttttaataacacaagttatgcacgtcggtttcatcgctacatctatacgggtattcccgatgtgtcaaatatcattataacgagtgcttatgccgatctgaccggtttggacaatccctggccggctgtttctgatgaattgaagtctgcacagaacaatgtgaagacgattccgacaatcggttatcatgccggatcggcaactttgtcacgctggagtctttataagcagatacgacaggcgaatgagttcattgcctatgcccacgttattccgcagaatggcgatgtggctgactttattgatgaaaaagaactggctcttttgaaaaatgaagcacgtttcttacgtgcctattatcattacctgttgtttgagttatatggcccaattcctattatgaccgaaattgctgatccctcggccgctgatttggactattacagaaattcggtagatgaagtagtcgcttttatcgataaagaacttaatgaatgctatgacctacttccggagaaagaactgaatccggatggcaccatcaataatgagcgtgcggcagcgccaaccaaaggggcggcattggctatcttggctaaattgcatgtatatgcggcaagtccgttgttcaatggtggttatcccgaagctattgctttgaaggataatcaaggcaagcaacttttcccggcaaaagatgacacgaaatggaagactgcattggatgctttacaacgttttatcgattattcaaagggacgctactctttataccaagtaatgaaaaatggtgaaatcgatccggctgagtcactttatcagttgtttcaggtaagcgttaacaattccgaagctgtttggcaaagtagtaagaactcctggggaggcgtaaatggtgagggtcgtgagcgtagatgtacaccgcgtgcaatttttagcggattcagttgtgtcggagtcctccaggaagccatcgatgactttttgatgagtgatggcaagagcattgaagaatcgggtttgtataaagaagagggcattggtgaagacggtataccgaatatgtataagaaccgtgaacctcgtttttaccaggatataacttattccggcaaagtatggcaaaaaacagataagaaaatttatttttataaaggaatgcctgacgataattctaaagcagatatgagttattcgggatacttgctttataaaggcatgaaccgtgacttgttgaatcagggaaacaatccgaaatccaaatatcgagcaggtatgttgttccgtttggccgatttctatttgttatatgcagaagctttgaatcatgtaaatccgggtgatgcacgcatcattcagtatgtggacagtgttcgttatagagccggtattcctttactgaaagatattaagccggaaattatcggtaaccgggagttgcaggaaaaagcgatccgtcacgagcgtcgtatcgaattgtttgccgaaggacaacgctattttgatgtgcgccgttggatgtgtgctgaagaggagggttataaacaaggtggtccggttcatggtatggatatgaatgctaccgatcttgaaggtttcatgaaacgtactgcttttgaaactcgtatttttgaaaaacgtatgtatctgtatcccattccgttggcagagatacaaaagtcaaaaaaactggtacagaatcccggatggtaagagaaaacgcacacaatgggtatcacaacttgttttttcatgatcacttacaatcctgtcattttgtattttgaaaatgtgtagaaactcttttttacggcccgaaggagatgggctgaataaaaatgtgtggattttgcgatagtgtaattcacgcgtcttgtgattgggtgatatcttgattataaagaagagcttttggttttgtatggtaataaaatgaaaggcagaaatattagaaagatttcaaaatgctatttgtgtgatactcgtttgtgattggattctagaagaaaatactctttttcgagggccatttattctgttttctacgacgtggccttgcttttctttctggaagacagatatcgtggaagcaggaagttaacttcctgctttcacgatgttaactttctcttggtaagaagtttgttttttatctttacgatgttaacttcctgtttcctgctttcggatttcagggtataaacagacccgatattcacattttgtttgccgattcgctcctgtttcgccgtttttggtaaaatgaatagttagtataaaatggctttttgcaattttttaatacggatttcggaatattgcttttataatgtcaatcggtaagtatgagtacggacagtgctttcaatggctatggctatctaagcccttatgcagatacctgcttttatagagatgagaaaaacggtttgtttgaaaactgtcacaacttatttattgcaattactaaaaccgtttcttaaaattttgagattattattattatttgttactttgtcaatgcctttttattaactaatactttaaaatgaaggaaaacacaatgtattcgaatcttgaatcggtagaacaattatttcggcaatattataaggtgttgcgggtatatgcgttccgttttgtgaatgattgggatattgcagaagacgtagtgcaggatgtttttgttgctttatggaataaacgtacagatattgaatttgatggcgcggtaaaagcctatctttttaaggctgtctataataaatcgcttaatatcctttctagtaagaaatataccgaagaagaatccgtagaacaattttccgatcaaatcgaagcactgcaaattctggagaataatcaggaaaactcgttgttcatgaaagaactccagggtgaaattgaaacttttatcgaaacacttcctacgcaggtaaaaaaggtatttatattaagtagaagctatggtctgaaaataaaggaaatctccgttcagctcgatctttctccaaaaaccgtagaaaagtatttgacccgtgctttgttggaactacgtactcatcttaaaaacaaggatttaatgagtcttttattcttgctttatctctgctcgaaataatattcttaaaaaaaagtatgttttggaggagggttttttaaatttcacttgtattactaatagaggagctaaaaatgaagaatgaaattaaagacataaatgaagttatcatacgttttctggatggtacggctaccggtgaagagaaagtttttctgttcaactggctgaaacaatcagaaaagaaccggaatgaattttccgaagtccgtgatttatggcttttaggcaacacgatagctaccgacgatctggaaacagagatagcgctagagcgatttaaaaatcggatacagtcaacagaatccggtttacgtaaaaacagattcgttttcaggaaacacttcgttccgttcttgcgtgtggcagctgtctttttgatgttatttactgtagggtctgtcttttattattggggtagcagttcggtcccgaaacagccggatgtcatgaatcgtttgttgactgccaatggaagtaagggacgatttgttttgccggatagtacggttgtatggcttaattccaatagtttattggagtatcctgaaacgtttagttcgtcagcccgtgaagtcagtttatccggtgaagcctattttgaggtacggaggaatgagaagcttcctttccgtgtgcaagccggagagatgaaagtagaggtattggggactcgttttattgttgacaactatcgacggaaatccggggttgaagcagtattggtagaaggtagtgtgaagattgccggttgtaagatgaatcattcggtagtgttgactcccgggcagttgattaattatgataagaagagtgaacgtacgaaagtacaaatggtgaatacggatgattatatcagttggattcaaaatgaactgacttttgataatgataagttggctgatattattattaatttaaataagtggtatggggtggatattgaatgtccgtcagagtttgctgaaaaagtatttatgtcgttctctgtcaggaatggagagaatctggatgaaattctgaaagcgatgactttggttgctccaataagatattactgggagaatggtatcttacatattcttcccagaaagcgataggcaacacaagtattaatcttaaaatgaattgaaaatatgtagaaacacacatccaagcaaaaaaataggtaaatgttgcagcacttacctatctctgagtttttttaatcacgtctcttgcaggaggcgcaattatttactttaaatcttttacaaagatatgaataaatttaaatggagaagctttttaagctttttcttaacagaaagaaacattcgtttagttagactaatgtcttttattttgtttctatttgtttttcagggagtttatgctcagcaaacccgcattaatcttcatgtgaaacaagttcccctaaagcaagtgcttaaatcgatcgaatcgaagagtgaatacactttcttctacaatgatgccgaaattgacatgaaccgtaaagttacggtacaagccaataacgaacgtattgatgtgattttatccaaaattcttccggactgcaaatgtgtagtggagaatagaaagattattttggttcccggtgcggagaaacaaaataccccaaatgataatactgcgaaaacgaaagagataaccggtacggttacagacacacgaggcgaaacgttgataggtgtaaatgtaacggtattgggaactactaccggtgttatcactaatatcgatgggaaatattcgttgaaggttccggcaggtaagtcacttaagttttcatacgtcggctatatcgcccagactgtaaaggtaggtgataaatcagtgatagacattgtattggaggaaaacagtaaagcgctggatgaagtcgtggtagttggctatgctgttcagaagaaagttaatctttcgggttcggtagcaactgtttctaccaaagcgatcgaggaccgtccggtattgaatatgggacaagcgctgcaaggtgctgttgccaacctcaatgtatcggtcggtgatggtgaagcagatgattctccttcttataatattcgtggtaccacctcattgaatggaggttctccgttggttgtcatcgacggtgtggtctctaccagtgatcaactgaatcgtatgaatcctgttgatatagcaaatatttctgtattgaaggatgctgcgtcatctgctatatatggttcacgtgctgcgtttggtgtcatcctggtgacaaccaaggatggtagcaatgaaaaacttaccgtcaattataacaataattttgtattacgtaccaatacccgcatgccggaaattataacagatccttatctggtggcaaccactcgaaatacgatggcatatccatggtataatctttataacgaggagcaactggcctatgcgaagaaatgttctgaggatccttctacttctccttatttcttgaatccggatggatcttatacttactttggtcggacaaactgggttgacgaggcttacaacgatgtaggtttttcaactatccacaacattgatatttccggaaaaacagatcgtatttcctattacttttcgggaggatacaatcggcagaacggtatgtttaagtatggtaatgacatttataaccgatataacctgcgtaccaaattacagtttaaactgacagactggtggagcttgaacagtaatgtcagcctgacgacttccgattatgattatgcgaatgccatgaccaacacttataaacagatgtatcgtaagaatccgatggatatggttaagaatcctgatggaacttggacagatgccagtgtcggtacattgggagcattggccgaaggtggtcgtgctaccgactggaaaacaaatacaaatatcaacttgtcgactaagatagatgtgatcaaagatgtcttttttgtacaaggaacatttgccttttcaaatacaaaaaccagaagtaattggtataatttgcctgtgacttaccgtaacggaccggaattacctgttttgacatttaatccgatttcgaccgtatccgatgcttcaagcagtaactccgatacgaaacatattctatttgatgtatatggtaccttccaaaaaacatttgcgaagaagcatgctgtcactgctgttgtgggtttcaatcaggaagagtataaatatgattacgtaaaagcaaatcgtaaagaactgatttcaagttcactgcctactattaatctagctacaggtgatatgaatatgtcccagagtataacgacctgggctctgagaggtgcttttgcgcgtttgggatatatttataacgacaaatatatttttgaattcaacggacgctatgacggtacttcacgtttccctaagaatgaccgttttgtatttaatccttctgtttctttaggatgggtcatctcacgtgaaaagttctttgagcctttgaccggagtggtcagttttctgaagttgagaggttcctatggtagtttaggaaaccaggatgtggatgcttatgcatatcttgccacgatgggatcaggaaaaatcagtcagatactggataagcagcaaccggtatatgtgggagctcccggattggttgccggtaacttaacctgggaaaaggtaactactaccaatcttgccttggatgccaatttctttgataaccgtttaagcataacaggtgaggtatatgtacgtcgtacaaaagatatgttaacacccggagttacgcttccaagtgttttgggaaccgacgtgcccaaacagaatgcagccgatttaaagacggaaggatgggaattgactgtgggttggaaagatcagttcaagttggccggaaaaccgttctattatgatgtaaacttcaatctggcggatagccgtgcttatattacaaagtacgaaaatcccaagggattgctgggcgattattatgtaggaaaagagattggtgagatatggggtgtagaaactttagggttctttacttccgaagaagacattaagaatcatgccgatcagtcatggtgtacttcttatccgggtacccgtcctttggcaccgggtgacctgaagtttaaagatgaaaacaaggatggtaaaattactgacggagcatggactttggaagaccatggcgattataaaattataggtaatagccgtgctcgttatacatttggtttatcggccaatgcacagtggaatggattcgatctcagcttgtttgcccagggagtaggtaagaaggattattatccgggtacgggtgacctctatttctggggtatctatgcacagccttggaccaatatcaccaaaggtaatatgtatgaccattggacggaggaaaatccggatgcgtacttcccccgtatgaaagcttatgtggcggaaaatacggatagagaatgtggagtggtacagaccagatatttacagaatgcagcttatatgcgtctgaaaaacctcacagtaggttatacacttcctaaggtattgttgaataagataggaattgagcgcttgcgcattttcttctccggtgataatttgtgtgaattttcgggtttatacaagcattacaaagtagatccggagagcttaggtgacattgtctatcctcttcagcgttcttattcattcggtttaaatgttacattctaatttagataaactatgtgttcaaaaataaaacatatattactgactgtgtgctgtttcacaggcgcaggactgatgacaagttgtaatgacgggtttatggatcgctttccggaaacgagtattacagagaaagtctttttttcttctcctgctgatttggagacttataccaatggcatgtacggctatatcggtgcaagctattcggatactccttccgacaatatgctttacccagaagataccgatatttataaaatgatgcgcggcgaatatcgggcggataatataggtaaatggagctggagcaacattcgtacagtcaattttatgttggctcggacaggtcgtgtagaaggagatcgcggtgagattgatcattatattgggttggcacgtatgtttcgtgcactggtctattattcaaaggtgaaagattattcggatgtaccttggtatagccatgacctgcaaacgacggacattgatttattgtataagccgcaggaccctcgagcattggtggtagactctattatggcagatcttgactttgccgtaactcatatgaaaacgactaaaagcacgactcgtatttatcgtgatgcggctttggctgtacaggcacggattgctttgcatgaaggaacgttccgtaaatatcatccggaactgaagctgaatgacggcgaccgattcttgaaaatagcggtagaggcatgccagaagattatggacacaaaaagttacagtttgtctacaaccaaagagagtggtttaccggcctatcagtcacttttttgcagtacggatcttacacagaatccggaaatgattctggtagctgactacgacaaggcgttaggacgtctgcacaatgctcaggctcagtttgactacaacaccggtctttcccgtagcctgatggaagattatttagttgttaaggatggacataccgagtattttcatcaagtggaaggctataaaacgaagacagtacttgaagtctttgaaaacagagatccccgcctggaacaaacatttatgaaaccgggtgttttgaatgtgggaaccactgaacctcatcgtacgaaattgaacttgggaggatatcctcagattaagttccgtccgctgacattcgatcagattgactggggaaaatcgtatacagatttgcctattatccgttatgccgaggttttgttgatgtatgcagaggcaaaagccgagctgggtatactcacgcaagatgatgtcaaccagacaattaacctgatcaggcagcgtgcaggcatgccggatgtttcgttggatgattggctggctaatatcgatccggtacaggatgaacgttactccaatgtacagtcagcacagaaaggtgctgttttggaagtgcgccgtgaacggagaatcgagttggcatgcgaagggttcagatatggcgatttgatgcgttggggatgtggaaagttgtttgaagcagctcccgaaggagcttatattccggggatgggatactatgatgtgacaggtgacggtcaaccggatgtcgctatagtagaaaagaaagcagatatagataaaattcccgaagaagacaagcaaaagtataaactgacagtttatgctttggaaggtaataccatcggacttaccgaaggaacaaaaggctatatctatttggttgcccaacataataagtatacttttgtatctccaaaatattattactatccggtagctaccaaagatataactgttaacgagaacctctatcagaatccattctgggaataggcttatcttaatcagaaaacaggaagggctgcttcggcagtaatgaaggggccctcttgttttcgttaagtgacaagggcaattaatatgataaattaataaatatgttgaaattatttataagcatggctgctttattcttgggagtcggtagctctgtgttcgcacaaatagaaggaaaagtttatatcgatgcgaacggcaatggcatttgtgatgcgggagagagggggctaaaaggagtctgcgtacaagatggtctcaatgtggtgaaaaccacagatgatggtcatttcatacttccgggacataaagatacacgttttgtaactttgactgttcccgatgggtatcaggcatcaacctcccattacctatcttttgacggaaccggaaaaaagtatgaattgggtatctgcaagacctcggtaaataccgggaatggatattcgtttgtacaaattacagatacggaaacttctctatacggtgattggatcgataacttgaaagagtacgtgaaaaccaatccgactgcttttattatccataccggtgatatttgttatgaagctcatcaggattttcatggacgttatcttcgttccgtagatttgggagttccgacctactattgtgtggggaatcatgatctgcgtgccggaaaatacggtgaagagttgtggcaaagtcattttggtccttcatggtattcgtttaatgtcggtaatgtacattatgtagtaactccgatgctgggtggtgatcatgcaccttcgtacaggcgttccgacatcatccgttggctgaagaatgatcttgcacaaacggataaagggaaaagaattgttttatttaatcacgacttatggttttggggagacgatttgctcttcaaagataaaaatggcgaacagatagactttgctgattacaatctggatgccatgatttacggacactggcacaatcattattataagcagttgaagtcaggacttcatacttactgctcatccactccggacaaaggaggaatagaccatggaacttcttgtttcagaatttacaatgctgataccaaaggtaaattaagttcagcaactcgttatacttatatagacggaatattgacttctgcctatccggcggaaggtgaaactgtttcagttcctgacggaaaaatgacggtccggatcaatgcttaccgtactatatcggatgcgaagaaggtgacagcttctgttgaacgaaacggaaggcttgtatcgactgtgacgcttatgcctgaaacagactggggatggagcggggcagtccgggtatccggcggtaagcaacgcctgttggtgactgccgagtttgaagatggaactcgtttgacgaagagagtagactatactgtaactaagcagccgctatcggtcattgcgacatctgatgtctgggcagggcttcgtggaaatgccgcacacaaccaactggtgaatgacagtgtatctttacccttgcaaaccaactggattcagaatgtcggcagcaacatttacatgtgctcgccgattgttgcgcagaacaaagtctttatcggaaccattgatgatgacaaagcgaagaaatgctatgtaaaagcctatgatgcgaccacaggacatctttgctggacctttgtcacttccaattcgataaagaataccattgcctatgaagatggccgtatattcgcttcggatgcttcgggaatgctttatgccatagatgctgaaaaaggaacagcttgctggcaaacgcaattgccggtttctttgctgccgcttctcgacgaaggattggccgtagccgatggtgtggtatatgccggacatgcaaaaggtacttgtgctgtgcaggctgtcgacggaaaaattttatggcagaataaagcctgggacggaggcgagggaaccacttccacttttaccgtgggtgcgggagtgttagttgcatcggcccattggaacgggcttttcggacatgacatcagtaatggtgctttgttgtggaagaagcgtgatagtaagattcgttttcgagacggatcagctactttctatgatggtaatttctatttagcttcatgtgagaatctgtatgtaatcaatccccgttcgggagatattctgaaaatggcagaaacttcttatgaatttaattcggcttgcgctccgcttgtgacggataaatatctgattgtttctacttccaataaaggtgtggtcgcttttgaccgcctcacttttaaggaagtctggaattatcgtaccgggacaagtcttttctataccgttccgtattcacataatcaggaatgtacggtcgaggtttcgcctgtccttgtaggttcgactgttctctttggcggcagcgatggatatttgcatgccgttgacctgaatacgggggcttatcgcggtaagcgggccttgggagcacctgtattctcaagcgtggcagttagtggtaactgtctgtttgttgccgattttggcggcaatatttataattttaagttacacaattaaatgtatatacaaaatgaaaaagatatctatactatttatattttccttgattcttggtttatttgtcagtgaagtaagcgcggccggcccacgtttgaagaaacgtcccaagcatgtggtattggttgcttttgacggattgagtgctgttgctatccgtaatcatcccatgcccaatttcaatcggttgatgaaagaaggagcttctacattgaataaccgttctatcctcccttcatcgagtgctcctaactgggcctccatgtttaccggagtaggaccggaacttcacggttacactacttggggaagcaaaacaccggaaattcctccttttatcaccaaccaatatggccgttttccgggactgtacggattgctgcgcgatacacatcctaaagcggaactcggttatatttacgaatgggatggaatgaagtatctggtcgattcgcttgccatcaatcatttcgtacatgctccacagacaaaagatcatcccaagggagcgacacaatttgccgtcaattatctgaaagagaaaaagccgatgtattgtgctgttatatttgaatatcctgatcataccggacatacctataaatgggaatctaaagagtattatgaaaagttagatgaattggatgggtatttaggtgaaatagtagcagctattgaagaagccggtatgatggacgaaacagtgattattttgaccgcagaccatggtggcatcggtaccaatcatggaggaaaaacgctcaatgaaatggagactccacttgtcttttatggaaagggtgtgaaaaagaattataagattactgaaagcacgatggttattgacgtacctgccacagaagcctggttgttgggtgtagagcctcacgaagcttggttgggcaatccggtaacaactgcattttttactaaataattaattctttttgtggaggtgtgacaggaggtaacttctgtcatatctccatgtattattttcaataatagaataggtatgaataagtttatatatatttttgttgcaattgttgcaataagctttgcttcctgtacgcaagaacgtgcaaaagagaaagaattaaaagttttgtcatggaatgtatggcatgcgggacatgctaaaaattattctgaaaaaggatgtgaaggtactatcgggattctgagaaagagtcaggccgatgttattttgatgattgagacttatggtgcggctccaatggttgcagactctttgggatacgattatgtattgttatcggacaatctgtgtatttatagccgctatccgattaaaaaaacatatcttttccctgactccatttctacattcaattttggaggagtcgaaatagacatggatggcacaccggtccgtttattcgatacctggttgcattatttacctgatatgcgcttggtacctaccgaacaatcggaaaccgatatcctcgcatgggatgatgccggtacccgggataatgaaatacgtcgcatactctctgtcttgcagccgatgattcgtcagactgacagtattcccatgattatgggtggagatttcaatgtgcattcccatcttgattggactgaagcaacgaaagacatgtatcatcatggtggtgcagttgtggagtggactgtatctaaagagatgcaaaatgcaggtttcaaagacagcttccgtgaaatacatcccgaaccggaaaaaaatatagggactacatggatctatgataatgaagataaaccactccgatccgaccgtattgattttatctattaccaaggcaagaccattcgtgcaattacctccgaatcttataatcaggagttgaccaagcctttgaaatttatgggagaggagttcttttatccttccgatcacggctttgtgatgactacttttaagatatcaccattagaaaaatagtgccggactgtttcatattgagtttgtatgaatattagatatgtatgttctgcattacttgtgcaacggcagaccttcatgagctggccggtgtaaattcattcacagtcctaagtatcctgagattgtcaaaaagattggtgagattatgagacaagagcatacggtcccggtatacctcgcatttcgggtgaaagtattggacgaaatatactgattcttaaaaaataggataatcggtagcagtaattaaaaacgcatatatacaattatattattatgtgtgaaagcagatgaagggtaagagatcttttttgatagataggatctcttacccttgttttcgtataatcagtgtaatataagtaattagcaggagaaaacaattttatcattatcttattaaagatgatgatggagatatattatatttgctcgattcgaatcatagattaatttttttttaatacgatttcgctcgataaccaacttaatcttaaatttagaacataaaatacgtaagatagaccttgtttggatggaaataaagctgttactttgctccgttttagaatgaaaattaaaaattactaactaaacgtgattatttatgaagaaaaatttattgtatctcttcgcgctgatttgctcagtgagcttgttcactgcttgtagtgacgatgatgataacagctggcaggaacttcctaaaggtgaaattaaagcagaaaatgtagactttcagttgaatgggacgaatacaaccggaacagtgaactttgaagccacaagtcttcaatctgcaacagtcggttttaaaaatgtggttgatggctatagtgatataactgttgatgttacaatggaaaaacaggcggatggttctttcaaattcaatggaacgaaagatatcatgacaaaacctgtgacaagagaaacatctcaacctgctccattattgaaagttacagttgatggtatgattactcctgaaggtaaagtaactttgaatgttagtgcaacaggtgccggtctttatatcggaacttataaggatgaaactttagttcttacttatggtgaaactttattgacaggtaaagaggttgtatttgatgcaactaatggtgataatgtcactattcttttgaaaaacgtaattcctggagaagaagaagcaactttaactggtgttaaagtagatggtgagggttttagcggaacagctaaaacggctaatgcttcagtcgaatatactggatctcgtaaagacaaggtgttaactttatctttgaaagttacgatgaacgatccaaaaggttgggctaaaacttatggtttagctgagtacacaacaggagagttaacttataatgattatactaatcctaatgctgtaatagcaggtgcaggttatgtaaattatgtatgcgtaactgaaagttctgattatggaacatcttatggtgctatgtttagaggaatttttggtgtattattacctcaggtattgcaatctgttactcttggcgttgacggaaatgtaacggcttcttataactctggggcaattcaattccaaccgatgtgggctttaatgcctcctactgcagatgttgctaaaaaactaattccaactgaaggatggttacaatctcctacgaatctagcatactggtttgaaaaagatggtaagttgtatgtgaaacttaatattcctgtaattgtagcgcaagctatgggaagtggagctgccggacttgatgggattatcgatcaagtattgaaaggtgaccctgctacagttaaggcaatgttagctaaacttttaaaagttgaatctattgctattagcgatgaatcaattgcaatgttattagattgggtaaacaatggattcccattgaatgtaaaagtcgctgatggacatagctacatctatttagataagtctgcatttgcaccattaatggctgtacatgaaacgggcgaagtagatagttggggagatcctgtgaaaatgtcggatatcttaatattatgggatatgttgagtaaaagtggtattcttcctcctgaagctgcaatggcgtcaatgttgattggagctataagtggtaattgggaggcaacagaagcttttgatttgggattagatttacaagctaaatagagtgatataataaatattaaaaaagatgagacgaatattcacaatattgatgttactatgtacaattagtacgtttgcggcgggtgtgacgagtacttatagcggaaaattaacagtttcggttgatggggctactcctacagttgtagatccacaaagcgtgaaagttattgaagatggaacagcggttaaaatgactatttctaactttagctatgccggtttaacagctgatgttaatataactgcatctaaaaatttgagtactggtgaattaaccttaagcaccatttcttatgcaggtttaccgcttagtggtaaatttaatgcgggttcgaaacttataaacaatgattgtaagattatcttgtctatttcggccgtattccagaagatagaggttacttttattggaactaaataaaaggattttaaatctctccaattaaaaagagggtgtccggaaaaaatttggacaccctctttttaattggagttaaagaaatttcaattttatattttcaagtaattcttttgtaatataaggttgttttgataaaacagagggggaactaggaggatgaccagtcttttgttgctaaataactatgattctattagtatctttatcatgcttttagtcttgaaatatattttcttcttgtatctataaatgattttaatgaaagtgatttcaaaatgaagtgaaaaaggcaactttttcatattgaatcagttgcccttaattataatactattggaaaaaatagattttaaaacgcatatccaaagcctacatttaaataaataggatacatgttgaatgtaattgttttaaattcctttttgaagatatcattcaagccccatactagatctgcatatacatttaaatgtttgaatgctttccactctgcaccggcctgaactccccattggaaattgttcaggtccttagaaaaatcataaggagctattttatctccctcaaattcagctttttctcctgtgggagtatctttacgcagataaccatcattgacgtgaccgttaaagtcaccactagtcataaatgaaacataaggacctgcattgatttttacacgttggcttattttataagcagctgttataggaaccgagaaataagagcctcggtatttggttcttacttttccggtccagtaacctgctaggcgttcgccaccatcccctatgatctccatactatagttttttacgcgtgctctggcttccatacctttagtttccagacgtagtcctaaagtcattccccatttagaatctttaccaaaccatttggtggtattaccttctatggcaaagcatatcgttggactatatcctgtgagtgcgcgtatttcggctggtaatggaagtggagaggctcctcccacattgaatcccgcttttatttcatattcaagcccgtgtaatgcagaccaaataataccatggttcctttcttcctgagcttgtacggaagtgattgtactgatgatagcgagtaggcctataagtatatactttttcattttcttgtttttacttgttagtgaaatttaatagaacctcatcaatgtaaagtgtacttcctggagcaccttcaaaatgatctccgcgtatacttgaagaaaatacgatcgctagattatattttcccgctttgagtttctccatatctactgatttaccggtacgatattcaaatggtaagtcaaacttaatccattcatcagtttcttttgcatctttaatacgggctactgacactatatgagtattatcctctgccaatatgttggttccatcaagtgtggacaatttttcatctgtctcatagaatacagcataaatatcacagatatcttttttattatctacgggtttaccatctatttggaatgactttcctgctttatatttataatatccggtaattgaagttggaatattggaaaatggagttccgaatttggttgaacggaggatatcggtaggtcttacttcaaagctgcccaaaaataagttacctgctgcgatcggcattccaagcaatgaaccccaataaccggtttcacaagttgttaattttaagcattttccttctacaccgttcgttgattgacttgttggatattcttcagctgttgcttttacgccggtgaaagcgaatccggcattaccacttgcccaagtcattgtttcttttccttgtgcgtctgtttcatagaaaatatggtatttcccttctgaatcgaattttatattctcaaaatggtacgttgtgttagtaataccagagaacgctactcctacttcatattttttcttccattttttgtcttcagaagtcacttcataatattgaggtgtagtgaaatccaatgtagttccactattagggataatcgaggctccaggagttaaggtaaacttgggagctaatgctgttatatctgttcctgcttttacgattaatgtaaccttattgttttcaattatcggatctcggttgagtacgtcacccggtacagagcatgctatgatgtctgcttctgcattaggtgcttcgtcttgtatgcaagaaaccattataaagcccagaaagaaacaggctatcagattctttaatttcattcgattctgtttttgattaataatccttttagtttagttgattttttgtaaacttggctgcaaagttaagtttcttttttgaaaagatacatttgaatgcctacaatacaacattttataacggtcataatgttcagaatggtatgtttttagtctaaagtccatgaatctttccattcgataatcggtttgggaccttcaaaatgaatgggaagccagatgtagcgtccgtcaatagcgttttgcggagtccagcggtcacccatgtatataaactgatttttcttaccttgtaccggtaggatataagtgctttgagaatgaaaagtaaggtctgcatcctgacctatacaaggatttcctaactctttccattctccccaaatggaagaagctatggcagagcgtgcggcattgggattccatccgctacagccggacataataaggtaatagctaccatctttcttgaacatggccggagcttccatgaaccggttaataaagacccggatatatttgcctgtatagcctgtataggtcggatccagttcggcaatgtgcaacgtactattctcttcggaggagtagatatggtaagctttaccgtcatcatcgacaaacagattcatatcacgcgccatttgcccctgctccatgtcgcggcccaatatgttgaggctgtccggatgggcaggaagactacctccggtgcattgacgttcttcttctgcagaaggtctgcgggtggttttatgaatgggcagtacgttgatgggccatgaaccggcattgggacggacagcttttagaaaggtgtaagggcctgtaacccggtcgctaagggcaattccgcttagtgctcccgaatatcctgcacctttgggttcaagatgaaaccacatgacatatttcttagtgagagggttgtatataactttaggacgttcgagaatacaccctttagaaatgggatgtccgggatcattttctatcactgatagtgcaataccacagtctttccaatgatataagtcatcggacgagtagcaatgcacccctacattggctaaatttccggcttcaccttctgttttgtgttcgccaaaccaataataggttccgttttcatataaaatgcctccgccatgcgcattgatatgtacctggtgattatcgggccatatctctccgggagtgaaagattgtccttgggctgtttgtgagaaaagaaagcataacagaaacagggcttttagtataaatcctttattcattactcttttttattaagtatttgtaattgagaggcaaagatacatgataattattaaataaccagaagatagagtgtaaaaccattcactcatccggataggatattctttggttaaatggatggtttataagagtatatttcctatttttgtgcaaaatataaaccttggacagatgactgaatcagaaagaaaacagataatcgctttaatacagcgggaggtgattcctgctatcggatgtacagagccgattgcagttgcattgtgtgtagcaaaagctacagagactttgggggccaaaccggagaaaataaaggtattgttgagtgctaatatcttgaaaaatgcaatgggagtaggaatccccggtacgggaatgatcgggctgcccatcgctgtggctttgggtgcgttgatcgggaagtccgattatcagctcgaggtgctgaaagacagtactccggaagctgtagaagagggaaagaaactgattgatgaaaagcgtatctgtatttcgttgaaggaagacattacggagaaactttatatagaagtgacgtgcgaagccggtggtgaacaggcgacggctatcatttccggtgggcataccacctttgtttacgtggcaaagggagatgaagtactgttgaataaacagcagacttccggggaggaagaggaagaagagactctggaacttactttacggaaggtgtatgattttgcgttgactgctccgttggatgaaatccgctttattcttgagacggcacggcttaataaaaaagcggcagaacagtcttttcagggtgattacggacatgcgttgggtaagatgcttcggggcacttatgaacataaaattatgggggatagcgttttctcacatattctttcgtatacgtcggcagcatgtgatgcccgtatggcgggagccatgattcctgttatgagtaattcgggcagtggtaaccaggggatttctgcgactttgcccgtagtggtatatgccgaagaaaacggaaagtcggaagaagaattaattcgtgctttgatgatgagtcatttgactgtgatttatattaagcagagtctgggacgcctatccgccctctgtggctgtgtagtggcggcaaccgggtcgagttgtggcattacttggttgatgggaggctcttataagcaggtggcttttgccgttcaaaacatgatagccaatctgaccggaatgatttgtgacggagctaaacccagttgtgctctgaaggtgacgacaggagtgtcgacagctgtgttgtcggcggtaatggcaatggagaatcgttgtgttacttcggtcgagggaattattgacgaggatgtcgatcaaagcatccgaaatctgacgcggattggatcacagggtatgaatgaaacagacagggtggtgctcgacatcatgacacataaagggtgctaatgttaaactatatgttaaaaaatagaagacaagcagtaaaagactaattctttcattttcttgatataaagaatcttgttggagtgacgaactattaatgctgtatatatgaaaaaacattttgtatggttgcttttattatttccgcttctgctgaccggatgttatggagaagaagataaagagaaggaccagggagattatatttgggatttcataaactataatatttatttttctgtgaaggatgccgccggcaataacttgctggacccacaggttgcgtcgaatatattgggtaatgagattactgtggaatatggggataaatcctttccattggaaaattctgtggatacccgctttaatatgccccgcccgttgggattgagaaaagaagtgctgggtgaagcgaaagagcgtgtgctttcttttggtgagttttctccggaacatcaatataagggagagacctttacgattcattggggagatggaacgaaagatgtggtaaaattcgacttatatatcacctggaagaaacagaaccctacaatacataaaaggctttacttgaatgacaaagaatacagtaaggattctttcctgataaagatcgtgaaatagattgtctgtccttaggtataataaaacggtgaacatacgatgcagttgtagtatgttcaccgtttttcgttttataaattaccgctcgggattaatggcaatgtccacaaccgcagctgtctccacaactgtctccgcagtcgtcaccgcaaccgtcgccacagcttccgcaactgcatccgccttcgccggtcatcattttaatcatttcctgaatttcttcgtttgtagccggacggctctcggtaacctcgcccacgaaagtcaaatcttcaccggccaacggatggttcatatccatcactaccgtatcggcttttacttcaactacactaccattcaggcgctggccttctgagttcatcaaaggaatgatgtttcccggatagatatgttcgttatcgaattttccgtcaatctcaaagatatttttgggaagatcgattacatgttcttcgtcatattcaccataagcttcggcaaaaggaatagtaaattcaaatttgtctcctttatgaaggtttactatctgtgattcaaaagcttcgagcgtagtgcccaaacctgaaatgaattggaaaggatgttcggctgctgtttcttctactaagtctcttttaccatcttctgttgtatacagtttgtaagctacagtgatgtacttgttttctgctgtttccatctgttctttataatgttattaataaaattcggattttccgtggggacaaatatacgaattaatcgtcagagatttatggactggtggggagtttattctttcgtagtagaaattaatacctgttggctgataggcgatgaataacgaaaatgaaagaagtagtatatctatatgtcgttaaactgaaaaaaaagtttttccatttgttattatatataacaaattaaataaaatgtataaacgaactgacctgttaaaagccttcctttgtacttctaaatgtaagatattggtacatttttgtttttttataatatacatcaacctatgaaaaccttaattgaaaatttgacttctgatttgctacccaatcagatttttcaaaccggatttagctttttaatcatcttaaaagggaactccttattgaagttggatagcaatgttttgatttttattatgagtggtactatgaaagtttcttctgctcagcaagagttggctaccgtcagagagcggcatatctttttctgggataaagaagatgactatacctgcgagatgctttcggactcacaggtcatcttatttgcatttggtgatttaatagtacatgatttattgacattccgtcctttcggagccatttcggatagttctgtttcaaaagatgtgggacttaaatttgccgagcctttgaattcttttttacagcttcttgcacagtacatggagatgaatttatatgatctctccttgtatatagcgaaacagcgggaactgttctatatcctgaattctgtttataatgagcaggaactcgccattttgttcagttccttgacggaacagtcgtccaggtttaaagaacagatactggagaactatctcagtgcaaaaaatgtgggtgagttggccagcctgttaggctatggcgtcactaattttcgggcaaagtttaaagaacagttcggagtgtcggtctaccgttggcttctcaatcggaaatcgcaacatatcatttaccgtattaccgtatatggtgatgagtttagccagattatcgatgacttcggattttcatctccttcacactttaataaattttgcaggtcacaatatggactgacaccttgcgaacttcgcaagaaattgaaaacaaacaataattcttaaattgaagcttatgttaaaaaatcattgttgtatggggacaggatgcagaagagccatccttttccttcttttttctccgctgtttggtaccgggtttgcccagacggaaacgccggttaaggtcgataaacctcttaaatcgtattcacattggtattttggagcagaatatggtgtccctttcctgtttggcgattttacttcattctcggcggataaaacctatgtcggatctcagtttggagggtttgccggttatcaggtcaattcgtggataggcatagaggcatctgcgcgaaccggatataccagaatgggagcgaaatcttacgcgggtgattaccttatgaatgccgacgggatgacttattatacgaatcaggattttaatacctggaagtacaaggatgtgttttcgaaagtacactttacgaatattggtttgcagatgaatctgaatgtgaataatttctttggccctaaccggggaaatcgtcgctggacggtattactgagtcctgccgtttatgcacaacatttctctacagagttaataaataaggcagataaaagcccattatcaggaaaaaagacggataagtggaacatcgggatagggggagatgtgtctttgcgttataagatttcccgagcttttgatgtacagttgcgtacgggaattatatgggtcaataacaataagatggatggtatatctacgctgattaagtcgaaagaccactttatgaccagtgccggactctctttgatatggaaggtgggtaaaaagaaagaagacaatgttctctatgcctcaagacgagcggcggatatggagatcagatatatagaggagcgtgcggtcagcttgcctgcccctgcttgttgcgttgaagattcgatagagaaggagcggatgaaacgggagattgcttctttaaatatgcagttgcaacaggcgcacacggtagtgaaggagaagaccggttctgatccgatactgggattcaacgaattgcctccggtctattttaagagaggatcggcttatctgaatgtagccttgtacaaaaatgaattatgccgcattgtgcaaaccctgaaaaagtatcctgagctgaaagttattctttcagggcatgccgaccataccgggaatccggatattaatcaaaaaatctctttacagcgtgccgaagcactggcagcctatcttgaaaagaaggggatagatggcaaacgtatcgccgtgaaaggagagtgcatagatatgcttacttccgatccgaataattacagcgtacttgccaggcgagttattgttgaaatccaaaaatgaaaactatgattagaaagaaaatatatctgttgttgttattgatgcctttactgcatggctgtaaagagtccgatttcaacgatttacttgacagacagggtgatcagaggaaagaattgcaggagttgacagatctatgtaaaaaactgaatgaggatatttataatcttcaggtgattgtcaataccgacaggataggagataacattactcatatcgaggaactggcggatggtgcggggtatactatctccttctccaaaagtgctccgattactatccgtaacgggaagaaaggagataccggtccggatggagatgccgggaaagacggcatagacggtacagacggtaaggatggcgtagatggtacggatggtaaagacggtgtggacggtaccgacggtacggacggaaaagatggtgagaacggtaccgatggtaaagatggtgcaaatggtacgaatggtacggacggtaaggatggcgtggatggtaccgatggcaaagatggtgtcgacggtaccaacgggaataagggggagcaaggtgaccccggacagaatccggtggttggcattatgcaggatcccgctgattcggaatattattggactataaaaataggttccggtgaaccttattatctggccgacaatgatggaaacagaataaaggcaacctctacggtacacgatggacaaacccctcaactgggagtgaagcaatgggaaacgtccgccgggggcgacgataactattactggacgcaaaagattggaaccggtcccgagacatggattgaagcggatggaaagaaaatagttgccaatgcaaaaaatgctgtgtccgtgtttgagaaggtggacttgaaggagccggattatgtggaatttaccttaagcagtggggcaacccggttcagattacctataggaagaccggttattgaggttccggagggacgtaaactgttttttttcaaccggggcgggtctcaggcgattgctttcagttgtaagggtatctcaaaagagcaattgtcggtagatgttccgaaggggtggaaagcgacagtcgattttgaagcgggagctttgactcttgaggccccttcggcgggaacagcggacgtagcattatcaggagatgtggtactgcgaagtacgaataccgcagaagaaacggcgcggacttctttcaccgtgagtatgctttataagataatgcttccggattttagaggttcttatgtgtacaacatccgtctttggggcaaaaagataggagaactttgtcgtgaataccagcgggaattgggattgtctgcaacggttgtctatccttatttgacaggaggagtttatggatcgggacttatcacgaataccggtgcttcggtgaagcacgacggtacgggttatcatgcatcagtttctgacaggccggcagttatgtatatctatactgaaaatggatcggaattctataccgacagttcgttgaaaggacgggaaccggatttcggagacggcctgcaggcggaaaggctgactgatgcggatggcaatgcctaccgcattgtgaaaataggtaaacagtactggacagcggagaatttacggacacttacttatcctgacggaactcctgttgccaccggcttgtcggggcgtgcctggagagagagtggatttgatgatagcggttcgggtgcctgtgccgtgtacgattatgagaatgctgcagcagcaggggcatttgtcaataaggtatcttatggagttttgtacaatagagttgctgccagaaaagtggtgcctgccggatggaagcttccaacggaatcggatatcgtatccacattacgggcttttctggggtctaatgccggtacattattgaaagagtccggaacagagcattggctgacagggggtggaaccgatctcacaggtttttccggtgtcggaggaggatacagaggtgctgacggtctttcgttcaacgattttcagcaagtcggtatctggtggagcagtgccagtctggagagtgtcggtgctgtgttcagattgtccgcaaactcatccgtactcgagtttaacagcggagacaataattcgacaggctacagtgtacggcttttgaaagaagattaatctttaaaacaggaaatcatgaagagatataaaaaatatatgtttatcattttgtcggttctgttggcgggaggctgtgttcaggaggacattaacgaggccctgcgccgggaagccgaactgaatgtacggatgggaaaactccgggaatggatatccgataccaataatgaagtgaggctgcttgccacgatagtgaatacgataccgactcatgattacattgagagtgtgaccgaattgcccgatggaagcggtacactgattgtttttcataaaggaggagatattcttataaagaatggcctgacggggaataaaggagaaaatggcaatgacggtgccaatggtgagaatggcagtgatggagcaaacggcgcggatggtacggacggtaaagacggcgttgacggtcaggacggagccgacggtcaaaacggatcgaacggaactgatggtaccgatgggcataatggcagtgacggacaggacggtgccaatggtgaggatggcaaagacggagttgacggtaacgacggtaaagacggcgtgaaaggtcctgcaggagatactccgttgctgggtgccaaacgggatacggatggcaattattattggactgtacaaataggtggcggagcggtagagtggctgacggatggagaaggtaacaaggtgatcatgactcctgtgaatggtgtcactccatctgtcggcatagctaaagataccgatggtgaatactattggcaggttactgtcggaggtgtaacgaaatggatcacaggaggaagcggagagaagatagtggctacggtgacagatggcagcccgtccatctttgcttctgtgaataccggaaatcctgaatatgtcgtgtttaccatgactgacgggagcatctataaagtggctaaaaccggagacagtaaattgatattcaatgaaacggggctacttttcttccgtcgtggagtaacgcaggacgttacgtttgattgcagcagtttccgacagatagtaaaggtggcaggaacatgggatgctacgattaattatcagccgaaagctttgcaagggacgctgactgtgaaagcacctgctgccggttcgactctgccggcttcggaaagaataacgatagaaggcacagatgctttgggaaatactgtccgggcagacatcttggtaacgttgtattatcgtattgaacttccgaagttcaatagttctctggtttatgacgtattgatggagggagttaaagtaggagaaatatgccgggagtatgtgccggcgtattccacgacggaccgggctacagtagtctattcttataatgctgcttcgcgtacttttggttccggactgatcttggaaaacggagcatcgatacagcatgacggaacaggatatacgccggtcgccggcaatccgtcgtccactgccatacttacggaagacggtagccggtatgtgatggcggcagatggggcagacggactggtgaacgggactgtttgcgggctgaaagcttccttggctgtcgatgtgcagggatatgcttacagggttgtaaaaataggtagcctctactggatgggagaaaatctgaagacaacccaatttaatgatggtactcctattcctaccggttttgccacatctatggattggggaattcagtgcggggcagatcttccggcctgtcaggtcgaccgggcggttaatgccaatgctccgggagctatgcaatatcgtaacctgtacggtgtactttacaatcagtttgcaatgaaaggaaatatagctccccaaggatggcatgttccttctaaagcagaactgcaagcattggtagactttgtgggggcagatgcacgtaaactgaagtcgacagctgttgggaaaggaattggaaattggttggaggatacgggaatagaggcgaacaatctgaccggttttacggctttgcctgctaatacggttaatggcggtaatggcagtaccggagcccaggaaacaacagggcaatggtggtcgacggaaacgagttatcgcatccggatgtcctacaaatctaattctgtagaactgttgacttctggcaatgcgttggcgggtgaaggtaacagcattcgttgtgtccgggatgcaaattattaatttaactctaatgaatatgaatcatataatcaaactattgtttctctgtctgttcttcgcaaccgcctgtagccaagaggagatgaacgaggtgttgaagaatcacgcggaaatggaggggcaggcaaactctgtcgaggagttgtgcaaaaatatgaatagggatatcgttgctttgaagctgatcattaattcgtctgaatcaggtgattatattaccggtttcaaggaacttgcagatggaagcggctataccatcagttttttcaaaagtggtacgattgtcatcaagaatggcgagaaaggagacgatggtaaaaaaggagaagatggtcaggatggtcagaatggtcagaacggtaccgatggcaaagacggtcaggatggtaccgacggtaaagacggtcaagacggtatcgatgggcaagacggacaggatggtactgacggtaaagacggtcaggacggtaccgatggcaaagatggccaggacggtaccgatggtaaagatggccaggatggaacagacggtacggacggtccggaaggagacaaaggacagaatgggacagctcctgtcgtcactatgaaaatggatacggacggacatctgtattgggctatcaagaatgccgatggaacatcttcttttcttttggacaacaacgggcaaaaggtcagagcttcgggaaccgatggtattgttccggtcattggggtcaatgcggcaggatactggacgcttgattatgggagcggtcctgtcgaattgaaagatgctgcgggcaatccgatgaaagcgaaaggtgcgtccggtgatcctatgttccggaaggtggtcagtgaagacggttatattgtattttatctgactgatggaaccatatttaaagtgccggagtggggaggggcacaggtagaattggcggcttcgggagtgacgtattttcatcggagtgagtctctgacctttacgtttacttgcagtggcgtaaataaaagtattgctccggtatgtacggctccggtcggttggacagttacggcccaatatacgtcggacaccaccggggagatgacggtgattgctcctgataaaagctcggccgatggagccttgtccggtactgctattcttgaattgacagccaaggacggcaagaagttgtcggcaacgctcggagtcactttattgcttgaatttaaagtgcccgattcttcccgttcgtttgtttatgaactttatgttgagggagtgaaagtaggagaactatgtcatgagtttattcccgattattcatttggatcgggtaaaagtgcctcggtcttttatccttataatgtttataacaaagcgtttggcgaaggaatggtattggataacggagggaaagtagactatctgactaccgtttatacgccgggtaccaatacgcaaccattcacctccctgtttacagaagacggagtgagttttataaccggcgattatatcggctactcggatagtcaggcaaacggactccgtccttatctgactactgataatgaaggcaactcatatcgggtgatgaaaatcggtacccaatattggatggcggacaatctgcggacgataacaaacagtgcaggagtcatttcttcggaatggagaaaagatgctaacccgagatatgctgtatatggttttcccgccggcattacggaagatagccggaccattcgcaatcaatatggactgttgtacaatgcaggtgtgttttccggttctacgtctttagttactgaaggctggaaaataccgaatcatttgggcgattgggataaattgcggaatttcctgggtggggattctaaagtggccgaggcattgagtattgccgggtttgtgggaaaacccggtggacggcgtaatgctgatgaaccttttgctttccaggaaaaagatgaagtcgggtattggtggtttagcagtgtcgatgggcataattgctgggcgctctccatcaatccttcgaatgtatccgtaccacaatctacgaatacatatagtcgtggttacggatttagcatacgttttattcgtcagtaatatgccattgtttactttgaaactttagactctttgcgtaaaaacatccggatgttgttgtataaaacatccggatgttttgtattataacatggggatgttttactgcacaacatccccatgttttattggttcggtcttaatctgctctttccgctcttttcttctttctctgtttatgattgatgtttctctgctttcttcctgagagaactatcgcaaaataattgtttaggatgcattgtgtcttgctcttggagatattaattaatggtctcagggcattttttatctgttgattttattttcagttaaataattgtttaatttaggggaaaataataatggctttggtataggtgattacatgattaataatagtaaacatgaaaaatataattgggattctgggagtttttattttggcaatatcctgttccggcggtaagaaggagtctgcggatgccggtctggaactgacagaagattctgttgtttatttattggccgataatgtgacgttagaaataagggctctattcccttttattgataaagatgggcatgaatacctaacttttcagaatcaattggaaccagagatttgtgtttatgatttgcagtcgggagagtttgtgaaaagcatcttctttgatagagagggggctaatggtgttggtatgttcggaggatatcatattattggttttgatgaaatatatttgcccagtttgcaacaaagtaaagtgtttgtgatggaagagtcgggcaagaaaaaacgtgagattataactgagaaaacggatgatgggatacctctattgcctttcggagccataacctttgcatatcgccctatttactttaataacgggaaaatgtatataccccaaaccgtcaatatgcgtttagggaacaaagtgatggaaaaatctcctgtctacgtcgtggttgatacggttaaaaatgtgctcagtccttttccaattaagtttcctcctattatgtcttcggatgatgttactaaaccatccttaggtaatgaactctcatatagttgctgtttaaatgacaaggatcaatttgtattctctttcttttttgatgaagatatttacgtagtttctctacaagatggagaaatgaaaaaaatcaaaataaagagtcgatatatcgataagcctgcaatcaaggagaatcctccacaggattttgatggggcgatgaaagcaagctcagaaattccttgttacggaaatctgatttatgataaatatcggaaagtctattaccgttttgtatacttgaaagcggatttggacggggagaaaaattatctgaatatatggcaatatgggcgtaaatctttctctataatgattctgaatgaagattttgatgttatcggggagactcgttttccggattttacctatatatctaccttgcactatataggtaaagacggcttgtatttaagtgacagccattacaagaatccgtcttttgatgaaaacaaactgagattccggcgttttaaattagtacattataataagaaatagttgggaatataggattttgaatgataaatacatatttaaagatgggctttgcttacaattattttgttttaggtgatttttttcttcaatttgtttggagtttataaaaaagcacttacctttgcagcaatcaaagaatagaaaatagaagttatgaataatcatacatcaattaacctggcagtcctgcatattattcgcgtcgtggtgattccatcaagagcgtgagaaaggttatgtatgtattcgtacagatagaagatatgatttagagcctttctcactacagtggggaaggctctttacttaaaaggaatattgaaatgaaaaagcagttacgcagttcgttcagcacacagggtcgccgcatggcaggcgcccgggcactttgggaagccaatggtatgaaaaaagagcaattaggcaaacctatcattgccatcgtcaattcgtttactcagtttgtgccgggacatgtacatctacatgaaataggtcagctggtgaaaaaagaaattgagaagctgggatgctttgctgcggaattcaatacgattgccattgatgatggtattgccatgggacatgacggaatgctttattcccttccttcccgggatatcattgccgatagtgtggaatatatgatgaatgcccataaagcggatgccatggtatgtatcagcaattgtgacaaaatcactccggggatgttgatggcggctatgagactgaatattcctactgtatttgtatccggaggtccgatggaagccggtgaactggatggacagcatttggacctgattgatgcgatgattaagtcggccgacgaaagtgtgagtgatgaagaagtctccaagatcgagaatcgggcctgtcccacttgcggatgttgttcgggaatgtttaccgccaattcgatgaactgcctgaacgaagcgatcggtctggctcttcccggaaacggaacgattgtggcgactcatgccaaccgtacccaattgttcaaagatgctgcgaaactgattgtagaaaatacctataaatattatcgggacggtgatgaaagcgtacttccccggagcattgccacccgtgaggcattcctgaatgccatgacgctggacatcgcgatgggaggatctaccaatacggtacttcacctgctggcgatagcccatgaagcggaggcggattttaaaatggacgatatcgatatgctttcacgcaagagcccatgcttgtgtaaagtggcgccgaatacacagaagtatcatattcaggatgtaaaccgtgccggaggtatcatggggattatgggacaacttgccaaagccggattgatcgatacgtctgtagtgcgtatcgacgggatgacattgggtgaggcgatagataaatatgatataactagcccgaacgtatgtgaagaggctattaaaaagtataagagtgcggctgccggaaagttcaatctggtgctcggctctcaggacgtctattataaagagctggatacggaccgtgccgaagggtgcattcgcgacatagagcacgcatatagcaaagacggaggactggccgtactgaaaggaaatattgcccaggatggttgtgtggtgaagacggccggagtggacgagagcatctggaagtttaccggtccggcaaaggtgttcgattcacaggaagcagcctgcaatgggatactcggaggaaaagttgtcagcggagatgtagtcgtcatcacgcacgagggtccgaagggaggtcccggtatgcaggaaatgctttatcctacctcttatatcaaatcgcgccacttgggcaaggagtgtgcgctgataaccgacggccgtttcagcggaggtacatcgggactcagcatcgggcatatctctcccgaagcagcagccggaggtaatatcggaaagattaaggatggtgatatcatcgaaatcaatatccccgaacggactatcaacgtgcgactgaccgatgaagaactggctgcacgtccgatgactccggtcactcgtgaacgctatgtgcctaaaagtcttaaagcgtatgccagcatggtaagctctgccgataaaggagcggtgagactgattgattaaccacagagttgtttcaatcgtgaattgtaaatcgtaaaatcgtaaattttagtacatgagtaaagatataatttcaggcggtgaagcattaatgcgttctttggaatatcatggtgtaaagacgatctttggttatcccggaggatctatcatgcccgtattcgatgccttatacgatcatagagagactttgaatcatattttggttcgccacgaacaaggggcggcacatgcggctcagggatttgcccgtgcttcgggtgaggtcggagtttgcctggtgacgagcggccccggtgctaccaataccataaccggtattgcggatgcaatgatcgacagtacaccgattgtagtcattgccggacaggtgggaacagcttttttggggacagatgcttttcaggaggtcgacttggtaggcatcacgcagccaattacaaaatggagttatcagatccgtcgtgccgaagatgtgccatgggcggtggcccgcgccttttatatagcgaaaagcggacgcccgggaccggtagtgctcgactttgcaaaaaatgcccaggtggagaaagccgaatatatgcctgcgaaactcgatttcatacgcagttacgtgcctgtacccgagactgacccggaggccgtgaaagcggctgccgaattaattaacggtgcagagcgcccgttggtattggtggggcaaggtgtggaactgggcaacgcacaacaggaattgcgtgctttcatcgaaaaggcagatatgcccgccggatgtacgttgttgggactgtcggctttgccgaccgagcatcctttgaacaaaggtatgctgggaatgcacggtaatctcggaccgaatatgaacaccaataaatgtgatgtcctgattgctgtcggcatgcgttttgacgaccgtgtgaccggaaacctggctacgtacgccaagcaggcgaaagtgattcattttgatatcgatccggctgaaattaataagaatgtacatgcggatgtagcggttctgggtaactgtaaagagacgctctctgctgttacggcattgctgcagcccaacgagcataaagaatggctggacagtttcctgccttatgaacaggtggaagaagaaaaggtaatccgtccggaattgcatccgatgggagatacgctttcgatgggggaagtggtgcgtgcggtaagcgatgcgaccaatcatgaagcgatattggtgaccgatgtcggtcaaaaccagatgatgtctgcccgatactttaaatattcaaaagaccggagcatgattacttccggaggacttggtaccatgggattcgggttgccggctgctatcggtgcaacctttggccgaccggaccgtacggtttgtgtatttatgggtgacggtggtctgcaaatgaacattcaggagttgggaaccattatggaacagaaggcaccggttaaaattatcgtattaaacaataatttcctgggcaatgtacgccaatggcaggcaatgttcttcaaccgtaaatactcgttcacacccatgctgaaccccgattatattaagattgcttctgcttatgatataccggccaaaagagtctttacccgtgaagaactggctgatgcgattgacgagatgattgcgacagacggtccgttcctgttggaagcttgtgtgattgaagagggaaatgtgttgccgatgacccctccgggaggttcagttaaccagatgttgttggaatgctaataagttaggaattatggataagacattatatacattaattgttcattcagagaactttgccggattgttgaatcaggttacggcagtatttacccgtcggcagattaatatagaaagcctgaatgtttcggcttcatctatcaagggggtgcataaatatactattacggcttggaccgataaagatacgatagagaaggttgtcaaacagattgagaagaagatcgatgtgcttcaggcacattatttcactgaagatgaaatctattttcatgaaatagctctttataaggtgtctatgcccgaatttcagtcacagccggaagcttcgaaggtgattcgtcgctataatgcacggattgtggaagtgaatccggtatttgccatcgttgagaaaaatggaatcagtgaagaaattacttctctctacgaagagttgagtgcattgaattgtgtgttgcaatttgtacgttcgggacgtgtggcaatcactaccagttgctttgaacgtgtgaacgagtttctggcagatcgtgagaccaaatataacttaagcaagaaagaggaaaagtaaatgagtgacgataagaagatagggagttataagtttattgcggagccttttcatgtagacttcaacggacgtttgacaatgggggtgcttggcaaccatctgttgaactgtgccggctttcatgccagtgaacgcggctttggaatcgctacattgaatgaggacaattatacatgggtattgtctcgtctggccatcgatctggaagagatgccttatcaatatgaggagtttactgtacagacatgggtggagaatgtatatcgtctttttactgatcgtaattttgccattatagacaaggacggcaagaagatcggatatgcccgttcggtatgggccatgattaatttaaatacccgcaagccggctgatttgctgacgttgcatggcggtagtattgtggactatgtatgtgacgaaccttgtccgatcgaaaagccttcgcgtatcaaagtggctactgaccaaccttgtgctaagttgacagctaaatacagcgatatcgacatcaatggtcatgtgaacagcattcgttatatagaacatatcctcgatttgtttccgatcgatttgtataaatcgaaacggattcagcgatttgaaatggcctatgtggcagaaagttattatggcgacgagctttctttttttgaagaggaagtaagtgagaatgaatatcacgtcgagattaagaaaaacggcagtgaagttgtatgccgggcaaaagtgaagtttgtgtagtttaaaatgtgattaaaatgaagaagattgtttttcttttgctgctctgtgttgcttgctgcatgaatgcacaggagtttcatctgattccgaaggtcggtttgaatctggcaaatactaccggggaggtggattctaaagtgcgtcccggactcaatatcggtctgggaggtgatgtcatgctgaccgaacggtttggaatagaaacaggagtgtattactccatgcagggaagcaaatataaagggggcggagtctcttatacggataaactggattatatcaatgttccggtatatgcgaaagaatttatatataaggggctgtatgtgtttggagggccgcagttcagtttcaatgtgaactcagagaacaaatcatcctccgactatggtaccacagtcataggcatgaatgtgattcgcaagtttgattgtggagtggggcttggagccggttatcagtttgaacgtggtctgctgatctctctaaactataacatcggactgattaacgtaaacaaatcttgggcaagcgactctaatcctaaagcaaacaatagtgtggtccagctaaatgtcggttggcgttttgcactgtaagataaagaatataagtttaattattaataatcggttttgttttcgtccgaacggaacaagacttttaaaacaaaaagaaaaatggcacaattgaattttggcggtgttacggaaaatgtagtaacccgtgaagaatttcctttggaaaaagctcgtgaggtattgaagaatgaaacaatcgctgttatcggttacggtgtgcagggaccgggtcaatcactgaacctgcgcgataatggcttcaatgtaatcgttggtcagcgtccgggaaaaacatatgaaaaagcagtggcagacggctgggttccgggtgaaacactgttcggcatcgaagaggcatgcgagaaaggtactattattatgtgtctgttgtcagatgcagccgtaatgtctgtatggcctactatcaaaccttacctgactgccgggaaagcactctatttctctcacggtttcgcaattacatggagcgatcgcaccggtgttgttccacagaaagatattgatgtcattatggtcgctccgaagggttcgggtacttcactccgtacgatgttccttgaaggtcgcggactgaactcttcgtatgccatctatcaggatgctaccggcagagctatggagagaaccatcgcattgggtatcggcgtaggttccggatatctgtttgaaacgacttttgtccgtgaagctacttccgacctgacaggtgaacgtggttcgctgatgggagctatacaaggtttgctgttggctcagtatgaggttttgcgtgagaacggtcatactccatctgaggcatttaacgaaacggttgaggagttaactcagtcattgatgccgctgtttgctaagaatggtatggattggatgtatgccaactgctcgactacggctcagcgtggtgctcttgactggatgggcccgttccacgatgctattaaacccgttgttcagaaattatataatagtgtaaagaccggtaacgaggcacagatctctatcgactctaattcaaaaccggattatcgcgagaaactggaggccgaactgaaggcattgcgtgaaagcgaaatgtggcagacagctgtaactgttcgtaaacttcgtccggagaataattgatctgaatagattatacaacttgtgataaaaggaggaaactgctgtttcctccttttattttgcttgtaattagtgttttgtgtctgagttgttagaatggtatgttgtagaatatgaaaaatagatagattgtttggatagataaatcaagtttaatatatatctttgtgccctgatcaaacaacaaacaatattatatcatatgaaaaatcgtatttatacaatgaaagggatgctggctacattactgggtgcttttttactagggtatgcagtaacaggttgtattgatgaaaaagatcattataaaccggacgataaaacatcaggagtgcctaactcttttgattttgcgactactcaggatgtccaattggatctaaagtatgatgttcctgtgaaagattatcaggttttgtttgaactctattttgaaaatccgttgacgacagatgccgaagggcaggtggtgaaacgtactgatatcactcccaaggttacgagaatgactgatggaaccggaaaatatcgtgccaaggagacggtaccggcctatggggaggaggtttatatctatacttcttatatcggagtgccgatgttgtataagactaaagtagtagggaatacgattacagccgatataaattgggatacggcggcagaggagtctgttcagacacgtgccgaaggcgagtatcagacagtgcctcagggattttatactttaggaagttggaacgtgaagggacgccctaattatctggatagtgaaggggtaatagaattgacttcttcattttatcagacgattaatcaaacaattccggaaggtggaaattgtcctcggaaatatcggcaatcggctgacattgttatcaacgatgaattgggagctgaagtgaaggtgcgttttgttggaggtacaagtgctgcgtacagtgctttcggatattattgttatccggaaggagcggctaaaaaacagatagagaatgctaagaagtatgtggtgtttcccaatacgaaaaccggagtcggcataaaaggtggagagtgtgtgaagctgcattatatcgatgaaaatggtgaagaccaagggactacttttccaaaaggaacaaagataggttggtttatcagtaatgatgcatttacgaaaaagggtgaaaagaccggcagtgttggtaaaggactcggaatgttttattcgaccactgccttgaattcggatggtcgtacccatacggctgcattcaagatcaatgattttatagttttatcatttgaagattggactgatcaggattacaatgatgtgatgtttaacatctggtctaatccgattgaagctattgctccggatgtaccttcggtagatccgatagatccggatgatgcgtcggttgcttatcgcatgacttataaaggtattttggcttttgaagacaattggccttctaagggtgattacgatttgaacgatgtaattgtgaaatatagctctatattagagttcaataccaagaatcaggtgctttccgctgaagatacgtttacggcgatgtggtccggagctctctttaagaatggctttgcctatcagttgaataccgatagaagcaatgtggaatgcagcatattggaaggaaagtcgggatgggacaaacaaggattagacaaagacttggagcaggccaccatttcggtgtttgccaatgcgattgaagagacgggagagaacactaagacttctacttttaagattcagaacaaatttaaacagccagtcgatcatgaaactttcggagtggcaccctacaatccttttatcttcttgcatcagaatacggacaagaaccgtacagaggtgcatttggtaaatcacggaccaacctctaaagaaaatatggatctgttcaatacccagcaggatttgtcggataaagataaaggcatctattatgtgtccgatcagaattatccgtttgccattcatctgtctgatgtcgagtcattcagtacaacggagaaggaagctattgataagtcgtatcctcgttttgcttcatgggcacaatccggcggaacgacagataaggattggtatttgaagcaataagttgatgtcgtttttatgctatagaacaaggggctgtccgaaaatccgacagccccttgttctatggttttaaatggaaacagaagttacgactgaaataaggagatcggcatcagagtccttggctgatgtgccggatatatccgatcaatttcttatagaaagcatgcttgctcattgtgaccgcatctcctaatataaccagtttcattcgggcgcgggtgatggctacgttcattcggcgcaagtcgttgagaaaaccgatttgtccatcttcgttagcgcggacgaggctgatgaaaatgacatcacgctcctgtccctgaaaaccatctactgtatggatggtgatctggctacggaaggggcggaagaataaacagcctttgagttttcctctcagatactgtacctgcgctttgtaaggggagataaggccgaagtctatacgctcttccaatacacgcttctcaccgattttgcggatgtatgcttcaagttcttgcaacaataagtttgcttccggtttattgatgcggccgaagctttctcctacaaattcttcgtggaactccatttcggaggtgtcaatccaactcatgggcaggtccagatcgagtatcccccggttggtcacttcgggggcggcttgtagttcgccttggtagaaccattcggaggagaattgcataatagactgatgcatgcggtactgaactttcaggagtgagaccgtttcctgcttgttggctgctactttttccattaatgtttgttccaacccgttccgggccgcttctatgcattttattgtgggaggcaactgacaatggtctccggcaaagatgacgcggtctgcttttcggatggctatccaacaggcagcctcaagggcttgtgctgcctcgtcgataaagagtgtggtaaatcgccggccggtcaggatacggtggttactgctgaccaatgtggaagcgatgacccgtgcccccgaaaacagatcttcattgatttgtatttccagctccgtggcacgctccctcagatgattgatgcggctgtgtgcagcttcccgttccgagtaactgcttttgcgcatccggtttcccatttcccggatcgacttacgtattccccagagttcggtataggccggatgcccctcgaaacggcgttcgtaagtaaatgaaagcatcttgtcatttacccggctcggattgccgatacgcaatacaggcactccgcggtccaccagcttttcggcaatccagtcgacggccgtgttgctttgtgcacagaccaggacttgattttcgcggtgcagggtctcgtagatggcttctacaagagtggtggtctttccggtccccggaggaccgtgaacgatggctacgtctttggcgcaaagtactttgttgactgctgcttcctgagtgctgttcaaccaagggaaacggaccggataggtttccctccagtgggagggttgcttgcttagcaatatatcacgtagttcggcaaggcggttacctttggcgcgaatcacatcttccagcgcttcgaacatggtatgataggaggtttcatcaaaatagagttgtactcccagacgttctgctccttgtatttcaagtagagatccggcaccgggtacggctactaccatacgctcctcgtcggcataactgactgtacagatggaattgaaataatgtatttttccgtcatatccctgttcgaaaaagcaaaccggacgtccgaattcgaatacatgttcgatgtctttatcttctttcctttctatttcgatgaccaattggttcagtgaattgtagaaactccgtcccgtcccgaccggataccagcagagccctcgttttactttccgtgcaatgcccatcgtctctgtctgccggcggaattcttctttctcgtattcatattccatgcgtagcaaaagttgctgatgctgaagatcactgagtggagaagaagactttattttattatcattcatcttgattggctgtaagttatatgctaagaactatagttatggaatgactacaaattacgaaaattatgcagaacctgtcacagtcacttgtagcttgtagcatctgatttgtagcagctatacttatagcttctcacaaaatttcccgcaaagataacaattctgtttccgggttggaataaacatttcaatttgttaaacctttctttcatattattggttataataaatagaagaacagataaaaccgaaattgttatggtatatgatttgaatatgttgaagagcttctatgcttcctataaagggaaaatggagcatgttcgtgcagccttgaaacgtcctttgacgttggctgaaaagattttgtatacacatttgtataatgtggcggatttaaaaaattatgaaaggggtgaagactatgtcaactttcgcccggaccgcgttgctatgcaggatgctactgctcagatggctctgttgcaatttatgaatgcgggtaaagaagcggtggcagtaccttccacggttcattgcgaccacctgatacaagcttatcggggggctgaacgcgatattgaaactgctacacaaaccaatcgggaggtgtacgattttctgcgtgatgtctcttcccgttatggcatcggtttctggaaaccgggagcgggtatcattcaccaggtagtacttgaaaattatgcttttccgggtgggatgatggtcggtacagactcacatactcccaatgcaggaggtctcggaatggtagctatcggtgtaggcggagccgatgctgtggatgtaatgacaggtatggagtgggaacttaagatgccaaaactgattggagtccgtttgacaggcgagttgaacggatggacagctccgaaagacgtgatactgaaactggcgggcatcttgaccgtgaagggtgggacgaatgccattatcgaatattttggcccgggtacagcttcgctatcggctacaggaaaggccaccatctgcaatatgggtgccgaagtgggggcaaccacttcactattcccgtatgatgaacggatggctgtttatctgaaagcaaccggacgtgaagaagtagctgcgatggctgacagtgtagctgccgacttgcgtgcagatgacgaagtgatggcacgaccggacgatttttatgaccgggttattgagataaacctttccgaactggaaccttatattaatggtccgtttactccggacgctgctactcctatttcagagtttgcagagaaagtggtaacaaacggttatccccggaagatggaagtggggttgataggatcttgtaccaactcttcttatcaggatatcagccgtgccgcttctgttgcccggcaggtgaatgaaaagaatctgggagtggcggcaccgctgattgtgaatccgggatccgaacagattcgtgctacggccgagcgtgacggcatgatggatgtgttcgaaaagatgggagctacgattatggctaatgcctgtggtccctgtatcggacagtggaaacgccatacggacgatccgacccgtaaaaattcgatagtgacttcctttaaccgtaattttgccaaacgtgccgacggtaatccgaatacttttgcttttgtggcttctcctgaaattgttttggcattgactattgccggagacctttgtttcaatccgctgaaagaccgtttggtgaatcatgacggtgaaaaggtgaaactcagtgaacctcaaggtgacgaacttccatcagccggatttgtagccggtaatcagggttatcaggctcccggcggtgagaaaaacgagatcagagtggctcccgattctcaacggttgcagttgttgactcctttccccgcgtgggatggcaatgattttctcaatatgccgctgcttatcaaagcacagggtaagtgtacgacagaccatatttcgatggcgggtccctggcttcggttccgggggcatctggagaatatatctgataatatgctgatgggagcggtgaatgctttcaatggcgaaacgaataaggtatggaatcgtttgaccaatacctatgaaactgtttcgggtacggctaaacagtataaggcggacggtatctcttccatcgttgtggccgaagaaaattacggtgaaggttccagtcgtgagcatgccgctatggaaccgcgtttccttcatgtaaaggtgatcctggctaagagttttgctcgtatccatgagactaatctgaaaaagcaaggtatgctggctgttacatttgcagacaaggccgattatgaccggattcgtgagcacgatttgatctcggtagtcggattgaaagagttttcacccggacgcaatctggaggtgatattgcaccacgaagatggtacggaagaacggtttgctgtacaacatacttacaatgaacaacagatcggctggttccgtgccggttctgctttgaatgcaaaatagccttcaggaggctttcagcggcccgcttttaggtttgaaaatcaataggacttaggtttaaaaccaacgggtctttagtttaaaaggtaaggagtgttggttctaaaccaacgaacctttacttcggaacacgattggaggagtatataaaaagataaatagatgagtaaaattaccaaacagcaaaatggagtattgtcagtgccggatgtaccgacaataccttttataacgggagatggagtaggagcggaaataactccggccatgcaggcgatagtagatgcggcggtagacatgtcgtatggtggtgcccggcgtatcgaatggaaagaagtactggccggtgaacgtgctttccgggctaccggttcgtggttgccggacgaaacgatggaggttttcaaggagtatctgataggcatcaaaggaccgttgactactccggtaggaggaggaatacgttcgttgaacgtggctttgcgccagacactcgatttatatgtctgcctgcgtccggtacgttggttccgcggagtggtgtctccggtcaaagagcccgaaaaggtgaatatgtacatctttcgtgagaatacggaagatatctatgccggtatcgaatgggaagcaggcactccggaagctaagaagttctaccggttcttgcacgaagagatgggagtcagtaaagtacgtttccccgaaacctcttcttttggtgtgaaaccggtttcgcgtgaggggacggagcgtctggtacgcgctgcctgccgttatgcgttgcagcatgaattgccctcggtcaccttggtgcacaaaggtaatatcatgaaattcacagaaggaggttttaagaagtgggggtacgaattggctgagcgggagtttgcagatgctcttgcctcaggtaaactggtgatcaaagactgtatagccgatgcctttttgcagaacactcttttgattcctgaagaatattcggtcattgccactctgaatctgaacggagactatatttccgaccaactggctgcgatggtaggtggcattggtattgcaccgggagccaatatcaattatgattccggacacgccatctttgaggccactcatgggacagcccccaatattgccggaaagaatgtggtgaatccctgttcactgatactttcggccgttatgatgcttgaatatataggctggcaagaacccgccgatcttatcgtcgaggcgcttgaagccagttttgccgaggggaaagccactaatgacctggcacgtttcatgcacaaaggccagccgctctctacttcggaatttacccgggaaatcattaaccgaattaaaaattaataccttcaggacatgaaaaaagaatatttgatttataaactctccgaggcaatgaaggattgtacccggattgataacgaattgtttccaaaatttgacgttaaacgggggcttcgcaatgaagacggtacaggtgtattggtcggattgaccaagattggtaatgtcgtaggatacgaacgaatccccggaggtggtctgaagccgatcccgggaaagttgttttaccgtggatatgacctggaagatttagcccacgccattttaaaagaaaaacgtttcggatttgaagaggtggcctacctgctgttatccggcagtttgcccgataaggaagaactggcttcgtttcgcgagctgatcaatgataatatgcctttggagcagaagaccaagatgaatatcattgaacttgaaggaaacaatattatgaatattctagcgcgcagcgtactcgagatgtatcgtttcgatcctaatccggatgatacttcacgtgacaacctaatgcgtcagagcatcgatctgatctcgaaattcccgaccattattgcttatgcttttaacatgttgcgtcatgccaccttcgggcgttcgttacacattcgtcatccgcaggagaatctgtcgattgccgaaaactttctctatatgctgaaacgcgattataccgagctggatgcgcgtacactcgaccttttgttggtgcttcaggcagagcacggaggaggtaacaactctacgtttactgtccgggtaacttcgtctaccggtacagatacatactcggccattgccgcaggcatcgggtcgctgaaaggcccgcttcacggaggagccaatattcaggtagccgatatgttccatcatttacaggaaaatattcaggactggaccaatgtagacgaaatcgatacttactttacccgtatgttgaataaggaggtttacaataagaccggattgatatatggcatcgggcatgccgtatataccatttccgatccgcgagctgtgttgctgaaggaacttgcacgtgacttggcacacgagaaaggtcgtgaacgggagtttgcttttcttgaacttttggaagaacgtgctatcgctactttcggtaagattaagaataatgggaaaacagtatccagcaacgttgatttttattccggttttgtttatgagatgattggcctgccgcaggaaatctatacccccttgtttgccatggcgcgtatcgtgggttggtgtgcccatcgcaacgaagagttgaattttgaaggtaaacgtatcattcgtccggcttataaaaatgtgttggaagaagaacaatatgtaccgttaaagaaacggtaaaagagaagcttgaagtcagaagttcaccacagatttacagattgcacagaccggcaccggcattgattgattatctgtcagttctatgtttgtaccgtctgccaatctgtggtagaacagacttttgtgatacgcttgctttattttcgtaaactatttgtccctttaaagtttttcttttaactttgtccttgtataaaatcttggatatgagtatagaaagctttaatctgcttcttttagtaatgggcctgatggctttggtcgtattcatagccctttattttgtcagggcgggatatggcatgtttcgcagccgttcctggggaatctcggtgaataataagatagcctggattctgatggaagctcctgtctttctggttatgggatggttgtggtggcattccgaccgacgttttttacctgtcgaactcactttctttctttttttccaactacattacttccaaagggcttttgtttttcctttcctgatgaaaggaaagagcaagatgccggtactcattcttttgatgggagtgatctttaatattctcaacggactgatgcagggagaatggatattctatcttgctccctcggactattatacacccggatggttgctgactccttgcttttggataggaactcttttattttttgccggaatggggatcaactggcattcggattcagtcatccgtcatctgcgtgctcccggagatacccgttattaccttcctcaaagaggcatgtatcggtatgtgacctctgccaattatttgggtgaaattgtagagtgggtaggttgggctattctcacttggtctttgtccggatgtatttttgcctggtggactgttgccaatcttgttccgagagcagatgctatctggcatcgctatcgggaagagtttgggacgcaggtcggatcgaagaaacgaatttttcctttcttatattaaaacacacagtacttatgaacacacattctgcttctaagcttttcacgccggttaccatcggaccgctcactttgcgtaaccgtaccatccgttcggcggcttttgaaggcatgtgcccgggaaatgctccttcccccatgttactcgattaccatcgttctgtggccgccggaggcgtgggaatgactaccattgcctatgcttcggtaacacgcagcggactgtcgtttccacggcaattgtggctccgtccggaaattattcccggtttgcgtgaagtgactgccgctattcatgccgaaggtgccgctgccagcatacagatagggcattgcggcaatatgtctcataagagtatttgcggagttaccccaatttctgcttcgtcaggtttcaatatttattcgcctacttgggtgcgggggatgaaacgcgaagagttgccggagatggcaaaagcttacgggagtgctgtctgcctggctcgcgaagccggttttgatgccgtcgaggtacatgcgggacacggctatctgatcagtcagtttctgtcgccttataccaatcaccggaaagatgaatacggaggatcgttggagaataggatgcgtttcatgacgatggtgatgaacgaggtgatgaaggcggccggtaaggatctggcagtatttgtgaagatgaatatgcgtgatggctttcggggcggaatggaaatagaagagacgctcgaggtagccaggcgactcgaatctttgggggctcatgcgttggttttgagcggaggatttgtcagtaaagcccctatgtacgtcatgcgtggggccatgcctatcaagaccctgacacattatatggattgttggtggttgaagttcggcgtcaaattggcggggaggatgatgataccgactgttcctttcaaagaagcctattttctggaagatgctctgaagtttcgttcggaaattaaaattcctttgatctatgtcggcggacttgtttcccgtgagaaaatagatgaagtgctgaacgaagggttcgaagccgtgcagatggcacgtgctttactcaacgaaccggggtttgtcaatcggatgcgtcgggaagagaaagcacgctgtaattgcggtcatagtaattattgcattgggaggatgtacacgatcgaaatggcttgccatcagcatctgacagaagaacttcctctttgcctgaaaaaagaaatagaacagttggagaataaatgatggaacgtaaacttgctgttattaccggtgccgacggcgggatgggaacggagattacccgtgccgtggcttgtgcggggtatgatgtaattatggcctgctattcatcgtcaaaagctgaaaccaaatgccgggagttggtgaaagaaacgggaaatgaaaagatagaggtatggcagatcgaccttgcttcactggcttcggtgagggcttttgccgaccggatgttacggcaaaagactcctgtcgctttgttgatgaataacgccgggaccatggaaaccggattgcacattacggaagatggtttagagcggacggtcagtgtaaattatgtaggtccttatcttttgacgcgtcttttgcttcccttgatgggagagggaacccgcattgtcaatatggtgtcttgtacctatgcaatcggtaaactggatttcccggatttttttctttgggggagaaagggaagtttctggcgtattcctatctatagcaataccaagcttgctttgttgctttttaccattgaactggctgaacgtcttcgggcacgcgggattactgtcaatgcggccgatccgggcattgtgtctaccaatatcatacggatggaccagtggttcgatccgctgacagacatttttttccgtccttttatacgtactcccctccagggagcagctactgcaatcggattattgctcgatgcggaagtggagggacggacggcaacgtttaatttgaataatcattgtcgtcttctaccggaaaaatatacccgtcctgaccgaagggcacagctatgggaagagacggaacggattttgtcggaaaagggcttcttgccgataaatgataaacggtgaaccataaacatgtatgtttaccgtccaccgtttatcttattactgttgtactgctatcaaatagacagttctctcaatacattgacgagatctctcttgacaggtttatcattcttgatggctttactgaacggaacgtatacaatctcgtcgtgttcaatgccaatcatgacatttcgttgatcttccataatagcgtcgatagcggctgcgcctagacggctggccaaaatacggtcgtgtgccgtcggactacccccgcgctgcaagtgccctaaaatggtgacacggacgtcgtattgagggtattcgtttttcacgcgttcggcataatgcatagctcctccggtgagttcgctttcggctaccagtacgatactgctgttctttgatttacggaaaccgctctttataaattcttccaattggtcgacttctgtactgaattcggggatgatggcagcttctgctccggaagcaatcgcaccgttcaatgccaggaaaccggcatcacgtcccatcacttcaacgaagaacagacgttcgtgagaagtggccgtgtcacggattttgtcgacagcatccaaaatagtgttcagcgccgtatcgtatccgatggtcgtgtcggtgccgtaaaggtcattgtcgatggttcccggaagtccgatgcatggaatgtcatactcttgtgcaaagatgcgtgctccggtcagcgaaccgtcgccaccgatcactacaagggcatcgattccttctttcaccatattgtcgtatgccattttacgtccttcgggagttgtaaactctttgcaacgtgctgtcttcaggatcgttcctcccagttgaatgatgttacttacattctggctcttaaactccttgatctctcctgtcaccaagcctctgtatcctctatatataccttttacttgcagtccgttgtagattgctgcacgcgttactgcacgaatagcagcgttcattcccggtgcatcaccaccggaagttaaaataccaacacacttaactgttcccataacaatcatgttttttaattgacgttgcaaagataacaaaaaggagtgccctgtatgattaaataacgttaattcattgtcttttaatctgtgcctttatagcttcagagatttcttccatcagccatttaggagtcgatgtagccccgcatacaccgatagaattgacacagggtagtaaagagtcgtcaatttcgtcggcactgtctatcaaatgtgaattcgggttgacttttttgcattcttcgaataacattttgccatttgaactttttttaccactgacgaagaagatcaaatcgtgtgatgcggcaaactttcgcaggttgggcatacggttggccacttggcggcaaatggtatcgtagtactcaaaagttacgtcgggagagatgtgctccttgatatattccacgatttcccagaattcatccagtgatttggttgtctgcgagtacaggcgtatgcttttgctgaaatccagccggcgagcctcgtcgagcttttctatcacaatagctttgccggttgtctgccctaccaaacctaagacttccgcatgtccgttctttccgtaaattacgatttgtttttcgtcgaggtcctcctgcatatactcttgtttgattcgtttttgcaggcggagtaccaccggacacgtggcatcgatgatttcgatattattttctttggcaatgatataggtttcgggtggttcgccatgggcacgcaaaagcactttggcgttatggagttgtttgaactcttcatgattgatggtaatcagccccatctctttcaggcgttccacttcacggctgttgtgtacaatgtctcccaggcaatagagtgttaccccttttgcgagttcctcctcggctttgtggatagctgtgaccactccaaagcaaaaaccggaaccttcatctatttctacttttaccataatgattacaaatgtatgattaagaaagggtgtagccatactgaccggatggctacaccctttctttaggatggctacaccctaacaggcggatggttacacccttttgtttttatgcttttatcgctttctgatattctgccatcagccactctttttgctcggcgatggtgagatggctgttgtctaatagcaaagcatcgtcggctttcttcaatgggctgacttcacgtgtctgatcgatgtggtcacgttgcttcacattttccagtatctcttcgaagccggtttcctgacccttggctttcagttcgtcatagcggcgttgggcacgaatttcggcggaggcggttacgaatatttttaattctgcatccgggaatacggtcgtcccgatgtcacgaccatccataacaatacccttggcttttcccatttcctgttgctgagccaccatcgcttcccggacaaaaccgagtgcactgatcgggcttactttagaagaaacctccattgtgcggattttgttctctacattcactccatttaagtaagtgttggggcgtcctgtctccggatcgatccggaaagagatgtggatgtcgccgatacgtcgttttaattcatccgtatcgattgtatcaccgtgaaagatgccattttctatactatataatgtaacggcacgatacatcgctccactgtcgatgtagatgtatcctatttctttggctaaatctttagccatggtgcttttcccgcacgaggaaaagccatcaattgcaattgttatctttttcattatgttatgcagcaggtttactcccttttttaacgtattatctaaattttttcgccaaatatactgtatttttaaaatatctgcgttatatttgtgccacaaaagcaataacagcttaaaaaccagaagaacaccaatttttatatattaattttatggaagtaaaaaaatcgcccaaagcagacctcgaaggtaagaaaacccagtggctgctgatcggttacgtggtggtgctcgcctttatattcgttgcgttcgaatggacggagcgtgatataaagatcgatacaagccaggcggtagcccagattgagtttgaagaggaaatgattcctatcacacaacaggaagaaaaaccggccccacctcctgtcgaggttcccaaacaggctgaaatcctgaagattgttgatgacgaggctgatgtacaagaaacagccattgcttcaacagaggataccggacagaaagtggaagtaaaatatgtaccggttgaggtaaaagaagaagaaccctcggaacaagagatttttgaagtagtagaaaatgcacctgaattcccgggtggtatgcctgcttgtctccagttcctgtacaagaatatcaaatatccgccgatcgctcaggaaaacggtactcagggacaggttgtcctccagttcgttgttgaacgtgacggtagcataggtgatattaaagttgtaaagagcgttgacccctaccttgataaagaagctcttcgtgtggttaagaccatgcctaagtggaagccgggtatgcagagaggtaaaccggttcgttgtcggtttacattacctgtacgattcagactgcaataatcattgtatagtataagaagagaggctgccgtccaagcagcctcttttcattcaatctctctttttataatttatttattatgtatacagcatttcagcttctcgataagatcaattctcacatttcagatatccggtttacacgtactccggcaggtttgtatgaccctattaaatatgttctttccatgggagggaaacgtattcggccggttcttatgctaatggcatacaacctctacaaggaggatgtgtcctctatttatgaccctgctacggctattgaagtttatcataactatactcttttgcatgacgatttgatggatcgggctgatatgcgccgcggcaagacaactgtccataaagtatggaatgacaatactgcgattttgtcaggagacgctatgctggtgctggcctatcagtatatggctgccagttcatctgaacacctcaaagaagtgatggatttgttcagcctgacagcacttgaaatttgtgaggggcagcaaatggatatgaattttgagtcccgtgaggatgtaaaggaagaggagtatctggaaatgatccgtttgaaaacggcggttttgttggctgccagtttgaaaatcggagctattttaggtggagcttctcctgaggatgccgaaaatctgtatgattttggcatgcagatcggagtagccttccaattgcaggatgatttgctggatgtatatggtgatcctgctgtgtttggtaaaaacatcggtggagacattctatgcaataaaaagacgtatatgctgattaaagcactggaacgtgccgaccgggatcagttggagggattaaatcattggttgagtacaacttcattctgtcccgaagaaaaaatcagtgctgtgaccgaattgtacactcagattggcatcaaggctgtttgcgaaaacaagatgcgtgagtattacactcgtgcgatgacaagcctgggcgccgtgtctgtcattgaggataagaagagtgagctgaaaaagttgatgaagcatttaatgtaccgcgagatgtaatatcgagatgccctatagacgtttgccaaatacagatcaagccaggatacgggcgctgaaaacagcggtcgtgaagggcgatatgtgtgatgtctatgatttgcctgtttcactcaagacattgggagaagcccgtatatttctgtctaaatttgaaacggcgcattcttattatgtacactgttacggagagcaaagcaggaacagtaagaaacaccaggcgaatgtaaaaacggcccggctttatatttctcacttcatacaagtcttgaatttggctgtgattcgtatggaaatcaaagaatctcataaggctttgtatggcttgcccgtagataatttcagtgtacccgatttaagtagtgaagcgtctctggccgagtggggacaaaaaattatagaaggggagcggaaacgcacctctcaaggcggtattccgatttataaccccacgattgctaaagtgaaagtgcattatgatatattcatggaaggatatgaaaaacagaaaagccttcagtctctcaccaatcgtagtttagagcaacttgcatccatgcgtgtgcaagccgaccggttgattctggatatctggaatcaggtggaagccaaattccaggatgtatcgcccaatgagaaacgcttggaaaaatgtcgtgattatggtctgatttattattatcggaccggagaaaaatagaataaggagattctttaaaatatgcttgtcgattcacattcccatctttttctggaagagtttgccgaagatttacctttcgttatggaacgtgcccgtgctgccggtgtgacgcatatctttatgcctaacatagatagtacgacgattgaacccatgctgtcggtttgtgatacctatcgggacttttgctttccgatgatcggattgcaccctacctccgtgaacgagtcctatgaaaaagagcttgaaatcgttgccgcaaatctggaaacttccggccggttcgttgctgtgggcgagattggaatcgatctttactgggataaaacctggctgaaagaacagttgattgcttttgaaaaacaagtgcaatgggcccttcattatcaattgcccatagtgattcattgccgcgaagctttcgattatatatataaggtattgcaaccttataaaaatagtgaactgaccggaatctttcatagttttacgggaactcctggtgaagctgcccggatgatggagtttccgggatttaagatcggtataaacggtgtggtgactttcaaaaagtcaacgttgccggagacattgaagtctgttccgttggaacgtatcgtattggaaaccgattcgccttacctcactccggttcctaatcgtggaaagagaaatgagagtgcgaatgtgaaagatacattaataaaagttgccgaaatatataacgaagatccggaaaaagttgcggaattgaccgctgttagcgcattaaaagtgtttggaatgctcaaataagctccacaagattttaaattttattaatttagttgatttattaaagataaaagaaggataatgctgcagaagaagaaaaaaaagaatacatttgtagctgaaaacgcttgtggttcgcattttttttgtaatttgcacccgatttgaagaaagcgccaattggagagatgctcgagtggttgaagaggcacgcctggaaagcgtgtatacgccaaaagtgtatcgcgggttcgaatcccgctctctccgcaggaagtataaacaagagacgataagtaaatacaataataataatttaattaattaatcttaaaaattagacacacaatgaaaaagttatttgcaattgttgctgtgatgggagtcttaacatttggctcaactcaactcgttcaggctcaggatgctgctgctaccgaacaagctgctcctgcagcagacaaaccggttgctgatgctgtagctgaggctgctgaagcttctgctcctcttgcaggcgctgaagaaggtggtatccacaaagaaattaaagtaaaattcatcgaaggtactgcatctttcatgagtttggttgctatcgcattggttattggtttggctttctgtattgaacgtatcatttacttgagcttggctgaaatcaacactaagaaatttatgtcttctatcgaagcagctctggaaaaaggtgatgttgaagctgcaaaagacatcgctcgtaacacaagaggtcctgttgcttctatctactatcagggtttgatgagaatcgaccagggtatcgatgttgttgaaaaatcagtagtatcttatggtggtgttcaggcaggttaccttgaaaaaggatgttcttggatcacactgtttatcgcaatggctccgtcattaggattcttgggtactgtagtaggtatggttatggcgttcgataagattcagcagcagggtgatatctctccgacagttgttgccggtggtatgaaggttgccttgattactactatcttcggtttggttgtagctttgatccttcaggtattctataactacatccttgctaaaatcgaagctcttacaagcgaaatggaagattcttctatctctttgcttgacatggtaatcaaatataacttgaaatacaaaaaataatctgagatgagtaagttaacatataaagtatcgtattacgtactgtacgcgatgtttgctcttatcgtgatcgtattgggcttgttctacttcggtggacaaatggaaactccaattgtatacgacatggataatcccgcaaacacagatgccttgctgtacttgatgtatggtctgtttggcattgctgtagttgcaactgtggttgctgctatcttccagttcggttctgctttgaaagataaccctaaaggtgctatcagatcattgctcggacttattcttctggttcttgtattggtcgtagcatggtctatgggtagtggtgaaacactgaccattcaaggatatgagggaacggataatgttcctttctggttaaaactgactgatatgttcctttatagtatctatttcttaatgttggtaacagttcttgctatcatcggaagtagtatcaaaaagaaattatcataactaattgaggaaactcaataaaatacagtaactacaatggcaaaaggaaatagaaaagttcctgagattaattcaagttcaacagcggatattgctttcttattgcttatcttcttcttgattacgacatctatggatactgaccgtggtctggcaagacagttgcccccacctcctgaaaaggatcaggttgataatgacgtagttgttaaggaccgtaacgttttgcagatttttctgaactttcagaatcagctgatgtgcggtggcgaaattgttgatgtgaagcaattgagagaaaaagccaaagagttcattgccaatccatataacgatgaaaaattaccggaaaaacacgctaaagatgtgcctttctttggtaatgtcatggttacggagaatcatgtaatctctttgcagagtgaccgtggatcttcttatcaggcctattttgatgttcagaatgagctggttgctgcttataacgagttaagagatgaattggctcaggaaaagtggcagaagaattatgctgatttaaatgaagatcagcagaaggctattcgtgatatttttcctcagaagatatctgaggctgaacctaaaggagtaaaaaagaataattaatgggaaaatttaataaaacaggtaagcgcgggatgcctacgctgaatacttcttcactgcctgacttgatctttacattgttgttcttctttatgattgtaacaacaatgcgtgaagtttcattgaaggttgagtttaagattccgcaaggtactgagttggaaaagcttgaaaagaaatctttggttacgtttatctacgtaggtaaaccgacagcagaatttcgtaaaaaactggggtctgaaagccgtatccagttgaatgatgcttatgctgaagttgacgagattcaggcttacgtgactaacgagcgctcaagtatgaaagaggaagaccaaccctttatgactgtgtctttgaaaattgaccaggatactaagatgggtatcgttaccgatattaaacaggctcttcgtcaagcttatgcactgaaaattaactattctgcgagagctcgcgaataagttgactctacacatagaaaaagccgtctgaggataatcagacggcttttttttatgggtttgtttgggggctgcagaggttctcgtagtgctgtgttattcgtagggactataccattcgtaaagctatgtatttataggaactatattattcgtagagccatgtatttgtagaatcatctcattcgtaggctttattcagagttgtgtatacaatatctgtatggattcagaggaagagcggtttactgttcttggtgcgattggattacgcaggggaggattattgccaggtggtggattgaaatgatggatagccggaataaggaaagtggaggcattgtagaggcgaatgaacagtaaataatataggagtagtgatcagacttacggtcttaggggctaaagttcaatacacctgttgaccggttggaagttggttctctaattctgtttggctggcgtgcaagacgatagttccatcactactcctatattaagttcaggttatttacctgtgtaaaactctatgatccgttggatggctctttggcaaaccggacagaaggtaggatattcgttggtacgcatgcggcagtcgaatgccgggcgataaatacctttggctgagtagcctcctccttcgtatacgcctatgggatatttggccttatctgctaccggagtcggaacaggagtagctttggtgagcatatcttcccatttagaggcaaagttgatgcgggtggtaatgttctgctcccatggttcaatgttgagaggatagagtccgttcatgacgtcttcatcataaaaatattcgtcggccaagccaccaaaactatgaccgaactcatgtaccactaccggacggaaattgggatggtgtgcggtggtcagtgtgaaagcattgtagatgccgcccccaccgtattgttccgtattggctaagataatgatatgttcataagggatgcctgccaatgcgtcgtttattgcttttacccggctggtagtcagatagcggtcggaatagaatgtatcgaagtgggagccgaaggccgtgtgcttccatgctccctgtttgggagcgctgaccccactgtctgccgaaggactggccacagccacgatgttgaagcgattcttcatcgactgaaacggttcgtgtgagaacagggcttcgcatgcgatggcggcatctttatagaaagtttccatttcatttgtggtatacccttctgccaggatggctacatcgatacattgttcttcatttccacttttcagcagatacttgtgcggagtgatgtgtgtgagcccttttttgtgtatcagaatgtcgtcgggcttaacgacgtgcttcaggttggcactgacttcgcgtttgttattgcgtaatgtgatttctacctcggccggttttatgggataggggaggagataagtattctcaaatcctttggtgacctctttggcttcatctgtctcgagccattcctggaagagcgaagaaaacgaagtcgtataaattacttttccacttgccacatcgcgcatcacaatctgtccgtttccttccaaaggcaattccggcagatgatggcgcctgcctgcccatacgggcagttccgaaagttcgtcaagacagatcgactgcttgtccgcattccccgtaaatagataatcgatgcgtagggttttgttcgtgaagtagtccgagaaattttgtgcgtatgcacatcctgtcacgaaaagacaggtgaatagggttaatatcagcttcatatcgtgtgaatttattgtttttacaaaggtactaactattgccgatttattctatttctacaaataaaagtaataaactatagtatttattgccggggaaatagctaactttgcataagacattgatatattaaaacaaattgatttaaaatgggacatcatcaattagatactttagacgagcagattctgaagttgattgccgacaacgcccgcattccgtttctggaagtggcaagagcgtgcaatgtttcgggtgcggctattcatcaacgcatacagaagttgactaatctgggtatattgaaaggttcggagtatgtcatcgacccggagaagatcgggtacgagacatgtgcttatattgggatttatctgaaagatcctgagtcgtttgattctgtaaccaaggctttggaagcaataccggaagtggtggaatgtcatttcactaccgggaaatatgatatgtttatcaagatatacgcaaggaacaatcaccatcttttgagtgtgattcatgataaactccagccgttgggattggctcgcaccgagacgctgatttcattccatgaagccatcaagcggcagatgccgattatggtagatacggacgaggattaatcgattccccgtacgtaatctacaaaagcatacgagcagagatgtttttcatcggcaggatgaacttctctgcttttttcgtgccatatagttgtgtctacagccgggaagaaggcatcggcttccggcgctgtatcatttacttcggtcaggcacagctcgtcggccagggatatggtctggcgatagacgcttgcccctccgatgatgtatactttttcttcggcttggcagctttccaaagcggcttccagcgaagtgaatacttctgctcccggacattcggctgccggattggaagaaaggaccacattccggcgattgggtaatgcccctttcgggagtgattcgaacgttttgcgtcccatgatgattgtgtttcctgtggtcaacgccttgaaacgtttcaggtcattgggcagcctgaataaaagtttattttgaaagccgatagccatccggctgtctacggcggcgataatgctgattctactcatagtccgatgggggattataccgcaacttttccggcgatgtgcgggtgcggatcataatttactaattcaaagtcctcgaattggaagtcgaagatgtttttcacgtccggattgatcttcatttgtggtagtgggcgcggttcccggctgagctggagtttcacctgttccaggtggttcaggtagatatgtgcgtcgcccagtgtgtggataaagtctcctgcctgcagaccggtgacttgcgccatcatctgtagcagcaatgcataagatgctatattgaaaggtacccccaggaagatatcggcgctgcgttgataaagttgcaggctcagccgtccgtttgctacgtaaaactggaagaatgcgtggcaaggagggaggttcatgtgatccaggtctcctacattccatgcactgacaatgatgcggcgtgaatcgggattgtgcttgatggcatctacagcttcgctgatctggtcgataaatcctccgtcgtaggttggccacgaacgccactggtatccatatacatgtcccagatctcctgtttcgtccgcccattcgttccagatgcgtacgccgtggtcctgcagatatttcacattcgtgtctcctttgaggaaccacagtagttcgtaaatgattgatttcagatgaagtttcttggtagtcaggcaagggaatccctcgtccaggttgaaacgcatctggtgtccgaagacactgatggttcccgttccggtgcggtcacctttttctattccctccgtcaacactcggtcgagcaggtctaaatattgtttcatacgaatggtatacttcttgggttattaaaaattcctgccaaagttacaaaaacagcctgaataacttacaggaatggtgtgaataagttcgcaaaccagcacttaaacttcttccaggctgatttttgtttccacatttccggggtcaggcgggtgcagtgcagcatgtcggcttcgaaaacgtcattcagttgctgcgtaatgtccttgtcgaagatgaacgcattcgtttcgtaatcatatcgcaggctgcggctgttcaggttggctgtacccacggtacagaacaggtcgtccaccatcatgattttcgagtgatgaaatccgccgttgtacaaatagatcattgccccttttttcatcagtttctgtacggcatagagcgaagcatccggtgtgaaagggatgtcggatttggaagaaatcataatttccactttcgtcccccggttcaaagcccttttgagtgccttgcggatggatgaagtcggtacaaaatacgggttcacgatgcgtacatcatgttgcgctgcatagatggacatggcatacgtatggctcaacatgcgggaattccgtttcggggtgcggtctacaatcgaaatgaccgtattgcagctgtcggcccgcttcgggtggttcggaaaatattcttcgcccacgatgttttgcttggtggttttattccagatgtcgaggaagatttcttgaaggatgtttaccgcatcgccttcaatgcggatatgcatatcgcgccaggtgcctatcttggggagtccgttgatataatagtcggcaatattcattccgccggtatatcctattttgccgtcgatgactgcaatcttccgatggtcgcggtgagccgcatgattgatatacgggaacttgaacggatcgaattttacgatttcgattcctttctcccggattgctttcagatgtcttttcttgagtggtttgttgttcgaccagttaccgaatgcatcgaacatcgcccttactttgacaccttccttcactttttcgcccagcaggtcgaacagtgcattggctatggagtcattgcgaaaattaaaatattccagatgaatgtggtgttttgccccacggatggcttcgaacaagtcctcaaatttttcccgtccgcttttgataagtttcaccttattattatcggttatggggatattcgagtattccagaaattgtaacacgagggagtcgctttggatgaattgtgtggtgtcctcccgctgcatcaacaggctgtcaatattctgtgttcgggcagtgcctatagagagaatgatcgctattattaaaacgtataatttcaaaacctcagtctttatttagtttacaaggaaacaaagatacaacatctctgttcttgccttctttttgtcaagagcagatttagtatagattaacaatttggcacttctttggaaaagaataggagtaacttccgatatcatcaggagataatcatttatctcctgatgatatcgggtcgaagaaccgggcttcggaggtgaatgattactgcttttagcgaaaactcaccgtcttccgccccccaagataccgtctattctctccggacacaccgtctgccggaagacttgccgatgataccataaaaaaaagggagaagctgaaacttctcccttttacctcatattaaattgaatatattgtatgtatcttgtttacaaagatagtacatcccgagtccgaaagcaagtttttcgtctgtttttcgggcagttatattgaatatcctgcattactttcgtatgatctctgcgtgttatgccatcgaccatgccttgcgcgctccgaagaaggcaagtaccagggcggcgatatacagggacttcgggtcgaatcctgttgtggcactttgctggaccatcgagacaaatacttcgcgcagtgtactgatggtggcttgcagacctcccaaagtgaagaacaaaatgacgcatactactgcgcaggctgctccccatgcctgaaccagccggtggttccgtcccgggaggttacgcatgacgcggcggctgaatccgttgtcttctatttcctgtttttgctcgccgaagaattgcttcaggagtttatcatctgtttccgtcataaccgttttgttttaagtaaatagctaatttatctttagcccttgaaaggtgcgatttgaccgttcctaccgggcaccccgttattcccgcaatcttgtctatacttacgtcttccatatagaacagagtgatgcaggtgcgttctatttctttcagcgttctgagtgattggtaaacatccatctgttcacccacgtttacttgttcggtactattggcagcgtctacttcgcgggcatccaggtctgttgtttcctttcggctgcgaatataatcataaaatacgttataagcaattctgtaaagccatgttgagaaacttgagagatttttaaagtttgcaatgtttgtgtaggcttttataaacgtatcttgtgccaagtcgtcgctcagttcgctgtcgccgcaggtcaggttcagaaagaagcgccgtacaggcgactgatatttctgtaccaattggtcgaaggccctggtgtttctgaacaccacgacctgtgcgactaacgatatatcattgagctggctcattatttttgttcattcaaagtttcgtctttgtgtgtagggcgtgtgaaagggtcttccggccgttcatgctgttgattgcgtgagatgatccactgtccgattccggtgaacatcaccagcaatccgatgcatcctatgctgaattcgtctgtgatggcccagaggaagatgaacagtccgattccggtacagatgttcttgatacctttcgtccggtagtcctgcggcagagtgtctttgaagataccttccggcagaggttgtccggttgccagtgcctgttccatcagtctgtactttgctttccggtttttataccggaagtagaaggcgatgaatacgataaagaaggggaatccgaatatcagtatgataactaccaatcctgtcagtatgcctccgttaatggcccctttgtctatgttgaacggaaattcattgccgaagtcgaaactgctgctttggtagtcggtgtcaaccgtactgctgtccactatgtcagtgtattcggtcacgatggtggagtcggaagagttcttgttgtcttgggtgatggttgggttctgtgccattgccagcgaacagaaagttacggctaccatcaaagcgataatgatacgtttcatattactgttgttttttaattgtttttgtttatttgtctgttagacgtagttcatgccacagaaagttgcaaagagacgaaatatttttgatatttgcaggtattaatacacaaaagtgatggaactacagatcatacagagcaagatttacgggatacggggacagaaagtgatgttggactttgatttggccggattatatcaggtggaaacccgtgttctgaatcaggctgtaaagaggaacagcaaacaatttcctacggatcttatgttccagttgaatacggaagaatgggaaatcttgaagtcacaaattgtgatatcaagttggggaggtacccgtaaacttccctttgcctttaccgaacaaggactggccatgctctccggagtattaaacagtgatcgccatcgaagtgaatatttccattatgcgagcttttgtagctgtccgccaattggtctcggctcttccggtgaatgacatcaccaggctgcaagatgaaataaaagagttaaaagaatatgtagaagcggcatttgccgattacaatgatattaatgaagatacgaggatgcaacttgaattaattaatcaggcaattgctgaattgcaggccaaagacaaacaggcaggcggaaaaactcgtaatccgatcggttttatatcttataataaggaaaaatgaaattacctatatcatttatcgaatcgacccgtgcgttgatgggagatgaagagtatcaagaattgtctgttgccttggagcaagaacctcctgccagtgtccggctgaacagtaagtttcccggtttagctgcctgttcatccatctcaggacgtattccctgggcggcagaaggctattatctgaaccaacgcctgacgtttacgttcgatcccctttttcatgccggatgttattacgtgcaggaagcctcgtcgatgtttgtggaacaggtgctccgccgttacgttacaacccctgtcaagatgctcgatctctgtgccgctcctggtggaaagtcgacccatgcccgcagtgtattgcccgaaggcagtctgctggtagccaatgaggtgattcgcaaccgttcgcagatactggcggaaaatctgacgaaatggggatatgccgatgttgtggttaccaataacgatccttctgatttttcccggatcggttcttttttcgatgtcatactgacggatgtgccttgttcgggcgagggaatgttccgtaaagatcccggtgccatagaagagtggagtcccgagaatgtagagatttgctggcagcgccaacgcaggattatcactgacatctggccttgcctgaagccgggaggaatcctgatatacagtacttgtacctataatacgcgcgaagacgaagagaatattacctggatcaggcaggagttcggtgctgagccgttaccgcttgccgttcccacggagtggaacattaccggtagcttgcttgtcggggtcgatgcacctgtctatcgtttcttgcctcataagactcagggagaaggtttctttctcgccgctcttcgtaagccggaagaagacagggaggcggatacagatcttttttctccgaagaaaaagaaatcgaagggggacactgctgcttcacctgtatctaaagaaaatctggctattgccaaaagttggttggcgtcttccgacgaatataatctattggtgaacggcactgcgattactgcttttccggtgtactaccaaaatgacctggcactgcttcgtcagtctctccgcatcgtccaggccggtacggaagtggctgaagtaaaaggcaaagatctgattcccgcacatggacttgctatgagtcgtctgttgaaaacgtcggtttttccaaccgaagcattgacttacgaacaagccatcgcctatctgcggaaagaggctatcgtccttccgccttctgttcccaaaggttatgtactggtcacttataaagagattcctttgggatttgtgaagaacatcggcaatcgcgccaacaatctttatccgcaggagtggcgtatccgaagcggatatctgcctgatgacatacgaactctgtgacagttaatttattattcacacaaacaaacttacttatgaaaacaaacttctgtcgttttttaattgggttggttgcctttgttgtcggcatcccggttatggcccagacgggaccggataaggtgaagcctttcagccatttatccgtttcgctgaatgccggaacactggggggaggactccaggttgctgctccgttgaatgactatctgggacttcgtgccggattctctttactgaagttcaagtgtaattacgattatgacggaattcgtgatgatcagttgattcaggatgccggtactcgtaccggttacaatccggataaatattataccgttcctctgaaagcaaaagcaaatatgacaaacggcatgcttttgctcgactattttccattcaagagatccgtctttcatgtgaccgccggactgctgttcggtacttcatccatcctgaaagtatcgggacagacagacgaacggatagaggtgggagatatcattatcgagccgggagcggacggacgtgtggaagcagctttgaagaccaatgccgtgaaaccttatgtaggtattggattcggacgttcggtagctcattcacgcgtagggttcaagttcgaattgggagctatgttccatggtaatccgaagattgaagccactaccggaaagattgtggaagaggcgatcgatcaggacctgagccgtttcaataagttcctgaaaaactttaaagcttatcctgtgcttaacttccagttatcataccggatattttaaattcgtgcccgttccgtgacggagcggctgacagacacaaacttaattctcaaaataaaacacaaatgattagaacaatgattgcgtcatgcctgttggcatgcagcgggttcgtatccgcacaaatgacgggtggaaatcccgaagaggtgaaacaaactgctccggctcctctttacagagatcctgtttatgacggagtggccgatccggtcgtagtctggaataaagaagaccgcagttggtggatgctgtatacacagcgccgggccaatgtgaatgccgggaatgtagcttattgctatggaaatgatatcggtatcgcttccagccgtgaccatggcaggacgtgggtttatcgtggagtactcgacctcaatatggagagaggaaagaacactttctgggctccggaggtggtaaacttcaatggggtatatcatttgttcgtatcttatatcgagggggtacgaaccgattggggcggacatgcgcgcatggctcactatacaagtaagaacatgtgggactggaaatttgaaggctttgtgaagctgtcatccgataaaacgatcgatgcgactttcttccggatgcccgatggaaaatggcgtgcctggtataaagatgaaacccgtaatgcggctatcatgacggcagaaagtgatgatctgttccactggacgctgaatgatacaccggtgattgaccagagtcgccaggaagggcctaaggtattccgtttcggaggttattactggatgcttaccgacgaatggcacggcatgcgtgtgtatcgttcaaaagatgccaccacatgggagaagcagggagtgattctagataaacccggtacccgtcccgaagatacgccgagcggtgcgcatggtgatgtggttgtggtaggagataaggcttatgttatctattttacccatcccgggcgtaaggcacattccgaagagaccaaagatgaagatggtaacatcccttatcatttgcgccgttcatcggcacaggtggcagaattgttgataaaggacgggcagttggtggcagaccgttcgcctgagtttaatttctatttgcccgatatggaggaataactaacaatgaacgggcaggagctataaccgggtgtgccataattcaccacagattacccagattaacacagaatgaaattaatcaacagataatcagagatatttatctgtgttaatccgtgtaatctgtggtgaatacaatttttggcacattcctccttctctacagtttattcttatatatctttgccattgccttctggtactgattctccagttgcagatagttctgtttgctctgatagactaccgatacttctacaaagtattctatcatactgatttgtccgcccgtcaatgcttgtttcagcagggataagtcctgttgcgcctgaaaagtcttctcgtattcttccattgaagtgcgcaaagtatgggcttcacgatagagctgggtcagttccgattctacctgtaccgaagtattagccctttgcaggtcgacattgagcgactgggctttagctatctttactttattgcgattctcgaatagtgggaacgagaaccctactacaactccgttgaacggctcgcccgattcagtgttacgacggtaacccagttccagcttgggtagccattgcgacttgttgaccgcaatctgtttgcgggcagcggcactttcgctgttgagtgcctggagggtatagtccgatgccaggacttcagttttcagttcttcgtagttggaagggaagatgacagccggatagtcagcatcttcaaacacgaccggtatgtttccgttcagtgcagtcagttcctgaatcttattgcgtaaagcagtttcgtttagtgacgcttctgtcttcacgttcagcaattccagattgatcttattggtttcgattacattggcgtctcctgtttgcaaacgcttggcgtacatggctgagagctcttcggcgtttcgcagccgttcggtcagtatctgctgttgctttcgcagcatgatgatatccaggcacacatcttttgcctgtagcaggatgccctgacggaatacactcttctgcccgtcaaaagcaccggctttcagccggttcagttgattgcgggtagcatacaggctcggaaaatcaaagctctgggagactacaagttctccgatcgtattattcttgtctttattattccacaaatgggcatacgaaagagtcggatcaggcagattgttgtctgtccgggtttccagtttttgagaggcaatcaattgcgcattggcttgcaactctttattattggtttcaatgttgcgcagcaccccgtctataccggtttgcgcttgcagtccggatagcgcgaagagggtagcggcaagtatggttattcgtttcatataattattgaagttcttattattttctttttccgttcatcatcaggtaaacaatcgggataatgaatccgttcaggaaagtcgatgtgagcagaccgcccagaatcacttttgccatcggactctgaatctcgttaccgggcaggcttccgctcaatgccagcggtatcagtgccaaggcagacgaaagggctgtcataacaatcgggttcagacggtcgagtgatccgcggattacgctttcgtatactcccaaaccttctacctgttgcaggtggttgtaatggctgataagcaacataccgttacgggtagcgataccaaacaacgaaatgaaaccgatgatggccggaatactgatttcgccggttgtgatcagcagggcaaacacaccgccgatcagtgccagcggcaggtttatcaggataactgccgattccttcatgctgcggaattcatgatacagcagcaggaagatcactacgatggacatgaaggaggtcagtgccaatgtacggctggctgcctgttcgctttcaaactgaccaccatattcgatatgataaccttcggggagcttgatttgttcgtccacttgcttttggatgtcattgaccacactccgcaagtcgcggtcggctacattggcggaaatcacgatcttacgttttacgttttcgcgattgatggtattcggccccatggacgaggctacgtcggcaatataactcaggggcacttttttaccgtcttgggtgtcgaccatcaggttgcgtatcttttcggcttcgtcacggaagttattctttactttcacaatcaggtcgaaactcttaccctgttcgtaaacctgcgaaatcacctctccggccagtgccacattgatgtattccgaaaattccggcagggtaatgccgtatttagccaacatttcacgtttgggagtgattttgagctgcgggcgttcaatctgttgttccacattcaggtcggcaatgccggggatattgccgatggcttcttttatctgattgcccagtgagaacattttattcaggtcgtcaccaaacagtttgatggcgatattggctttggtaccgctgagcatagcatcgatacggtggctgatcggttgtccgatctcgatgtttgctccggtgatagtacccagtttttcgcgtacgtctgccatcagttcgttgcgcgaacgatctttcagttcaaacggtgcctctatttccgagacgttgactcccaaagcatgctcgtccagttcggcacgtccggttttgcgggccactgtctgtatctcggggatagagagcagaagttcctcggcacggtgtcccatcttatcgctctcttcgagtgagatgcccggcagcgaactgatgttgatggtgaatgaaccttcattgaatggggggaggaacgagcgtcccaacgtgaagaagaatcccagggtaatgatgaacagtccgatggtgcttcccaaggtcaggcgtttatgaattaacacccaagtcagtgctttttcgtatacccctttcatccagcgggctacgaatgcttctttcggaagcttatcacctttttctttgcccagcaggtaggagcaaagtaccggggtcagggtcaatgccactatcgtcgaggcaaataatgctacgatgaaggcaatgcccagcggaaccagcatgcgtccttccataccggaaaggaaaaagagaggtacgaaactgaccacaatgatcagtgtagagttcaggataggcatacggacctctttggaggcgttgaataccacctggatgaccgaaagacgttcattctccgggaggagacggttttcacgcaggcgcttgtatacgttttctacatcgacaatggcatcgtctaccagcgaaccaatggcgatggccatacctcccagactcatggtattgatagtcagtcccatgaaatgtagagtcaggatggataccagcagtgagagcggcagggtcaccagcgaaataatcgtggttcgcacgttggcaaggaacaggaataagacgatgactacaaagataccgccttcaaaaagggacttctttacattgctgatggaactgtcgatgaaacggctttgacggaagatatcggtagatacctttacatccggtggaagattctttcggaggtcttgcaacgaagcttccagtttgtcggtcagctccagagtactggtggcgggctgtttggtgacggtcatcagtacggcaggtttccctctttccgaagccgttcccagtttgggggctttcggtccgatccggacatcagcgatatcctccagcagtacaggtacgctgtcgatactctttactaccgctttacccagttgttctatgtttgcggtggagagtacaccacgcacaatgtattcgttaccatattcataaagtacacctccgttggcattcaggttcatgccgcgggtgacggtcatcacctcattcatagatacgccataatgacgcatacgttccggatcgagttgaatctgatattcttttaactctcctcccaatacagctacctgtgctacacctccggtagagagcaggcgcggacgtatggtccagtcggcaatggtacgcaggtcgagcatggaggtcgagtcggcggttaatccgataatcaggacttcgcccagaatggaggattggggacccagtgtcggtttgcctacatttgaaggcagttcttcacctacgatggccagcttttcgcttacaatctggcgggcgaggtatatatcggttccccagtcgaattctacccatacgacagagaatccgttcgtggaagatgaacgtacccggcgcacaccggtggcaccgtttacggctgtttcaacggggaaagtcacgagttgttccacctcttcggctgccattccgttggcttcggtcatgatgaccaccgtcggtgcattcaggtcggggaacacgtctacttcggtatgcatggcggtataagttccgccaatcagtaacagtaccgaggcaacaagtaccaagatacggttctgaagtgagaaatgtatgattttatttagcatattcttttttcgttagttgttatgcaccacatggaaaccgggctgtggcgccttgtcgttagtgttcgtggctgtgtgcaggtattgcgttacttgccgaagccagtttcacctggtaggcaccttgggtcactacccggtcaccggccttgatacccgaaagtacctgtacgctcttgccgttgtcggctccgagggtgacttcctgctttttatacccttcttcatccagttgcaggtatgcgaagaaaagcccctgttcttcggtcagcgccgtgcggggaagcgacagtacgttctccatgggagacgacaacaaatatacttcaacgaacgagcccgggatgatgtctcctttattatcaaattcgaaagtgaccggtacatagaacgaattttctcctgccgatttaccgaatgacaaaagacggccgttcagttctttcagttcgtataccttattgtcataaggagttttgaaattggccgaaccgatggtgcgcagagacggatagtatttttccgaaacttcggcacgcaagaagaggcgacggttttgagtgatgctgaccaatggctggccgatggttacgtaatcaccttctttcaccaggatgttttttacaaatcctgagatgggagaggttacggcctgtcctcctgccgaatgatttttggcaagggcctcatagctgatccgggcattttcgtaattctgttcggcttgtgcgaattccttatcggatacgattttattctttaccagcgcttgcatacgttcatattcctttctggatatatcgtaagcgatacgggcgcgttgtacgggatcaccatcggcaatgttactggatgaaatggtcaccagtgcagtacctttgcctacactcatgccttcggtcactttaccgcgaaagctgactactcctgctacggtggctactgctacggattcgtcaccttgtgcggccagtacttgtccgcttgtttttatcacttgttcaaatacttccggttctataatacttgttttcactccggctgcttctgctttggctttcggcagaatgatttcgtcactgtgaccggtagccggttcactgctccggctgtgttcgtcaccttcgtgatcatgtccttcatggtcttcgccttcgtgttcatggtcgtgcccttcgtgttcatggtcgtgtgcttctgttccatggtcgtgcccttcgtggttgccacccgatttactgttgcaggaacccaggataaacaatccgaggattcccataaagataagtttcttcatgatgatataaattctttacttttaatgattcggaaaagtgagtttctgtaggtttcaaacccaaagacctttggcttaaaaccaaggcgtcgttggttttaaaggaacttcccgttggttttaaaccaaccgtccggatattcctaaccttacgaaatgtggcttagaagcctatacaacagggtatggaggggcacgaaggccaaatgcacggttgacagccgtaccgtggagagactcccggtatgcgtaataattcttaatacgtcgctcctggggcctgaataaattctctatgataaagtccgtaaataagatggcagtaaataggtaatgaggattattgtctgcctgtacggaaggggttggtgagttgaggcgtgtcatacatccgtcattgcagcacgaatcgttgcccggatgatgatgtttaggacactggggttccggtgtcaagtcgttcttcatgcaaatcacgccatcggcatgatgatgatgggggataacaggtacgaccagcatgatcatgctgatgaaaaggagaaaagagactatgtaccgtttattcctcattcttaatttagattattgcgaggcaaagatagtctatcattggataaaaaacaaacagtgttacttaaaaaacaaaaagacagatgcgtcgtactttttaccacggagtatcacagagccttttttgttaatgatcaacgactgaaaatcgactccatgttactctgtgtcctctgtggtgagtttcgacatacctgtcttaaatgaaatgtcggaaacgtttgttattttttgcctcctttgtctttggtacatttgctgtctttgcctccggctttagccttgcaatcagctttgtgtttacatccgtcagttgttttcttatctgcttctttcttgcaacatgcttttttttcctttttacagcatgctttgctgtcttttttgtcacattgctcttttttgacttctttcttttttacgtcttgagcttgggcagtagtagtgcctgccatgcacattgctgcgacaaaagcagcacagaaaactaattttttcatacggtttcttttttaattgattaaatgggttttgtacttctctgttttacttaacaggtaaaagttgccgtatgttagttatcgaatattaaatttacgggaataagatccggagatatcatttctccaattcacgtaacgaatccattttctttttatcaaggaattcatagataccgcataaatgttcggtcaccttttggtttccgaattcgtataccttggtcaccagtccgtccaggaagtcacggtcgtgtgatactacgatcagtgtaccgtcgaaatctttcaatgcctgtttcaggatatctttggttttcaggtcaaggtgattggtcggttcgtcaagaatcagcagattcacaggttccagcaacagtttgatcatggccaggcgggtacgttcacctcccgagagtacttttacttttttcatcgactcttccggtccgccaaacatgaacgctcccagcaggtcgcgtattttattacgtatttcgcctttggctacatcatcgattgtctggaatacagtcaggttttcatccagaagcgatgcctgattctgggcaaagtatcctatctgtacgttgtgccctaaagtcagtgttccatcatgctctatttcgttcatgatgcatttcaccagtgtcgatttaccttcaccgtttttgccgacaaatgccaccttatcaccgcgttctactgtcagagtggcgttgcggaagacaactttatcaccatagctcttgcctacaccatccataatgacgggatagttgcccgaacggggtgaaggcgggaacttcagacgcaatgccgatgtgtcttcttcgtccacttccagtatttccagtttttcgagcatctttacccggctttgcacttggagtgtttttgaataggtacctttgaaacgttcgatgaaatctttggtttcagcaatgaatttctgctgttcttcgtaggctttctgttgctgttcacgacgttctttgcgtaattccagatatttggagtagttcactttgtaatcgtaaatgcgtcccatagtcacctcgatggtacgggtagtgatgttatctacgaatttgcggtcgtgactgatgacgattactgcctttccgttattgatcaggaagtcttccaaccattgaatagactcgatgtccaggtggttggtcggttcgtccaataaaagcacatccggcttttgcaataaaagtttagccagctcgatacgcatccgccatccaccgctgaagtcactggtctggcggtggaaatcttcgcgcatgaagcctaatccgagaagtgccttttctacgtcctcttcatagttggtggcgtcgatggcataaaacttttcgctgagggtcgacacgttctctatcagttccatgtagctgtcgctctcatagtctgtgcgtgtctccagctctttgttcatgcgttctatctcagcttccatttcgtgcagatgggcaaaggcctgggcagtctcctcaaaaaccgttcgcccgtcttctgtcatcaaatgttggggcagataggctatgacgcactctttgggagcagatatcctgccacgggtaggctgacgtacgcctgccagaatcttgagtagggtactcttacctgcaccgttctttcccataagcgcgatgcggtctttttcgttaataacaaatgaaatatcgctaaataatgtggttccgccgaattccacggccagtccgtctactgaaatcatatcgcttctttaaattttagccgcaaagataatcaaatctatgatttttttttataccttgcgggctgaatcgaataagatgaaatgaaaagcaaacctattatataaaatggatattgaagaaattaaagattttcgtccccttattcttgtggccgaagatgatgatagcagtttcaaattgattaaagctattatcggtaagaaatgtgacattctgtgggcgaagaacggtgaagaaatgttgaacttataccgtgaacacactcaagatgcacatgccatccttatggatattaaaatgccgattatgaacggattggaagcaacccggattattcgtgaagaaggagcttccctccctattattatgcagactgcttatgcttttagctcagaccgggagaatgccatgcaagccggtgcatccgaagtattggtgaaggccattacggtaagtgcacttcgaggctgtttaagcagctattttccggagatcaagtggtgaggtgacgttgattaaaatagatgtcaaaactcatattcaccacagattacagggatttacacaaaaacgatttttaatctgctggtaacccataatatttatctgtgtaaatccctgtaatctgtggtgagttatgaaataccttcctattttaaaggggattattaaatatctgtttctatctggaatttacggcttactttcatcaggttgatcgtataagttactacgttttgtgcttcctggatcatggttagataaaccatacttactttaatacttccggtctggctctggatacgctgtagttcctggcgtttcaggtgtgatagctgtgagttcagatcattggcccggtgcagatcttcttcaagattgctgtaattgttgccttccagtttttggcggcattgctggatcagataggtgatatcttcggctacatctccaaattcacctttttggatagcatccagcggattgaaattgttgtcaatgtgttccagacagggttcgcacaggcggctgatactgtataccagttcacttgcaaagtcatttccctgataataataaagtcctttttcaagtacggtgtgattatccaatttgcacattgctacggttccggtgcgcttcatctgcttgatcagttgtttttcaaacttggtagatcccattgcccggcgcagtccgcggaggttttcgtgcaagaatgaagtcacggtgagctcaaagttctgttctgcatattccagtactttactcaactcttcgcgtgtatgcttacgcattagctctaaagcttcgtggctgcttgtggcttgcatcaattgcttcaaagtttcgtttcctttctctttctcttttttctttttgtacatcaactggctgcggatcagagtgaatgctgccagaccgatcagggctatgatagctatgcttcctccgaagtggatgaccatggcaacaaagaaacagatggtgaaggcagctccggcagtgatgaaccatccgccgatgacacttagtacaccggtgatacggtaaacggctgaatcacgtccccaggcacggtcggcaagtgaggtacccatggccaccatgaaagtgacgtaggttgtagaaagaggaagttttaacgaagtacccacggcgatcaacagacctgccaataccagattgacagaagcgcgaaccaagtcgaatgccgcaccgtcggcaatgatggcttcgtctttacggaagcgggtatctatccagcgtttggcactcggcggagtaatgcgggaaataccgttggccagtgtgaggctgaaacgcaccagtgttcgggctatcggtgtgcttccgaagttttcttcaccttcatcctgacgggagaggtctaccgaggtcttgattacggcatgtgcctttttggaagtacacaaggcgtataccatgacggctccggcacctatcaggaaataccacggtgttttggctgaacccatcagagaggtcatcaggaaaccgtccggtccgacagaagttccgttggcggtatagtctatgaacgaagaataaccggctaaaggtacaccgataaagttgacgaggtcattaccggcaaatgccagtgccaatgcaaatgtacccagcaaaacgactaccttgaatacatttactttcagccagtgtaatatctgcatcaggatggtagaaatgacaaagaaacaacttaccagcatcatcgtgttttcttgtacccactgcttgttctcaggagtcatgaaagagctgtctttcaatccttttatcaccatgaaataaacgatggcagtagaagcgatgccaccgaatagtgcaatgctgtattttatattgctcttgtagttaaatgtaaacaccatgcgtgccagccattgtacaagcataccgaaaaagaaggcaatggcaacggagacaaagatggccatgatgacagacaaggctttgtcggtgttgataagatcacccaatcccagtgtatcactgttgtgtactttgataagtgctagggcaaaagtacctcccaaaagttcgaataccattgaaacagtggtcgaggtaggcattcccatagagttgaatacatcgagcagaacgacgtctgtcagcattacggcaagcaggatgcacatgatttcggcgaaatagaaatgttccggttggtagatgccgtgtcttgcgatgtccatcataccgtttgataaggacgctccgatgaagataccggcacctgcaatgaacaatattgttttaaaagatgccgcctttgctccgacagccgaattgaggaaatttaccgcatcgttacttacaccgaccatcaagtcgaatacggcaagtacgaataggaagataataatacatagataaattgtctccataaatgtgtatgttatttctggctgcaaaggacggattttcgtattgcagagaaatgtcatacatgttacagaaatgtttcattcttctcttttaggtaattatagaaggtatattgcgctctgacgggcgcggcatttgttttgaatttaaatatattattcagtttatcatcgacgaagcaagccttttgattgtccgataactggatatgaagcatatcgacgatttcttcccgtaattcattatcgagaatgggtaccaccgcttcgattcgtcgatataagttacgacgcatccagtccggtgaacccatatatactttgggatgtccggcattaccgaaataccagatgcgggcatgttccagaaaactgtccacaatacgggtgacacgtatgttacaactatattcttgtccgggtatcaggcaacaaatgcctcgtacgatcagatctatttttacacctttttgtgaggcctcgtagagccggtctatcattatcgggtcttgcagggcgttcatcttcaagatgattcttccgcctcttcctttttcggccagttctatttctttgtcgatcagcctgttcagttcgggaatcaggttgaaacgtgccacaagcaaccgggtgaatcgaggattctctttgcctctgagggtacggaacaggtttgtgaggtcatgtacgatgaccggattgctggtaaacagtccgcagtctgcatacagtgtagccgtcttctcgttgaagttgccggtactgatataagcgtaactgtgaatcttttcaccggtgaagctgcgacggcgtatcagagctactttggcatgtaccttcagccccggtatactatagataatgttgataccggccgctttcatcatttcggcagtggcgaggttgttctcttcatcgaaacgggctttgagttccacgaataccgtgacttttttaccgttttgtgcagcagcaatcaaggtgttgatgacagccgagttttctgctacccgatattgggttaccatgatttcacgggtttcgggattgtgcactgcttcgtaaaggaagtggataaagtggtcgaaagaatggtaaggatagtataacaataaatctttcttttcaacataactgaaaatggattccttgtcgttcagtcgattcagtttcattgggatcggtctctcaatccggggaatggaatgattggggttcggcaagtgacgcagatcttccaggttaagatgtttgtctcccggtaccaactcttcgtgccggattcggaaagcgtctaccaggaagttcagaaaatcatcgggcatggcgcggtcatagacgaaacggcatacggcacctatcttgcgctttttgatttttttctttacttgttccaccaggtcgacactgttgatcgtgtcgtctatcataatatcggcatctctcgatattttgatacaataactgcaatctacttcgtatccggggaaaatgacgtctatgttcgctttgataatatcttcgataaacatcagataataatctctgccatgcttgggtaattcgataaagcggggcactttactgtagggtagtttcatcacaaaatattgcagatgatcagcatcttctttgtttgtacctttcaggaacaggcgaactgccaggtagagccgattgtcgcgcagaaaagagattactttgtctttggataccggtaccggttgcaggtaagggaatatctcttcccggaaaaagtcttttacgaattgttggtggaaaggctctacattgcggctttgatagaagataacgtgatttttgcgtaatgcaggtatgatctttttttcatagatgtggatacgatcctccaattgtcggttcacttcccggttgatttcttccagcaggtccttggccgattgcagggattcttccgttccatctgttacgccggaggctacagctttgtggtcggctactctgattttgtagaactcttccaggttggaggaataaatagagataaaattgatacgttcgtagagtgggagccggtcgtcgtcagcttccagaagtacccggtagttgaatgatagccaactaatatctcttttgaagtattggtatttgttttccatttgcacgtaaggtttgcccaaatatagttacctttgcagagataaacaaagaaagtatgacaaaagttggcttattgtccgacacacacagttggtgggacgaaaaatatttgcaatatttcgaaacttgtgatgaaatctggcatgccggagatattggttcagtggaggtggcacagaagttggcagctttccgtcctttccgtgctgtgtacggtaatattgatggtcaggaaattcgccggatgtttcctcaagtgaatcgttttacggtggacggtgccgaagttctgatgaagcacatcggggggtatccgggaaattatgatccgtccatcaagggaagtctattggtgcatccacccaagttgtttatcagcggacactcgcatatattaaaggtaaagtatgataagacgctggatatgcttcacatcaatcccggtgctgcagggatgtccggatttcataaagtacgtaccatggttcgttttgccatagataatggtgtgtttaaggatttggaagtgattgaactggccggctaataaatttgtatttttattttgtcacgtcagaattctttccgttctttgtcacaggtttagggatacaagctataagcaacccgttatgaataagcggattttgcattgagtttatatataatttactgtagcttgtgatttgtaatctgtagctcgtaacttgtaacattcaaaatatgaaaggaattattcttgccggcggtagtgccacccgactctatccgttgtcaaaggccatatcgaagcaaatgatgccggtgtatgacaagccgatgatatactatccgctttctacattgatgcttgccggaatacgggaagtgttggttatttctactcctcgtgatctgccgttgttccgtgaacttctggggagcggtgaagagtttggaatgtccttttcatatctggtgcaggagcagcctaacggacttgcccaggcttttgtgctgggagccgattttctgaatggtgaaccgggctgtttgatattaggagataatttgttttacggacaaggtttctcagctatgcttcgccgggcggctaccattgaaaagggagcttgcatctttggatattatgtgaaggatcctcgcgcctatggcgtcgtggaatttgatggaagtggaaaggttgtttcgttggaagagaagcctgctgtccccaagagcaattatgccgtccccggactttatttctatgatgctacggtgactgaaaaagcgcttgctttggagccttctgcccggggtgaatatgaaataactgatttgaacaagctatatctcgacgaaggaacactgaaagtcgaactctttggccgtggctttgcctggttggatacggggaattgcaacagtttgctcgaagcctctaattttgtggctactatccagaatcgtcagggattttatgtcagttgtattgaagagatagcctggcgtaacggatggatttcttctgctcagttaaaagctttgggcgagaaattggaaaagaccgaatatggtaaatatctgatagacttagcaaattaataaatcaatcataaagaatatgaaaacttatcttgtaaccggtgctgccggatttatcggtgccaattatctgaagtatattctggctaaacacagtgatatcaaggtggtagtgctcgatgcactgacttatgccggaaatcttggaacgattgccaacgacattgataacgaacgttgcttttttgtgaaaggtgacatttgcgatcgtgaactggccgaccgcctttttggtgagtacaagtttgactatgtagtgaattttgctgctgaaagccatgtagaccgtagcattgagaatccgcaacttttcttgatgaccaatattctgggaacacaaaacctgttggatgccgcacgtcgcgcatgggtaaccggtaaagatgaatacggatatcctacctggcgtaaaggggtacgttatcatcaggtatctaccgacgaggtttacggttcgcttggtgccgaaggctatttccatgaaacgactccactctgtccacatagcccgtacagtgcatcgaaaaccagtgccgatatggtggtaatggcttatcacgatacctataagatgccggtgactatcactcgctgttcaaacaactacggtccgtatcattttccggagaaactgattccgctgattatcaagaatattcttgaaggtaagaaacttcctgtgtatggagacggtagcaatgtgcgcgactggctgtacgtggaagatcattgcaaggctatcgacctggtagttcgtgaaggtgtggaaggagaagtatacaatgtgggcggacataacgaaaagactaatcttgagattgtaaaattaacaatcgcaacgattcatcgcctgatggcagaacatcccgaatatcgtgaggtgttgaagaaaaaagagaaaaatgccgatggtgaaatttcaatcgactggataaacgaagatttaattacgtttgtcaaggatcgtctggggcatgaccagcgctacgccatcgatccgacaaagatcactaatgccttgggttggtatcccgaaacgaaatttgaagtcggcattgtgaaaacaatcgaatggtatctgagtaatcaggaatgggtggaagaagtaaccagtggtgattatcagaaatattacgaacggatgtatagcaaacgttgacttgctaaccgtttataacaagtcctattgacaataggattcccattaacagcatattgcgtgaagtttcgcccaatatgctgtttaattttttgccactatgtatctgtaccatttttttccaggtccgaatgtggaagaacaggtaaagttggggtaagagagttgcgtataggtgcccgttgaatagaaaccagaaacaaagccaggcagctgtaatgccgagcagtaaataaaagtatctgccgaaggattcaccgaaacgtactacaacggtctttttcccgctttttcggtcggcatcccgatcccggtaattgttaactaccagtaatgtatctacaatcagtccgcataccagtgatgcaaccgtgacgtttggtgtccaattgagagcctgtacgtaataagtaccccctaccggaacgaagccgaagaatacaatgaccaatacgtctccccatcctttataggataatggataaggtcctgtggtgtacaagaaggcgaacaatacacacaacgcacctataagaatcaactcccatcctgcataaaacaggagagtacacccgatcaggcaggccaggcctaccgtgatgaagataccttgtttcatcgcggctgccgaaatccagccttgtgcacaggcacgttccggtccgagacgatcttcgcggtcggtcccttttagaaagtcaaataaatcgttgatgaaattggcggcaacctgcatcagtccggcgaacaaacagcagatcaatgccggtatccaattgaattttccgtcggcaaaagccaatgcacaacctatcattaccggagtaatggcacctgccagtgttttggggcgggccgcaagtatccatgcctgcaacgagttacgtttcacttcttccattttctttttctatcatccgtttttgagagaacaaagatagggcaaaaaacgtatatttttgcttttttgtctatctttgcgctcctgatattagagaatatgaagaagataatatacctgttggcggcacttttgttgctgctttcctcttgtaaatcgaagaagaatctggtttctccgattcctcgtccggtattgaatgttgattctgtccgtccggatagctccgatgtagtggcccggctgttctcgccggatacctccgaactcaaaaaattctcagtcaagcggaagagagaaaaaacgcatgttgcctctcctgttataacgcgctctgctccttccattgtagcccgggggactcgtattaccagttctgcggtgagcgtatcttccgtttatccgggtatcgaccgggtgaaaaagtacgagttcacccatcgtgatgtgcctgacgcttttgacggtttccgtattgcttttatttcggatttacattataagagtcttttcaaggagaaagggctggagagtctggtgcgtttgctgaatgcccagcatgccgatgtactgttgatgggaggtgactaccaggagggatgtcagtacgtgcccgagctctttgcggcgttggctaaagtcaaaactccaatggggacttatggagtgatgggaaataacgattatgaacgttgccatgatgaaattatccgtgagatgcaacgtcacggcatgcgacctcttgaacatcagatcgatacgttgagacgtgatggagcacaaattatcttggccggtgtacgcaatccgtttgaccttgccaataacggagtttcgcctactttgtccctttctccgtctgatttcgtaatactattggtacacacacctgattatgccgaggatgtgtcagtcgctaattctgatttggtcctggcagggcatacacatggcgggcaagtccggattttgggatatgctcccattattccttcacactatggcagccgttttctgacaggattgaagtataactcggctaagattccgatgattgtgaccaatggaatcggtacctcaaataagaatatccgtatcggtgcacctgccgagattgtgataattacactgcatcgtctccggaatgaataattctcaggtatggcaggagtgggaagaatcaatgctgtcggtctgttgtataattcttttatatacagccggatgaaggaaataacgtatatcttttccggtagccagggcttctctgatgaaggtagaactgatttcgaatatgggagaatctgctacgtgtacgttcgggggtaactgtgacttatctacagagaatcccggacggggataaacgagtatcttattttctgagacgatacgttccgattcgaaccatcggtcaaataccatccaattgtcagagcctataatcaactggaattctctttcgggatattcttgtttcaggcgattgagcgtatggatcgtataagaaggacggggcagatgaaattcgaaatcggatacccggaatcgcggatatccctcaatagcaagctgtaccagttgcagacgcagttcgtccggccataaatcagcctgattcttgaaaggattgtgcggggtgaccataaaccagacttcatccagcccttcaaactcgcacagatagttggccagtgccagatgtccgatgtggatcgggttgaaagagccgctgaagattccggttttagtctttgccatatgctataatcacgaataagagagagtaggagattattctgtatcgatgcccagaaactctttgatcactttcaatgcgtgtgccttggctgtttccaggtcgtcattaatgataaccttatcaaatttcggagcaaagcttaattcatattcggctttggctatccgactctcgatcacttcgggagtatctgttccgcgtccgatcagacggcggcgcagttcgtcaatgcagggaggctggataaaaagcgaaagtgcccgttcaccataatatttcttgatgttacagccacctacgacatctacatcgaatacaacattttgtccggcagcaagctgtttttctacctgtgctttcagagtgccgtagaaccggtcggtatatacttcctcgtattccaggaattcattgtttgcaatgcgttgacggaattcatcgggagagaggaaaaaatattctactccatgcttttcgtttccccgggggggacgactggtggctgagatcgagaatgcaagattcaacttttgagccaacaaataatttatgattgttgacttacccgatccggaaggagcagaaaagatgattactttggcttcacccgttttgtgtggggtagttattctttcagttgggttcataatctatcgttattacatcacattcagcacctgttctttgatctgctccagttcgtctttcatctgtaccacgattttttgcatttcagcgtggttcgatttactgccgagtgtattgatctcccgtcccatttcctgagcgatgaatcccagctttttaccttgtccgctgccactttcaagcgtactgatgaagtatttcagatgattgcccaaacgttgtttctcctcgttgatatcgagtttctcgatgtagtagatcagttcctgttcgagacggttcttatcatagtccacattgagtgttttctccagtgcatcggtgatacgttctttaaccttatctacccgttctttttcataaggggttaccgattcgagcagacgatggatattcgcgattttttcccggaactttttttccagagcagcaccctcttgttttcggaaatcgactaaatgtgaaacagcctctttgactgctgcgtacactattccccattcttcctcactcaactcctgtgtttcggtgcgggtcattacatccggcatacggagtaaagtctgaaaccagtcagtaggtactgcaatgtggaggttttcggagatagctttgatttggttgtaatatccttctaccaatacttggttgatgggagtggcagcgtctgcacactctttcttttccacccaaaggctgaagtcaacttttccacgttccagcacacgtgcaatttcattgcggatttccatctctttttcacggtatgccggtgcgatacgtgccgacaaatccatcgctttgctattaagcgattttatctctacgttaatcttcttatcgggaagttcggcagttgctttgccatatcccgtcatggattgtatcatattaccaaaagttttgtgcaaaaatacgggataattttaagataatcgctgtaaatggataaaaaagacatcttggttagaagaaactgttttgaattttctgccataataatcttagaatccggtatttcgataacgaaggtgcggcaaccgaacacatacgaaaaaggttcttctttaaattgggtggcaagttttcttttactcatggaatctaattcagttttcggaagtgtaagccctcgtttatagttgacaaaaaagcaagtatcccggctttcgcccgaagagtccatccgtgagataaagaagcgaacctcagactaaaccatctaaaaatcaacacttttaaaaagtaagatctctgtcctcaaaagctctgttttaacacagtgttaaaacttgttctttggatgtgaataaaaagttctttaaatgcaaaagacttgttatttgcgcacaagaacctgacaacctgcaaaaggcgttaacaatgttaattgaagaaaggtataaggatgaagataccggttcaaacggcgtaaattcacttcctaaacttgagttataagttggggtatccagttctacgttcctaaaatcgcagtatcaaacgcccctgttgttgttaatgtagtggtctgatatttagcgttttagtaagcaaaatgttttttgggaaatttgcatattccattagttagtagtaactgcttcgaacattctgctttttgaacgggagaaagcgatgtgatccttatccgttgggtctgtttgttaatgtgatcgagaggcccgtcagacttgcgagtaaatagaaatagtatatagtagtgtatctgtttcattgcaggttttaaaacttgttatatttgtcttttgcttgtataaaacagtctgataaagtatgtaaaaacttaatttaatgcaatgattttgaagggaaatgcgctttatttatatctcggtgcggtaatctgaaaataatcatgtaaatttgcgtcaatttaataatctgattcttatgtcgtgtatcctacatattgagacttctaccgccgtttgttcggtagcagtaagtgaagacgggcagaatatttttgtgaaagaagaccttaaggggccttcacatgccgtttcgttgggagtatttgtggatgaagcgttgtctttcatcgatagtcatgccattcctttggatgcggtagccgtcagttgtggtcccggatcgtataccgggcttcgcattggcgtttcgatggcaaagggtatttgttacggacgtaatgtcccgttgatcggtatcccgacattggaagtgttgagtgtacctgtgctgctttatcatgaattgccggaagatgcattgctatgcccgatgattgatgcacggcggatggaggtatatgcggctatctatgaccgtgcgttgaatgtgaagcgtgagatttccgccgatatcgtggacgagaattcttatcttgaatatctggaacagcatcctgtctgtttctttggaaatggagccgcaaagtgccgtgaaaagattacgcaccccaatgcgcattttatagatgatcttcatccgttggcaaagatgatgttcccgcttgcagaaaaggccgttgcaatcaacgactataaagatgtggcctattttgagcctttctatctgaaagagtttgtggcttcgcaacccaagaagttactttaatgcttttcactccttatttgatttactatttttaaaatataatttaactacatgcagtataatactcaacagaaaagaatgccgctgccggaatatggtcgcagtatccagaatatggttgactttgcgttgactatccaggatcgttccgaacgtcagcgttgtgccaataccattatcaatatcatgggtaatatgtttccccatttgagagatgtacccgatttcaagcataaattatgggatcatctggctattatggccgactttaagcttgatatcgattatccttacgagattatccgtaaagacaatctggtaacgaaaccggatccgattccttatccaagtactaagatccgctaccgccactatggtcgtacattggaaatattaatcaaaaaagcgtgtgaatttcaggaaggggatgaaaagaagaatctggtagcccttatctgcaatcacatgaagaaagactatatggcatggaataaagatacggtagacgaccggaaaatcgccgaagacctggccgaattctcgggaggcaaattgcagatggatgacgagattctgcgtctgatgtctgaacgtattgctcagaactaccgtccacgtacgaataacaacaataaccagagaaataataatcagagaagaaaattctgatcaaagtgattattagcattatcattaaccactaatcacctcgaaacatggcttcatttgtaatcgaaggagggcacagacttagtggggaaattcatccccaaggtgccaaaaacgaagtgttgcagattatctgcgctacattgcttactgccgaagaagtaacagtgaataacattccggacatcctggacgtcaataacctgattcagttaatgcgggatatgggcgtgacggttgcaaaaacaggtgtcgattcgtatagttttaaggccgcaaatgtcgatctggcctatctggaaagtgacaacttcctgaagaagtgttccagcctgcggggatctgtgatgctgatcggtcctatggtcgcccgtttcggtaaagccatgatttcaaagccgggaggagacaagatcgggcgtcggcgtctggatacgcattttataggaatccagaatctgggagccgattttacttataatgaagagcgggaaatatacgaaatttcggccgaagaattgaaaggtacatctatgttgctcgatgaagcttctgtgaccggaactgccaatatcgtgatggccgctgtactagccaaaggtaaaacgacgatttataatgcggcctgtgagccctatctgcagcagctttgtaagatgctgaaccggatgggagcgaagatcagtggaattgcttcgaacttattgactatcgaaggagtggaggaacttcacggtaccgatcacactgtgttgccggatatgatcgaggtgggtagcttcattggtatggctgccatgacccgtagcgaaatcacaatcaaaaatgtgtcatacgaaaatctgggtattattcccgaaagtttccgccgtctgggtattaaactcgaacagagaggagatgatatttttgttccggcacaggattgctatcagatcgagtcgtttatcgacggttccatcatgaccattgccgatgctccctggccgggactgactccggacttgttgagcgtcatgctggtagtggctacccaggcaaaaggtagtgtactgattcatcagaagatgttcgagagccgtcttttctttgtcgataaactgattgacatgggcgcacagattattctttgcgatccgcaccgtgcggttgttatcggacataatcatggatttactttgcggggaggcaatatgacctctccggatatccgtgccggtatcgctttgcttattgcggctatgagcgccgaaggtatcagccggattcataacatcgagcagatagaccgcggatatcaaaatatcgaaggtcgactcaacgctatcggtgcaagaattacacgaatatgataaaaagagaagatgtatacaagataggcttgttcaataagccacacggcatacacggtgaattgtcgttcacctttaccgacgatattttcgatcgggcggattgtgattatctgatttgccggttagatgatatttttgttcctttctttatagaagagtatcgtttccggtccgattccacagctttggtgaaactcgaaggtgtagacactgccgaacgtgcccgtatgttcaccaacgtggaagtttattttccggtgaaacatgccgaagaagccggtcccggggagttgtcctgggatttctttgtcggattccgggtggaagatgtccgtcacggtgctttgggaaaggtgacggatgtggatacgtctaccgttaatacactgtttgtagtggaccgtgatggcgatgaattgctgattcctgcacaagaggaattaattgccggtatcgatcagaagcacaaaatcattacagtcgatttgcccgaaggcctgctgtctttggacgagtgcgatgatgaagaaagttaaatagcataaagaaacagacggcaagtaaagcgaaatgcttacatttgtcgtgatattctataataatgccgaaaaagaaacgtagtaaagccttttggaacaatatcaagttcaagtataaactcactatcatcaacgagaatacactcgaagaggtggtgggacttcatgtatccaagctgaatggtctttccgtgttactttcggttctgaccgtgcttttcctgtttgccgctgccattatcacttttactcctttacgcaactatttgccgggatatatgaatagtgatattcgtgctcaggttgtggaaaatgccttgcgggtagattctttgcaacagttggtagaccgtcagaatatgtatatcatgaatatacaggatatcttcagcggcaccgtgcgggtggatactgtacagtcaatggactcattgaccaccatgcgtgaagattcgctgattgcccgttccgaacgtgaagaagctttccgtcgtcaatatgaagagaccgaaaaatataatctgacctctattaccacacagcccgatgtcaacggactgattttttatcgtccgacccgtggcatgatttccgatcattttgatgccgaaaagaaacattttggaaccgatattgccgccaatcccaacgaaagtgtattggccactttggacggtacagtcatattgagtacctatacggccgaaaccggttacctgatcgaggtacagcataaccaggattttgtatcagtctataaacattgcggttcgttgctgaagcgtgaaggcgatactgtgaagggaggtgaagctattgccttggttgggaatagcggaacgctcactaccggtccgcatcttcattttgaactttggcacagaggacggccggttaatcctgaaaaatacattgtattctaataatgaacgagataaagaagaaacaaatagctatcttaggttctacgggttctattggtacccaggccttgcaggttatcgaagagcatcccgaactgtacgaggtgtatgcactgactgccaataataaggtagatctcctgatagcccaggcacgtaagtttatgcctgaggctgtagttatagccaatgaagagaaatatgcccaactgaaagaggctctcagcgacctgcctgttaaggtgtatgcaggtgctgccgcgttatgccagattgtagagtccggccctatcgatgtagtcctgaccgctatggtggggtatgcgggattgaagccgaccatgaatgccattcgtgccggaaaagccattgcccttgccaataaagagacactggtagttgccggagagttgattaatcagttagcccggcaataccgtacaccgattcttcctgtcgattccgaacattcggcagtatttcagtgtttggccggagaggtaggcaatccgatagagaaagttatcctgactgcttccggaggtcctttccgtacatgtactatggaacagttgaagactgtgacaaaagtacaggctctcaaacatccgaattgggaaatgggagctaagatcactattgattctgcctcgatgatgaacaaggggttcgaagtgatcgaagccaaatggttgtttggcgtacagcccggccagattgaggtggtggtacatccgcagtcggttattcattcgatggtgcagtttgaggatggagcaataaaggcccagttgggaatgcccgatatgcgtctgcccattcagtatgctttctcttatcccgatcgtatcaattcgtctttcgaccggcttgatttttcgaaatgtacgaaccttacttttgagcaacccgataccaagcggttccgtaatctggcattggcctatgaatcgatgtataggggagggaatatgccttgcatcgtaaatgcggccaacgaggtggttgtggcggcttttcttcgtgatgaaatcagctttctcggcatgagtgatgtgatagaacataccatggggcaggtgtctttcgtacagactcctacttacgacgactatgtggcaaccgatgcggaagcacgccggattgccagtgaattaatatgtaaataaataaattgtaaataatctgatggaaacatttttaatccgtgccctgcaattgattatgagcttatctttgctcgtcatcattcacgaaggagggcactttctctttgcccgcctgttcaaagtacgggtagaaaagttttgtttattctttgatccttggttcacactatttaaatttaagccaaagaaaagtgagacagaatatgctgtcggttggttacctttggggggatatgtcaaaatagccggaatgattgacgaatcgatggataccgagcaaatgaaacaaccggaacagccgtgggaatttcgttctaaacctgcgtggcagcgcctgttgattatggtgggaggtgtgttgttcaacttccttttggctctgttcatctattcaatgattctgtttaagtggggagatcaatacattcccgtacagaaagccccattgggtatggactttaatgaaacagccaaagcggtgggatttcaggacggagatattttgttgtctgccgacggagtcgattttgtacgctacgatcccgatatgctcagccagatagctgatgcccgggaggtaacggtgttgcgtgagggtaagaaggcatctgtatatatccctgaagatatgatgcagcgtctgttgggtgacagtgttcgctttgccgaattccgtttcccctatgtagtcgatagtgtgatggtcaattcacctgcagccatggccggtatccagccgggcgacagtatcattgctctcgacggaaagccggtttcttatacagacttcctggcagctatggctgaaagaagacaaaatgcgaaaacgttacaaaatgacagtatcaatccgcaccagatctcattgacttatgtgcgtgacggaaagaccgatgtattgactttgactacggattcagctttcaaaataggagtagcggtcaatccatatacggatcagcttcttcctgtaatcaggaaagagtatggtttctttgaatccttcccggccggtgtagcattaggagtgaagactttgaaaggctatgtaggcaacatgaaatatcttttctcaaaagagggagctaaacaattgggcggtttcggaaccatcggaagtatcttccctgcaacctggaattggcatcagttctggtatatgacggcattcttgtctatcatccttgcttttatgaatattctgcctattcctgcgttggacggcggacacgtcttgttcctattctatgaaatcattgcccgtcgcaaaccgagtgataaatttatggaatacgcacaaatggcgggtatgattttgttgttcggccttttgatttgggctaacttcaatgatatattgagattcttcttctgataggagagttctcggaaaagtatttcttaccataggctactcaggttttcaggggagatctattcggataactcctgttcaataactaaatctgagtagcctgtggtgtttttagggtatgtcgctttatattttcagcatctttttttctctttccagatccgattcatccagtttgggtgagggtaccgtacaagtcttgatatagtccccttcctggcatgtataattataatagatctcttcttcaggggtcagttccgatctggagattaactttccttccattttcaggaactcgtctatgtctgtgctgtccgattgcttcaccaggacaattctccgggctatcgggttatggttatagtccagacagagatataatcctttcagcatatgcggaaactcataatggggtaattgcagatagatggttaccagggcaaactgcggaagttcccgttcattgaacatcaggtatgaattttgatgattactgataatgccacttccccagtgcacggatttataggcattgatcatgcctactttcacataatcattgttttctgatgcacagatcagatagggttctgccttgaggctgtctgtcgatgaagaaaggctgtagctcaggtacgtgccactgtaattgtagacttcccctacagattcctgcatttccttttccagtaatttcagaaaagcatttcctgttatgttggcttcctgattgggttccagatcgaagagccgttctttcatttctcccagattgccgagcagccgtttcttcgacacattgtttaccagtgccagtgcctcgtccagagcctcttcccggggcttggtcttttgcaggttcagataggtgggcagcacactggagtagagtgcggacagcacactgggagccatgtgtatccagtcggctatttctttcattttcactccgttgttacggagatattcgattcgtttgtatatatcttccagttcgttcataagtacatcgacgcattgtttacattgcaaatatatgacttttggattatataatcatgatatgaatgttacattaatatttcggaagaaatgtgcggaatatgaatgaaatgaatcatgcggaattcatttttgctctgtacgggatgccctacttttgcatcagattcaaaaacaaggaaattatagacataaaatgaaaaagattgaatgtatcattatggactgggcaggaacggcagtcgattacggatgtttcgctccggtggctgctttcatcaaagcttttgccgggaagggactcacgatcgatgtcgagcagactcgtaagcctatggggttgccgaaaattcagcacatccgtgaattgctgactatgcccgaagtaaacgaacaattcataaaccgttatcgacgtgcctggacagaggaggatgtcgtagaactgaaccacctgttcgagaaatatctttttgcttcactgaaagagtataccgatcctattccgggtgtgatccctacgttggagaagttgcgtgccgaaggactgaaaataggttctactacaggctatacccgcgagatgatggatgtggtactacccgaggcacaggccaaaggataccgggtggattactgtgccactccgaatctgctgcccgccggtcgtcctgctccctatatgatttttgagaatctcacgaaactggcggttcccgatccggatacagtggtgaaggtaggcgacaccattgccgatattcaggaaggtgtacatgccaaagtatggagtgtgggagtggttctcggaagtaacgagatggcactcaccgaagaagagacatacgccttgccggctgccgaactcgagaaccgtattgctgaagtgaaacaacgtatgctggctgcgggagcctcgtatgtcattcgaagcattgaagaacttcccgcactgattcaactaattaattcaaaactaaatcattaatcgatatgaaaccttatttgttattgacccccggaccacttactacctcagagactgtaaaggaaaccatgatgaccgactggtgtacatgggatgaagactataatttgcacattgtcgaagcattgcgtaaagagctggtcggcattgctacccgcaatacggaagagtatacatctgttcttttgcaaggaagcggaacctattgtgtagaagccgtgattggtgctgccatcggtaagaatgataaacttctgatttgcagtaacggtgcttatggtgaccggatggggaatattgccgaatattatcatatcgactacgagctccttgcttttgatgaaacggaacaggtatcggtagactatgtggacgactatctgagcaataattcagatgttactcatgtggccttcgttcactgcgaaacgactaccggtatcctgaatccgttgaaggagctggcacatgtagtgaagatgcatggcaagaaactgattgtagatgctatgagtagctttggaggtatcccgatggatgttagtgagttgggaatcgatttcctgatcagcagtgccaataaatgtatccagggagttccgggattcggatttatcatagcccgccgttcggaactggtgcgttgtaagggagtagcccgttctctttctctggatatttacgaccagtgggaaacgatggaaaaagggcatggtaaatggcgttttacttcaccgacccatgtggtgcgtgctttcaagcaggcccttaccgaactgattgaagaaggtggagtggaggcccgtcaccggagatattgtgagaatcaccgggtactggtagagggtatgcgttcactcggttttgtaactttgctcgatgacgcgatccagtcacctattatcacttcattcttgtatccgaaaaccggattcgactttaaggccttctataccgcccttaaatccaaggggtttgtaatctatcccggaaaaatttcaaaagcggatactttccgtatcggtaatatcggagatgtacatccggaggactttgcccgtctggtggaggtggttagagagactgagtactaaatttttcattcattgattgatatggaggtgtcttcaagaaacttatattcaccacaaaataacacggatttgcacagatcaatattatgaatagcttaagctctttctgtgtcactttgtgttactctggcttccggtgggacgatatacgtggattgagatggttatcggggcttcgtctttaatgtggagggttgtgaaagccgcatgctgcttaccactgctgcgacaaaagcaaatccgctgccggctatcagacagaccgccgtactcttctcgtgtactacaaaactgaagagcaaagcaaccagtgtcgtaccgaatgtctgtcccaagagccgtgccatacccaacattccgctggctcctcccgaacgtcgggtaggggcggaagagatgattgtactgttgttcggtgtctggaaaagaccgaaacctgcaccacaaagcatcaatcgcaggatgatgccggtgaccgatgaatccgccgttaatgtagacagagagtaaagtccgatacagaacaatgccatcccgatgctgcccagtatgccgggatgaatgcgttccaccagatatccggctgccggtgctgtcaccagtgtggctataggccagggagttaacaatagcccggtcatgacctcgctgtatcccaaagagttttgcaggaagaagggtaaagagaccattgccagcatttgagcggtgaacgaacagatactggtaagaatggaaagcctgaaaatgggaattcccaacaggtcgaggggaaggagaggagacggttggttcaactgtctgcgcacataataagtcccgacaactgccaatacagcaagttgtatcactatataatcattgttttcatggtgggcaaatccatccaaagtataaatcaggagcccgaaggtgattgcattggctatggcactcagcttgtcgaattttctgttcgaacgttcctcttttcggggcaggtactttaatcccaaagtcagggcaactaatccgagagggacgttgatagcgaatagccagtgccaggaagcgacagatagaattccgctggctaccgaggggccggctgctgccgatatggccactaccatggcattgatccccattccccggccgatttgttttcgggggtaaatcgtacgtaactgagccgtgttgacgctggtaatggccgaagcactgaatccctggaaaatgcgggcaatggtcaatgtccaaaatgaatgggacaaagcgcagatcagggaagtgacgatgaacatagctattcccgaaagaaatattttgcggtatccataaatttctcccagtgacgagaatgaaagcaaagagatgacaatggcaagctggtagccgttgataatccaggtcgtgactgccggagaagttccgaagtcgtgagaaagtgtcgggagtaccacgttgataatgttgatatcgagtaccgacatgcataaggcaaaagaaataccgacaactgcccatatacggtgcgggagaggaaggccgtctgtttcgtcaactaccggagtttgtgtatgtagaatcataaagaacttttttatggaagtgctacaaaaataaacaaaatcggacttcttcggttgggggaggtagtgatatataagtttttttacacattgaaacttgatggggagggagtggaaggtcgtcttcaccacagatttcacagatcgacttccaatgttattgttgatagtccgtccgataaaccattgatatttgtgcaatctgtggtgatttcgacgcttgtttatttatatctatttcagtttgataatccgctgattactgcttcctctgaattccagatgcggtgaataaagttcctgtttgaagcgcccgtccaccagtacatctatgtaggacaatatggctgccagtttcggatccgattctatttcctcgtaagtatatcctgtgtagcaccagatattctgtcccgtttctgtttttactctccggatgacaggcaaaaatgcttccggatcataaaaaggatcgccccccgagaaagtcactccgtcaagcaacgggttcgagtttatttcgcggatgatggaagccaaccgtccttcggacagttcctcaccggcttgcgggttccagctttccgggttatgacaacccggacagccgtgcctgcatcctgccagatagatcgaatagcggataccttctccgtcaacgattgtttcgggatacgtgtacaagatgttcatgattccttatccgtgctttacacggtctttttcttctgcacgtttggccgaattccatgaactcaagtctccggtcaggtagcctgtgatgcggcgcatgcgcaaaatattctcactttggcataccggacatttatcgtagatcacgcccttgtatccgcaattgtggcaggtatccaccggatgattgattgagccgtaaccgattccttcgtcaaacataacttttacgatcttggcaatggcgcgtacgtttttctgggcttctccgtccagttccacataggtgatgtgtcctccgcgggtgatagcgtggaacggagcctctctttttattttctctacaatgctgatcggttcttttacatccacatggaaagaattgacatagtaatcgttgtctgtcactcctttgatttttccgtatttacggcggtccatacgggtgaaacgtcccgaaagtccttcggccggtgtagccagtaccgaatagttcaggttgtatttggctttgtattcatcagccaccttgttgatttccagcacggcttcataaagggtgtcccatgccttctggctgtgtccgtgtccctctccatagagagccaccatggcattgtgtccgcccaggaagccgatacccagcgtaccactgcgcagcacgtcgcctacttgttcgttcgggttcagggcagctcctcctttccatacatcatttcccatcatgaaggggaattggcgtgccagggctgtacgctgatattgatatcgctcgtagagttgttcggctatcaaggtagccgtttcatgtatcgattcgatgaaaatttctttagcctttctctcgacggcatctttattgtgtccgtcctccgtcatgttttctgctttgatacgggcttcgatggccaggcgaggcatgttcagcgtggtgaacgaaaggtttccgcgtcccaaagacgatttctcgccggctacattctcaaacacacgcgtgcggcatcccatggtggccagttcgtaacggtaacgttgcgggtcgttggcgtcccatttttcgttttggttgaacggggcatccaggaacataaagttagggaagagtgcttttgccgtagtgtggcaagctttcaggaacaagtcgaagttgggtgcttcaaattttaatttaccttccatggcagcatcgaaattagccatagccttttcataatcggcttctgtgtacgatactccgttttttatcttgaatatctgaatggggaacaccggcacttctccccttgtgcccagtccctctacggttgctttcagtaattcttcaatcaccatgcgtccttcggccgaagtgtctgttccataattgatcgaactgaacactacctggtttccgccgcgtgagtgcattgtgttcaggttatggataaagccttccatggcctggtgcgtatctttctgagtctgcacaaatgctttctctataatttggttcagatgttctttgtcgatattgatctgtagggcagtcagagccatgcgcagcgtttcgcgttccagttccgatgctttgatggacgacagatgttcggcaatcactgtacggatagccttttcttctatctcttcacccttgttcatctgcacatagaagctgatgaatgatgccaggtgtttacggaatgatttgctcacaccttttgccataaagaagtcgaatgccggtatggcctgacctccgtgctgttcgttctggttagtctggaaaataatggtagctagggtagcatagctttgaatgctttgcggggtacgtatactgccgtttttggtgcggaatccacgttcgaagaggtcatccatgtcatattggatgcaagtcgtcgttttggtaggatagtaatccaggtcgtggatgtggatgtctcccagttggtgggcttcggcaaaacgtttcggcaacagatatttatatgtatagtctttggttacttccgaggcgaatgtcatcatctgtccggcgggagtatgactgctcatattggcgttgctcaggttgacatcgtttttgtcaatggctacgataccgtccatcacatgcttcatctgggtctttttgtctcgttcggtatttctccattcccgatagatgatgtactttttggctacttccggacgaaccttcatcagctctttttctaccaggtcctgaatttcttctaccgtaatggtaggagatgcaaattgtccgattacattcatcgtgatgtcagcaatcaattgctgttcatcattgattcctgtggcactaaacgcttttgatacagcgttcttgattttactgatggagaagtcctcccttttaccatctcgtttgatgatacaaatttccgcgtagttcataactttaactcccgaaagctttagattttttttaatatgtttactttttcagcaggtcttctgacttatctctccctcgcaacgccttcccacgctgggcgcagtggcatagtgtgcggattctcagagaattacagcagcgggtactgtcgccgatttgcacagcgttcccttatgactaaacctctttttagtactgaaatctgctacaaaggtaacagttaaagcaataagttgttcttgttttaacaagaatttttggagaacttttctttcttcctgatacagaaagttttccaaaacgggaaacttttggagagaaaaagcgaatcgggtttgctaaagaatcaaccagatggctatgatatggcctatgcttccgcctagacaaaacagatggaaaacggcgtgcatataaggttttcgcaacgagtaaaacacggctcccatgatatacgaagctcctcctccgagaagccaccagaaggcgggagaggctccgatggcggacaggcagtccattagtggtttgagggccaccaggatggcagagcccatccctacaaaacagatcgtctcgagattgctgtgttctttcagttttttgaaggctaatatgaatcctacaatagccgacagccatacaaaagtgaagattccccagccccatccgccggcatggcgtagcactaacagggtgaacggagtgtaagtccctgctatgtgcaggtaaatggcgccgtggtcaaatttgcgcagaagttctttccgcttgccgggcctggagccgtgataccaggtcgaactgatgtacgatgccagcatccccaccagataagccagtacacagcctgttgcccaataggggtgagggttggcgagcgccttttccaaaagaaaatatcctgcggtgatgcccagcagggtgcctgcgccatggcttaaagtattggacagctcttcgccgcgtgagtaccgtttgttcttcattgtgtgtaagccggagtgtttatctaataaaagatgaccgcagatttttatcttttcgattatcggtgataattaaaaagagaatctgcggtcgtcctttccttgtctttggaaatagtttgtatcagacacttggcttttttataccaggtggccgatccattcttcacggtcgcccggaagcagatcgataaccggaacttccaccatggtgtaacatcccggctgctgcttcatcgaagcacgtgctacgcataccaatacctgtgcggtcagtgcggggttgttgatgcgcatattgaattcgaacagttggttctgggtttttccggatacacctttgcgggtcaggtttacaccgtgtcccatgtccagcagtgcgtctacgctcggcacttgttttacgtgtgtctcgtcgttaacgaaataagcgtccgatttaatggctgctgccacttcctcgaatttatatccgtctttcagttcgatgtataccatacggcgatgaatgcctgttccggtagggatagtcatcgataaagccgctttcactccatcgatagctttgacggctaccgtatggcccatactcatacccggaccgaagttggtgtaagtgattcctttgggggcaattgcttcgagcatggtgcgtacgatcgagtcgcttcccggatcccatccggccgagatgatcgatacagctccgtgttctttggcgcaagcacccagttcacgacgcaagtcaacgatgcctgtatgaatatcaaagctgtctactgtgttgatgcccattgcgagaatctcttttgcgtatttctcaacgctgcgggtcggagtacaaagaatagccacgtctactccctgaagttcctttatatctttaactactgcgtaatcattcagttcagccggtttgttctcggcacctgcacgacgaaccacacctgctatctcaaaatcgggagccgcttggagggcttccagcacataacgaccaatattgccataacctacgatggctgctcttacttttttcatctttttattggttttgtttaacacatttctttatttcggttgcaaaattagtcattttctttgttttcaggtctcttaagggtgttaaagttagtttttgttattcaaggttcgtgaagcacaatatttattatctttgcgttctgattataaccattatgatagaatacatcaaaggcgaaattgccgaactgagtccggcaaccgcagttatcgattgtaacggattaggatatgccgttaatatatcactcaacacttattctgccattcagggtaagagcagttgtaaactctatatctacgaagccatccgcgaagatgcttacgttttatatggctttgccgacaagcaggaacgggaacttttcctgctgctgatttccgtttcgggtattggaggaaacacggcccgtatgattctttctgctctttcaccggccgaattggtgaatgtgatcagtaccgaaaatgccaatatgctgaaaacggtgaaaggtatcggactgaagaccgcacagcgtgtcattgtcgatttgaaagataaaattaaaaccggtgccatggctgcaactgccgtgggaggtgctgccggtgctttgttgccggcaatgaatgcggaagtacaggaagaggccatcgctgcattgaccatgctcggatttgccgctgcaccttcacagaaggcggtgcttgctatattgaaagaagaacccgatgctccggtggagaaagtcattaagctggctttaaaaagactttaagaacggacggagggggggcattgctgtcgcagattgcataatagagttacagcgcagaggaaaggaatgtgattgtttatgtaatctgcgatagggctttgtcgttgtgttggccttgttttcttgaaatgtgtgagtttaaatttgtacggtacatgtatattgggttatatcgatgattggaagtttgcttcccgcattatttacttcctgcatgaattccttacactcctgctctgtcattttctttctgcagtaagcataatataaaaaatcaagtgtagtcagataggtaatattattcttggagcaatattcttttatgtctttcaggttactgcttcccaatacgtctcggttgtccctgcaatagatcatgcatgcactttctccttttcccagagtgcgttgcaataaaaagaactctttcattgattccctctttggggaaaaaacttcttttttcaatttagggaagaaatggagatatttatctataaaatcttttgtaccggaattttgggaaatttcattatataccacatccaatatcaagtattcgtactcaggaaatatatcgggtaatattgagaaataattagcctccatgaaatggataattacatcagcatcgagtactatcttcgttttcttgtgttccattgatgtttattttatggagtaactctatatagtgaccttctgaaattttctcctgttcgaatagcttgcgggctttttcaccaaaatcaccgataaccagtccttcgttggccggttcgtataaagctgtgtcatatccgaaacatttggcagagtattttacttttatttctgccaatttggaacgtgtactttctgttataagtccgatattttgtaatctatacaataaagcggaacgggaaacggaaaaatagtgttcaagttttaggactgttgccatcgaaatgtttttggtttttaattccatttcgggtattaactggcatataccgccctccggcattaatagagaggaagcaaacatgtcggcacattgttctatcggatctttgctggcacatcccggattacatttgtgaggagtcggttttttctctatataaaggtggtataattcgtgagctatcgtaaagtgttgccttcctcgtggttgattagaattgataagcatgaaacggtgctctgaattatctttcaaacacattcctgagaagttgtcggataaaggtctgaaaacagtgagtatgtttagtttcaaaagtaagcttttcaaagtgataggctccgtagcgctaagtccattgtccatacgaaactctgagacttgcttctctatgataaacttattcggcttcattttgggcaatgcgttccattttgagataagactttacgatatctttgaaagttgctatttctttcaaatcattttctcctaaatttgaaattctaaaagctgtagccataatttcattattcgtctgaacattgtcctcaaacaatataaaaggttcacaaccgaataaatttgagatatcttccaaaatggtataaggaatctctctggttcctccttcataattactgtaagtagagcgttctatcttaatagattgggctacttgttcttgtgtaaaaccggataactctctaattttttttagattctctccaataatttgattaaccgttttcattactgctcttcttctgatttctgtggcaaaagtaccgataatttcttgtatatacaaatattgccacacaatgtttgctcatttatagttctttatctaatcgtgctttcagatttgaagagaacttcttgtgtggatgtgtttctatcatcggctttcagggagtaagatgtgaattgtctgaaataattttctgatacatcctcaaatccagttttttgccgaacttctccgctacctgccggatgtttgcgcaacattcgaaaccgcatttttcgaacaggcggatgctggcttcgttctctcccgaaatcagtgccattatgttgctgaagccttcttggcggatgatctcttccagtcggagtatggcttgttttccatatcctcttcctgtaaactccggtttcaggtagagggtcagctctaccgagatgcggaaggcttctcggggcttgaagcgtgcgaaatagcagaatccgcagggtgctccttcgggagtttcaatgatgaacgaccggtagacgggatcacctacggggatgtagttttttagttcgtcgatgctggcgcagtgtacaaagtacaccactgttgtgtggagggtataatagtcgtagatgtcttttacaaaaggcaagtcgttttccgtgagcgttctgagcgtaatatccattgccgtaaagttcataaattggtgcaaatgtagccaatcttatcagaaaagaagtacatttgtttccgtaaatcaacactccaattcatgaaactgcaaaaaatatatcgtcaactgtggatggaagtccatccgcgtccgcaatcggcagatactgatcaatggtatgtcgattttgccaacaggctgctgcccctatttgagaagtcggagcttaccggacagatgattcataaaaaccgggccgttctttatttcacctggtatctggaagattgtgtgaataattccggtggatggaataagttcatccggttgcacaagcggttgtacgggcgttttctgcccttttataccctgacaggggcgtatgccgatgatgaaataaattttgaggatgtgtcgttcctgttatggtcgcttctttctcctgtcacagacgattctccggttccttggaatccgacggataaatctctgcttcgacttgcggctgatatttatgcgctacttgaagcccattttgaacaagcccctcttaccgatgacgagtcgatggactggcttccggagattcgtgccctgttgcctcctccgggacctgttttggatattttcccggaaatggagcttccccatgatgtgagcaagttcctgaatgccacccaagggaagcagcttgtctattttgaggattatgcgggcttgcgccgtttctgtgtcgatgcgttggagtgggccgacgaagacgattcgttaatgcccgaattggccgatgaagaaaattttgtattttttgccaatccgaaaggcatcttgcttgctcccaatatcggtgcttgcttccgggatgaacgaaactcgacatataatcccgggattgccgaacaagaaggggccgagttgttttatgttcccggactttgtcccatcgacttgttgcactatgccatgcagcatgatttattgtccgaggtcacttttccttttgaggatggcaggagggtgttgcacgagaactgggattttatagcccgcagatatttaggcaaatattataatgaagatttttatgaagaagagcggaaatagcagtgcccgtccgggtaacggacggcccaaagcctcgggaggtaagaaaccttccggtaaacggatcggaaaatcaaagccctcaaaagccaataaccaactgaaccgtagggtgaaataagttgttacctgttataaacaagtgttagtatgaaatgggaaagtagcttggtggagcatctccaatggtcggacacgatcaccaaccgggagagtaaggagcagttagcccgtatgattgccatgcgtgtgcaagaaggggagattattggggcaggttccggatcgaccgtatatctggcattgctcgctattgccgaaaggatacgtacggagaatctgcatgtcaccgtgatccctgcctcgatggagatatcgatggagtgtgtccgtttgggcattccgcagactactttatggatgtgtcgccccgattggacgttcgatggcgccgatgaagtagatcccgatcataacctgatcaaaggtagaggcggagcgttattcaaggagaaacttttgatatgcagcagcaatcgtactttcattttggtggacgaaagcaagcaggtttcttttctgggaagccgttttcctgttcctatcgaagtgtttccgatggctctgccttatgtggagcgggaagtgcttactataggagctttgcgtacggagttgaggcttgctaaaggtaaagacggtcctgtaattaccgaaaatggaaatctgattctcgatgcctggttcggcaatattcattcgtctctcgagaaagagataaaatcaatcacaggagttgtcgagaatggattgtttatgggatatgatgtcgaggtgatggtagcaaaataagatcggaagcggttgatagtatgaaaactaaatgggaaaggtgataccacgcggatattacctctcccatttagttttcgttgcctacaagttcattgcattacctccaaggactcccagtatggcagatgccactgcgatcattacctttagaaccgtactccagcctgactttttcatttcttcaacacctcctttctatgtaatcctgatttatgccgtcgggtcatccacaatgtctccgtctccacctttttcagattctttaccttccagtgcggctttgatatcgatgaattcgattttatcaccggcccgggtcgatgtcaggttcggacgtacactcgatgacggacgaaagtttattttcactgccattatgtttttggccgtacattctttttccgtatccacccctttggtgcgtgccgaaaggctgaatactccaaaatcccggatattgactgattgtccgttatagagggaggtgcgcatcgcttctacaaaattggtgagtacgcttttaatatctcccgatgataacgaacttttctccttcatttcgtacgcaatgctttccaggcttgcgctttggcctaaagtgaccagttgcggataaaatttctctatagcatccgtttttcgcggatcttttctcgcgatttttttgtatggaactgccattgtctgatagttttttatggttaataattaagaatgcatccggaaggtcggacgagctctttccctttcttccggtatgtcaaagataccgctttgtaacctctgctttgtgcttgttgacgtgggttgaggcggtatggataaaagattgaaaatcaatgaatgttttgtgaaatagtatgacttctgctatgatatgtcgtttgtttttgttatctttatgctattgtaaagttccgattatttattaatttaaaattgaaaaacatgaaagatttagaagatgacgagagagagtttcctatccgtgtatatacaaaagtcgagttggctctgctttatgcaccccatttgtctgaaaatgccgccctcaataatctcagccgttggatgcggcacaacaaactcctgatggctgcgctcgaggaggtgggatactataaataccgccattcatttacgcccaaggaagttcgtctgatctttcgatatatgggagaaccgggagcataaggtgctggaaaaataatgaataattagtggattatggatattcgaatacatcgctaattttttaccctcagcagttgccgcaaaatttgcggcaactgctgagggtaaggtttatcagacagaacattataatcttagtatgattatatctgttggttttagagtaaaggctaaacgtggtgttgaatttaggagatgggcttcacattttcatgttatttatccccataatgactcctcgcagaaatgacttctaccgttacgatctcttcatgtattgtatagattatccgaaagtgtttattaattctccggctccaataacctgaaagacttcctttgagagcttctacctgaccggttcctgtagtagggtgtttttccaactcctgaaataaagagagaatcttttgaaaatcttttttctgccctgatttcctccattgaagcaattgtttttcggcttcttcggtcaaaacaagtttataaatcatatatccaacatttttctcatctcgtctattgtatatgctttagtccttccttgttttgcatcctcaataccacgcataacagatgccatattatcaggatcatcaaaccatccgtccccacttggactcggattggtagaaacttcaacgcacacagcattagcttttgcaaccagaaggctttcaatgaatgccttcaagcttttaccctgtgaagctgccataatggagagtttttgcaatgtttccactggcagatcaatattctttcttttcttttgtaatgctactgtttccataaacttgagtattttctacaaagatatataatatatatatgatgtatactatgtatatggaataaattaaattaatttcactctgtaatcagcggctatacaacagcgtcatatgtggaaataagatctttcacctttgcctttagtgaattcaccagaaagcttttttgatttcacaaagatgaatatttttgccagcgttattataaactctattgaactttggtttttaaatgccaaaggggaactttttgtcaataaaacgccaatatatgtcctgccccgtaagaatatatgtaatcgaaataacatatattcttacggggcatttctcttctatttccttccctccggtacttttaaaacgggagttcatccatttcctttcccttatcccttttcctgaagttttcgctcacctcctgttgtgtgagttccactacggcatactccgtgatgccatggatgtttacacgcttgccgaaggtatccctttccagaatctgtaccaacacttgttgcgtttgcgcgttggcctgtgtccgtccgtatacagatagagtagccagtattgcggcggcgggtttccatttcacctcaaagtccttttctcctgccggacggaagtaaacatacaggttctcttccagtgggtctttcatgcggtggcgttcgtttcgggtgttgatgtcgtctatctcgtttccttcaaaccaatagcggaaaccgtcctctatcagttgcaccgcctgcgcgtacacccctttgtggtctaccggggtgcggtagtcgatggtctttacaggaatgaccaggaagcgccggtttcctccgtaatccttgaggaactgcatgttgttggtgcttccgatgaacgatgccctgcgtggatacagttgtgcctgggtgtcatacactttccggatggtgacgttttcttgcccgatgattcgttttagttcggcgatgtcccccgttttcacaccctcaaactcttccatgttgatcagcaggcgggtggacagcagtaagaggtcgtccttgtttgccggatctatcattccgtttcggtaatactctgccagttccggaggcagcagatgccttatccaggtactttttccttttccctgtgctccgtgcaacaccagtgcttcttggtttgctttgcccggtcggagggccgaggccaccatggccacgatccaccgccggaatccctccctccagaactcctgatcttccgcctgtatggtgtccgccagttttctgatgtggtcagtcttcctgtcccaccgggcatttccttcgaagtagtgcgtgaaggggttgaactccggtgaatagtccgagtcgatgaccgatttcaggctgttgagcggataagctatgccctgcctgctgatgttcaggaagatggagttgaaatccttgttccgcatggcatagaaagatttctcttccgtttgggataagtcgcacatctcgaggcggtcgagcaccgtgtttcgcctgaaagcataattcttgttcagataatctatcacctgttccacgagtggtatctttttcttctcctctgcccgttccgtcctgtcggtatatgtgtaggcgtttccgatgggtgtgtccgtgtccatccctcctccgtctcccagcctttccgccgccaggcgcttcacttccgactcttcgagcccttttcggaaacatttgtttcccagggtgaagaggaacgaattgcggcttccttccgtatatttcatcagcctttgcgtggagcagaggcatttgttgaattccatacacgtataggcgctgatatctcccgtctgtcccgtttcgggttctttctttttcttccttcccctttgtgcaggttcgggagcttcgatggtgagtgtccgttcggggatgcgtgccaccctttcggcagagtaaaatgccttcgggtcatacgaggcgaagacacctctcgacaagtcttttccgctggtgtccacctctgtttgcagcagtttctcgtagtgtttccgggtcagttcgtagatgcctgcgtgatactgttccagtctgtcgtaggtgatggttgctgtcttgaagaacgagtttctccacgcctccgcctcaaggtctgtcaggtaagccagaattttgaaaccgtgctgcttggcggtgaggaaacaggcgagcgtcgcttcgtcggcttctatcagagcccgtatgcgttccagttcctcttcccgcagcttgtcgatgtcgatggtgctggtgtcgttgtatgcggctatgctgtgcgccagcctgcattcatgatagtttgccgtgacggtgaagtagtccagttgccgcttcacattctccgcctccttggtttttccttcactgaccagccttcctattttctctatcaggttggcgtattgtctgctccgtacccatccgatcaattcctgcagtgaacatttccctttcactttgctgaaacccctgtaagtggtaatactaatgcttttcatctttcattttttaagtttaacataaatctttgattgcaaaagtacggggcttttttgtacccctgttagacgttttcatccagaaacaggctgatatcgtctaatagatttataatcaagtctttatcttccgcttttttcatgctttttaatatccttagtatcttaaatatctcagtttcaatggaatccggcttcatctcctcgttgctgttgtgtttttgtccgaagaacagtgaccggtgcatgatctttgccagttcccgtatgttttttctctttttgggatctttctgctgatggttcagccatacgaaaaagaagatgacaagctccctatgcgagcctatatccatcttttctatgttttcttccagtgcttccaacactttctgtccttcgtcacttttttcattgacgattactacgtaaggggtatttcccatgtttaataccactccttcattcggttttttttgctcatttcgtctaataagtttttttattacgaatgcaaaattagtggttcttatatggatatttctatatatacgcgtatattgtttattttatattgatgtttcgctccgtcaaacaaataggtaaggtatacctgacctatttacttaacggggtgaaatagattaaaaaagaaaagattatgcgcatgggcgtacgcgcgattatatataatatattaagtttcaggaaaatcgaattgtaaagaaaagaaggcgtgtttcaaaaaacgttcgttcaatggaacaaaggtaaacagtatttttactatagcaaaatatttttataaataaattcatttattctatttttatcttcttcatgatactgtaaatcaatgaattattggaatctaaaaaaaatagattttctttttgaatttttctttttgtccggttctgaatttcatcaaaaatgatgtttcaaaagacgaacgttttttgaaacataaaccgtatctaatatcttcgttcatagctaattagtctttaaaatcagcgtttttacgaaatcggctgttttttgaggcggtcacataacatttcagcatccttctactgtgataggggagggttttgagatcacatgaatgcaagcaagactgatattcgcattacatcacctgaccgggaggtactttcgtactccggtgtccccaaagaacatccttttgtgaaggaatccccagagctgttttggtatgccgttcgtgtcacttacagccgtgagcttgctttaaaagagtatctcgatggcgaatgtatcgagaattttatccccatgcactacgaatacatcgtcaagaacgagcgccgcgtgcgtaaattggttcctgcggtccacaacctggtgtttatccgttcgagccgtgaacgtatcgatcgtatcaaagacgagatgggcatgacccttccgatccgttatatcatggatcgtgaaagccgccagcccattgttgttcccacttcccagatgcgcagcttcatggcggttgccggcagttacgaccagcaactggtctatctcgaaccctcagccgtagctttccgtaaagggcagcgtgtgcgtgtgacaggaggcatctttgccggcgtcgagggtgagtttatccgtgtgaaaaacgatcggcgtgtgatggtttccatccagggtgtcatggccgttgccaccacctacatccatccctctctaatcgagccgctcgatctttaaacagtaaaatagcagacaataaatcgtaaattgtaaatatttccatgaactctttagattctcaaattaccgctttgtacaccttggcgcacgaacttctttatctcggttccgatggcagccccatctacagcgaccacttcagccggttgaacggtgatgtactcagtcgtgccaatactttatatccccatcatggctccaccgacgaggaagaagcccgtttgtgcctttcgcttctgatgggttataacgcgacgatctacaataacggtgacaaggaagtccgcatccagcagatcctgaaccgttgttgggaagtgctcgaccgcttgcccgcttccttgctgaaggtgcgccttctgacttattgctatggtgaagtctttgacgacgacctctcccgtgaggcgcatagcatcatcgacagctggggagagcgtgccctttccggcgatgaatgtgagattgccgaacaactccgcagtcttgaagagaatccttatcccaactgggaagtagaggagtaaactcttttcttttttgacacaacactgtatataacctaaatcccctttgtcttgaatatccttttcatcatattggcttttgtcatctctgcttcggttgcccggcttatcattccccgcatcctgcttatctctttgcggaagaagcttttcgatatgccgagtgagcgcaaggttcataaacgtgccattccccgtttgggcggtgtctctttctttcccaccatcctgctttcctcctgtggcgtgttcgcccttcgcatcctgatgggttatgatgttcccgccctccgtgcggtgtacttgttgcccgagtgcttgtttctggtctgcgggatgactttgctctacctgacgggtattgccgatgaccttgtcggagtgcgctaccgtcagaaatttgtgatccagatcatctgtgcttcgttttttcccctggccggcctttggatcaataacttctacggtcttttcggcctgtatgcccttcctgcctggataggtatgccttttacggttcttctggttgtctttgtcaccaatgccatcaatctgattgacggtatcgacggtcttgcctccggtctgagcagcgttgccctgcttgtcttcggcttcctgttcatgcagaaagaactttggacgtacagcatgctcgcctttgccacgttcggtgtgctggtccctttcttttactataacgtcttcggcagtgcggaacgtgcccgtaagatttttatgggtgatacgggcagcctgactttgggctatgtgctctctttccttgccatcaaatacagccagtacaatccggatgtcaccccgtataccgaaggtgctttcgtgattgctttcagtacgctgattgtccctgcgttcgatgtgatccgtgtggtgatggttcgtgttcgcagtggcaagagccctttcgaaccggacaagaaccatattcatcataagttcctggcaatgggtttcacaccaagaaaggcgatgataacgatcttactgatttcttgtgcgtttagtgcggtgaatattctgtttatgccctatgtgaataatacaataatgtta

SEQ ID NO: 5045 - DNA, 17085 bp, Unknown
  gut microbiota DNA sequence
tacttaagtattgccgggggaaaagcccggaaaagtgttctgatggttcaggatattgcaaatcttcttcctatgttaatagaaaagggtggaatatataatgtttgtgacagttaccagccgagttttcgtgaactggagatggtgatatacaaacaattgaataagaagttacctttgtctattccttattggtttgctaagagtatggccatttttggtgattgtttcggggaaaaggctccaataaacagtttaaaacttcgtaagatcacgcactctttgacttttagtaatgaaaaggcaatgcgggagcttggatggaagcctatgaatgttctgaaaaattttcggatagaataaggaggtgttctaaatggaaatttttctttggattataggaatcttaataggaattcttttttttgcctttttaggacttcaactttggttttatttcattaaaaagaacgaatagtttatgtactatctgataatcttagttctgctatttctggcagaacttttttattttcatattgccgataaatataatattattgacaaaccgaatgaacgaagttcgcatacccggattacactgcggggtggaggaattatcttctacttgggtgcattggcttattttctgacaaatcagtttgagtacccttggtttatgttggctctcactctggtgacggtgatcagctttgtagatgatatccgctccatatcacaaggacttcgtcttgtttttcattttacggcgatgggcttgatgttctatcagtgggagttgtttactcttccctggtggactgtagttgtggctttgatcgcatgtacagggattatcaatgcctataattttatggatggaattaatggcatcacggggggatattcgctggttgtacttggatctttggcgtttatcaatcattgggttgtttcgttcgttgaaccggatttgatttatactatgctgtgtgcggtgttggtctttaatttctttaatttccgtaagagggcaaaatgctttgccggtgatgtggggtcggtcagtattgcttttattattctgtttttaatcggtaagctgataatcgatacggaagattttagttggattgtgcttctggcagtatatggagcagacagtgtgttgactattgtccatcgattgatgttgcatgaaaatattggtctgcctcaccggaaacatttgtatcagataatggctaacgaactgaagatacctcatgtcgcggtgtcattgacctatatggtggtgcagggcgtagttgtggcgggatacctggtattgcgggagtacggatatgtatatttggcaggaagcatattgctgttgagtatattatatctgttgttcatgaagagattctttcatctgcaccagttttgagttagtcggtggtgggaaataaaaagaaaggcgacttgattgcaagccgcctttctttttatttaatctcaaattcttccttcatatcaatctcttctccatgtgaatcgtagaatacgtattcaagaaaagcgagtttctgactcggaataattttaataccaaatccgtatttcatctgccatttgcgtttcagcgacataagtccctgattcaaataagcagccacatacgggtggatgtgcagtgagaatttctttatcttcagtttattgaccagataatcaattttactctccagtgtgtccgtaaagaggatggacgatttgatggtgcctttaccaaagcaagtcggacaggtttctgtagtgttcacgtccatggccgggcgaacccgttggcgtgtaatttgcatcagtccgaatttgcttaagggcagaatgttgtgacgcgccctgtctttttgcatattggcacacatacgttcgtaaagcttctgacgattttcggcttcattcatgtcgatgaaatccaccacaatgataccacccatatcccttagtcttaactggcgtgccaactcatcggcagctcccaggttaacttcgagtgcattaccttcctgtccgttggcattcttggtgcggttaccgctgttcacgtctactacgtgaagcgcctcagtgtgctcaataatcaggtaggcaccactcttgtaggatactgttttaccaaaagacgatttaatctgtttggtgataccaaaattgtcataaatgggaagctgacctttgtataatttgacaatgcctgcccgttcgggggcaatcagtgtcacataatccctgatttcgttgaataccgcttcgttgttgacgtagatattttcgaacgagggattgaaaaggtcgcgtaacaaggctacggcacggctggtttcctcataaatcagtgtaggaaactttgtagccttttgtaccttggtgatactttcttcccagtgcttcagcaatactttaagctctccgtcgagttcggcaacacgtttgccttctgccactgtgcgtacgatcactccgaagtttttcggtttgatgctcatcagtaactgtttcaggcgcgcacgttcttcgctcgatttaattttttgagaaacggaaaccttatcattaaaaggaatcagtaccagatatcttcctgcaaacgagatttcggaagtcaggcgtggtcccttggtagagataggttcctttacgatttgcaccactacttcttgtcctacctttaatgtattggctacagtgccatccttgtcaaggtcgggaagcagggttgctttcgaaatgggattaagcttttttttgtcgcttaaagtctgctttacgtacttttcgagtgagttaaattgaggacccaggtctaaataatgaaggaaagcatctttctcataaccgacatccacgaagcaagcattcagtccgggcatcaatttcttgacacggcctaaatacatattgcccaccgaaaaagaaatatttcttccttcgctttgaagttccaccagactcttgtcctcaagtagggcgatggatacttctttgggctgtacgtctactactagttcgcttgtcacctctatttcctatattatttaattttgtaaaaaatgaacgaataactcaatgggtttgttcattcaatcgggtatttaaacaaagaacaaactcgaaagacatagcttcacaagtttgttctttatttctgtccagattcagactaaaaattactttttgcttttatgtctgttctttcttagtctttttttacgcttgtgcgtagacattttatgtctttttttcttctttccgcttggcatagcttcaaaattttatgggttaatactcttgtttattatttctttaccgaaagggtgaatgtcttagctggtttgaacgccggaatgttgtgttccggaatgatgatagtcgtattcttagaaatattacgagcggttttttgagctcttttctttacgacgaagctaccaaatccacggaggtaaacattctcgtccttagacaaagaatctttcactgcatccataaatgcctcaactgttgtaagtactgttactttgtcaacaccggtgttctttgcaatttcgtttacaatatctgctttagtcatttttccttaaaaaaaatattattactatgttctttctaattttttggactgcaaatatatagctttttagtctcccaaaaaaatatatcccgaacaattttctaaaaaagtcgcttcattaagctttcttagttcgtaattaaacgaaaatgactacttttgtgcaaggataaagttaacaaaaagtagaatccgtccaaaaagcatgaaccggaatttcagcaatgcaatagagaattggtacaaggaatataaacgtgaacttccctggagggattcggcagatccgtatgtaatatggatatcggaaatcattcttcagcaaacgcgtgtggtgcaggggtacgattatttcgtccgctttatgaaacgttttcccgatgtcgccactttggccgaggcggatgaagacgaagtgatgaagtattggcagggactgggctattattcgcgtgcccgtaatttgcatgccgccgccaagagcatgaatggggtgtttccgaaaacttatcctgaggtgcgcgccctcaaaggggtaggggagtatacagccgctgccatttgttcttttgcgtataacatgccttatgcggtggtcgatggaaatgtatatcgagtactgtcgcgttatctgggcatcgatactccgattgattctacggaagggaaaaaattgtttgcggctgtggcggatgaattgctggatagaaagaaccccgcattatacaatcaggctattatggacttcggagcgatccaatgttctcctcaaactcccaactgcatgttttgtccattggctgacagttgtgcggcgctggcaaaggggacagtggcggagcttccggtcaagcagcacaaaataaaaacgaccaatcgttatttcaattatatatatgtacgcatgggcgtgcatactttcataaataaaaggacgggaaatgatatttggagaaatctgttcgagcttccgttgattgaaactccggttgctgtttcggaggaggaatttttggcactgcccgagttcaaggcattgtttgcccccaaggaactttcggtagtccgttcggtttgccgggacgtgaaacacgtgctttcccaccgggtgatttatgccaatttttatatagtagatcttccggaagatagtcattcgtttgctgcttatcaaaaaataaaggctgaagagctggaacaatatgccgtctcaaaactggtgcatgcctttatagagaaatacatcgattgaaatagaaactgaatatattttgttgaattataaatatctaaaattatgaaacgaccttacttactattagcctgtctttctcccgtagcttgcctgatggccgcaagtggacaaaaaggaggaaaaaacaaacagaaggtgaatgaccgacaactgccgaatgtggtgtttatctatgcagatgatttgggatatggcgatctggaatgttatggagctaaaaatgtacaaactcctaatgttaaccgtttggcatccgaaggtattcgctttactaatgcgcatgctactgcggctaccagtactccttcacgttactccatgcttacgggagaatatgcctggcgtcgtccgggaacggatgtagcagccggaaatgccggaatgattatccgtccggaagattacacgatggccgatatgtttaaaaattccggttatgtgactgctgctctcggtaaatggcatttgggactgggagataaaagcggagagcaagactggaatgctccacttcccgctgcattgggggatttgggatttgactattcatacattatggctgctactgccgaccgtgtgccctgtgtatttattgaaaacggaaaagtggcaaactatgacccgagtgcccctatcgaagtcagctaccgcaaaccttttgaaggagaacctttagggaaagatcatccggagctgttgtataaccagaaacacagtcatggacatgatatggctatcgtaaacggaatcggccgcatcggttatatgaaagggggaggcaaggctttatggaaagatgaaaatattgccgactcgatcactacacatgccatcaactttattcgcgaacataaggatgaaccgttttttatgtattttgcaacgaacgatgtgcacgttccacgctttccacacgagcgtttccgtggtaagaatccgatggggttgcgtggagatgccattgtacagttcgactggagtgtagggcaaatcctggaaacacttgacaagctggggctttctgaaaacacattgattattctttccagtgataacggtcctgttgtggatgatggttatcaggatcgtgcagaggagctgctcaacgggcacagtccggcaggtccgctgcgtggcaacaaatatagtgctttcgaaggtggaacccgtattcccgccattgtgcgctggcctaagaaaattactcagccgcaggtgtcggatgtattggtttcacaaatcgactggctggcctctttagcttccttggttgatgcaagggttcccaaaggagcggctcccgatagttttgaccgtctgggcaactggctgggaacggattctaccgaccgtccttgggtgattgagcaagcctctaaccacacactgtcagtacgtaccaaggactggaaatacattgaacctaacgacggccctcacatgataacctggggacctaaaatagaaacgggtaatctgagcattccgcaattgtatgacatgactaaagattatgaacaagagaatcttgcagagaagaatccagccaagctttttgaattgcaaaccattttgagaaaagtgcgcaataaaacttatagagctttataaaagttgtaacaattcttgcattctattgttattctatttaattttggcaacgaaattcggtatttagaaacataaaattctgagaatatgtcagtaaataaagtgatattgataggaaatgtcggaaaagaccctgaagtgagatatttggatacaggtattgctgtagccagttttcctttggctacgaccgaccgcgcatatactttgtcgaatggtacacaagtgcccgaacggaccgaatggcacaatcttgtcctttggcgcggactggcagaaactgccgaaaagtatgtacataaaggtgataagctctatgtggaggggaaaataagaacccgttcttatgatgaccagaatggggctaaacgctatgttaccgagatttttgtggataatatggaaatgctcactccgaaaggtaccggttcgggatcgtatgctccggcacagcagcaggctgctgctcccgtgcgacctcaatcgcaacaaccgcagcaaccggtgtcttcgcaagataattcggcggatgacctgccgttttaatggttaatggctacaagttaagagttagaattgccatccggcatctaaccttaacttgtagtgataacttttagctgacaacttgtggcacatgatttgcatgtagctacttattattaacttaaaaccaatattttggacccagacgcttatttatgccaattggcagaaatttttaacggaatatccgtaaacacaccttcattatcggcaataatagccattattctggcaggtttgctcctgctcgcctcgggctttgcttcggcatccgaaatcgctttcttctcactttcgccttccgatctgaatgatatagaagaaggcaatcatccttctgatgggaaaatcagcaatctgctcgcagactccgaacgtttgttggcaaccattcttatcacaaacaactttgtgaatgttaccattatcatgctctgtaacttcttcttcatgaatgtctttgtctttcattcgcctcttgcagagtttttgatactgactgttatcctgactttcctcttgttgcttttcggagagattatgcctaagatctattcggcccagaagacattggctttctgccgtttctccgctccggtcatctatgtgttgcgtaaagtatttgctcctatctctgctgtgttagtacattctacggctttcttgaataaacattttgccaaaaagaatcacaatatatcggttgacgaactttctcatgcccttgaactgaccgacaaggccgaacttacggaagaaaataatatactggaaggcatcattcgttttggtggcgaaacagccaaggaggttatgacttcccgcctcgacgtggtcgatcttgatatacgtactccttttaaagatgtaattcaatgtattatcgacaatgcatattcccgtatccccatctattcgggcacacgtgataatatcaagggggtactttatatcaaggatttgttgccccaccttaataagggtgacaatttccgttggcagtcactgatccgtccggcgtattttgtgccggaaactaaaatgatcgatgatcttttacgtgattttcaggcaaataagattcatattgccattgttgtggatgaattcgggggtacatcgggaattgtgacaatggaggatatcattgaagagatcgttggggagattcatgatgaatatgatgatgaagagcgtacctatacggtgattaacgatcatacctgggtgtttgaggctaaaacgcagttgaccgatttttataagattacgaaggtcgacgaagatgattttgacaaagtagatggagatgccgatacactggccggactgttgctcgagataaagggagaatttccggcactccatgagaaggttctctatcatcgatacgaatttgaagtgctggctatggatagccggagaatcctgaaagtgaagtttaccgttaacgagccttccacagaggaagaagtttcctgatatcagcttttgccatggctttgttacgggaatataaagaaattgcttatcagtggggaatctggaaaacagaagagtccccggaagaacttttggcactgttgcccgatccggaaagatatgagcaacagttgacgcgcttttcttcacctcatcgtaaattggaatggctttccgtacgtgtattgctatatcagttgctgggggaggaaaagacaattgaatatgctcccagtggcaaaccccatttggcggattcttcttatttcatcagcatttctcacactcgcggctatgtcgcagttatactgagtcccgtgtccgaagtgggaatcgatatcgagcaatacgggcagcgggtgcacaaggtcgctcataaatatatgcgtccggacgagttgatttctgaatatcatggagaagatacctggtctttacttttacattggtcagcaaaagaagtgatgtttaagtgtatggatacttcagaggtcgattttagggagcatcttcgcatcatgccgttccaggtatgtgaacacggggagtttccggcggaagaataccgtacggaacataagaagaagttcatgatccgctatttgctgcatccggactttgtgatgacgtggcaagtgacatctgcgtattccgtgaatgaatgtgatattatgaagaaaatgcaatgataaagcgtatcctattattggcgatcgttattgggggtggtatgacaaccgttgctcaaaacagcatagatactttgtttatgtctgtcagtcaacgtttgtccggtcatccctctgaactcatctatttgcagaccggcaaagatatatatgaaacgggagaagatttatggtttaaggcctatcaattggatgccaaatcgttcgcgctgtcggaacaaagcgaaacgctctacttgcagatgcttaatgataaggatagtgtggtttgggccgaaaagtatcccatagagaaggggattgctgagggccatgtatatatagatacaaaattatcggagggcaattatcggttgggaacctatacccgccactcatattataatgatacgaccggaatatctccggaacgtaaaatcaggatagtcaggaatatcgctcttgattctttgccggagcatcgagagaagccgggtgagttccggttcaatctttttcccgaaggaggaaatctggtctcaggtttaccgttccgtttggcgtttaaagcgacgggcagcggaggatgtccggtcgatgtggaaggaacattgtatcaggatgaaattcctgttttgtcttttaaaagtagccacgatgggatgggagtcataccttttactccttcctccggcaaagaataccggatagagctggcgaacgggtatagttatgctttacctgaaatctatcggcaggggatggggctccggttatccgggcgggacgggaaacagcttgaattccttatttcccaaacggaaggattgtccgatcaggaggtatatctggtgggacagatacgaggaaccgtctgctgtgtggcaaaagggttgctgaaagatcgtttgaaaatgaagatacctctttcggagtttccttatcagggcatagcggagtttaccttgttcaatgcggctatgcagcctgtggcggaaaggttggtatatgtgcatccggaaaagaagcttcatattgatattgtaacggagaaagagagctatgttcttcgggaaaaagctacattgaaagtaaaagtgacagatgataatggacagcccgtgaaagccgatttgggtatcagtgtgtttgacaaagcatacagcaatccggatgaccgggtgaacatgctggcttattgttatttgtcatcacagatacgtggtgttgtctgccggccggcttattactttgacgagaagaatgctgatcgtatgcaggcaatggatctgttgttgctgactcaggggtggaggcgatacgtctgggaacttaacggaacggttcgtcatggcgagatgtttttgagggatgatgtaacgggaattcagaccttgggcagtaagaagaaaagtaaaggaacgggaggtgctaaacaacttattcaggtttcgggcgccgaaggaaattccacctatctgatgacggattccttggggcgttttacggtcgatactgatttgatgaagacacttcgtggcgggtatgtgtatctgaaacccatgttgtcgaaagagtttaaacctgaattggagattcaggattacttccctgccatcgatagcatacggagaaagaagtcttttgactgctcgctgataaattgtacacagagacccaaagaggagatttacgatgcaccggtcgtgagtggtgacagtaccattctgctggatgaagtggtcattgcccgcaaggctcgtaagccgttcagagataagcttatgggacgtctggatagtttggctcaaatgaatctgaatagtgtctatgtttgtacttcgtgtgggcttttattgaattataatccggattatcagggacatcatgcactggtgggagaaggtggatgtccggctaagggaaggaaacaaccggttgacggagaaacttataggatagccaagtataaatattatggggacgcaaaaggtgggggagtctattttagtgtggtcgatgcacattccgtggtttatcatgctgctgaatttaccgaagaggaactgctccgtatgaataatatgtggcgagtgaaagggtattacggtaagcgtgagttttaccaaccggatgaaatagatatgcagttgcctgtacctgatgcccgcaatacattgctatgggcttcgtccgtagtgactgacgaaaaaggtgaggctaccgtttctttttattgctccgacattaataccggttttattggagtggcagagggagtagatggaacaggacttttagggactgatcaatgtgagtttagagtgatcaggagagcagactaaatcttataaccgcagtttgtggacggagaggaaatataaaagtcgccgggaatatcgtttgaaagatgtttccggcgatttatcttatttctttagtttataactcaacgctcccgacggacacattttgatttgggcaatcagttcttccgtggtagcattctccatctttatccacggacgttctttcgggtgatatacgttaggcagtgtctttacgcagattccggcatgccggcagagttccggttgccatacaatggtcagttcgccattgctgtattctatttgttttcccataactgtttttatattattgaatgtgaataccacgaagtacaatacgcttccattccggatgcttatgtatatatcccgcaacgaacggacagagaggaaccaggcgcaatccctgccgttcaatgtcagtgagaactttctctgcaagttgtgaacctattccgtgtcctcccaaggcggccggtacttcggtatgtgtcagatagatctctccatttaaagattttatgtattctatccggggaacataaccttcaacatgaaattcatattgatgtttttcttcattatctatcagttcataattttcagtcataatcttcttacttttaaatcttgttttattctacaacatttagaggataaactttgtttcctcctcttgtttatttatgaatcatttaaacaattggatgacgggatataactttaacagataataatgattcatggcaaaacaaatgcataatctttctgttgatatttgacttatgcggagcaacggtgcctcgcttacaaaactaccatagggaaagtatctcggttttaggatactgatttctgagtgattgaacgaattgttttatatttaaactttagagattatgaatagaagagtaatacagatcttctgcatggtagttggcatggtacttgcttcctcttgcggagacgaatgtccggtagaacaaccttactcggttagggtatctgttaaggacaagaactatttgaatatatcgcagtttccacagttgagccaggtagacgaaaatctgcctttccggacttatgcgggaactctctattacgccctgtacgatgcatctaccggagcattgatcagagagtcggcggtcgtctctacggaaggtgaagaaaaggaatacacccttacttttccgggcgtacccgacggtgactacaaattggccgtatggggaaatctgaccacggactatcccgccggtatcttgcatcaggatgggaaggaacatacggatatttatgtgacaagcggggacttgcatttctctcccgattatcagacagaagaattgacactggaacgcacgaagggaaagttgttactgctctgttcaaatttcccgtctgagataacacgcattgaacagaatgtaagtcatgtttatcagtcgacggatgccggcctcaactattccggaagcactcaagttgacaaaaatgtgccgttcaccagtgtcctggagacattgcttgctcctacttcggcagagggacattccaaattaactttgactttctataccggtggtacacgtgcatcagaaactccatatctgaaattgccggtgatggagatggatatgcggcgtaatgaaataactgctgtttctatagactacaatacatcagaaggaatctgggaaatcaagatgttcatccgtggagaatggatcacgatacatcgcctggatattttctgatcactttttctcttatctatttattaaactaaactttgctattatgaaaaaattaatgtttctggtggcagcaagcttatttgtgtttgctgcttgttccagcgaagatgattcttcacccgaagtgaatcctgaaaatgctgcaattacatttgagctgtctgcggttaatggtctgacagacggaattggaacccggatgccggtgtatagccaggaggccacacagcatgtcactcatgtcagtgtttatgcttttgtgcagaacggctcgacctatctgcatcaaaagacttatgatatcaccggctggaccgatggtactacctttaaacgtttcgctgttcccgatgcggataaacttcctgtcggcgtatataagtttctggccgtaggacgtgatgcaactgaccgcttctctgtaactacacccacttccggcaataccaattatacggatatgcttgcttctattgtgaactcgggcgatgaatcggaaatctttgcgggttcggccgatgcggaagtgatggcccagggaggaactcgtgtcagcattgagatgacccgtaaggtggccggtgtgctgggatacttcaagaatgttcctcaagtgctaaacggaagtaccgtgaagtatctgcgtctgaaggtcagcaactccaaccaacaggtgaacctgactaatggtgtggggatcaatacagcgcctactccttataatataatagacatggatctttccgggcaggctgtttccaacggtgtgtatgtaggtaacgatctttccggtcagggagtggtaaaagtacctaattcgcaattgggaggttctttctatataccggttagtagcgtgagcatgactttgggactttatgacgcaagtggtgtagctatcaaggagtggaccgtgagtgatactaacagttcgggagcaacacagttcaatctgatggccaatcatttttattcattgggtgtgaaaggtgctacgggcagtgtagatggtggaacaccggggaatccgggtgacgatgacgctccggtagatttattgaccgaccagaacattgtaatcactatcagtccggcatgggaactgattcataacctggtgatccagtaaaagtaactcaaaaacagaatcatggtatggctatgagaaagacaggctatataactatccttctgacgggatttctggcaacgctcttgttgggtagctgctcaacagatgatgttgccgaactccccttggaagaaggggttccggttcgttttgaaataaagcgggatgggatcatgagtcgtgcgccaggagatgcagctctttctgtcaacaggatattgattctgccttttcggaaaacggatgaggcatcgtccaacgatgcagctaatttcattccggaatatagtgcagcccgacaattggacgtcaactcgtttccggcagtagtcacgatgcttactctttcggcagcctctacctatcagttgttggtgatcggatataatcggagtgattatgattttaccggtggcgggggtgcgacgaaacggtttaatatcggttcgacagatactccggctacattggctaatctgtatttgcaaccggtcaatccgacggtagttccggagttcttcttgtgtttcggaaacggttaccggggtgcaacgttggttggtcccatttttaaaccttcacagatcaactatgtgacgggtacgctgaaaaggctggttagcggttttacacttgaagtgaccaatgttcctgcgtatgtcaactctatgacattgatagccgagcaacttgtgacggctacccgtgcaacggatgggacggcactgacatggcaaacagccggtgacggcggtacgaagacgttggctactcaggcaccggtttcgggaaaagtcagcttcaaccagtttctactggctattccggatagtagaaagactctgttctatctggatgtgtcctatggaatcttcaccgaacgttatacggtgaaactgccggatactccgggtgtggtttcgggaaaccggattatctttactcctaatcattgggtgaaagtgaccggaaattatgcgaatatcaatataggtttcactttggcaggaaacatcaatctggatgacaatgcctgggatggccttcaatagaaactgaaagcaaaaagaaccggagatgaaaacgaaagtgataataatgatgagcctttttatttctctcttcctgacgggatgtgagaaagaactggtcgaagtgcccggtgaagttcccgggcaacttcctccggaaggtaagccttcggacttgcccgacggatattttgaagtaaccttctcagccggatacggaggaggagatacccgtacacccgtcacagggactgattcacgggttcgccacctgcgttacgtcatttataagtcgacaggtgagtttgtgaaagaaaaggtggtgctgaatactacggatgccgctccttcctggccgatggcggccttgaaagatacgcttccgaaaggacaatatacagctgtatttctggccaatgtagagaaaacacagttcccgattcccgtttcgggcggaggaaccaactatgtggatgtgctgacgaactaccagataacgcgtgcgaatgcccggatcgtgttacccggtgccgagtttaccgacacttcggaattttatctggccaatgtatctttctcggatacctctgctcaaccttatgtactgttgcagcgtattatcagtatgctgaatttgcgaagagtgtttgtggatgcacaaaccgctttgaattctctgaccaataatattgtgacgcaagtagggtataagaatataatccggacaacggtacaaggcattttgcctgggttactgaaaacggcaatgaacttgggaccggttggtaatcttgtctatgacgttgttggcggactcgatgccgcagtcaatctggtggtggcagcattggtagaaccggtcgtggatgcactgtatgcacaacttttgcaagggctggtcaatcagatagggctgactctttccggtaatgccacgcagaacggtgcattgggagcgttgggcgatttactgaatccctggcggggcagtgatgctgcttatgctttagtgactataaacaacttcccgaagactatggacttagacctgaatgtaaaggatttctatacgggcaatcatcgtttccggtatggattcacacctacacccggtacgacaaatagtgagaaagatattctgatcagaggttttcatggactatatgatgtgcgggagattcatgttgccaaacccggactgatctccggactattggtggatgacgtgattgacggtccgttgttactgaacggagtgtttgtgaatatcacagatccgatacaggcaacagtcaatacgaattaccgatatcgttcgaactattcgtttgtcagcctggggttaaaatcgtatgcacagcagagcgacggaaaccattcgctgacactctctgtacagttgaagaatattgctaacctggatggtatcttgggaggaattcctgtgctcggtcctgtgttgaatggaaccgttagattattgattggcaatataacggttaccgttccggtgaatcttcctttgcttggaaccgataacctgacgctgtccggtagctggagtacaccaccggtgcagtattaaaaaataaaaggggttgtgtcaaaacgttgatacaaccccatattt

SEQ ID NO: 5046 - DNA, 82759 bp, Unknown
  gut microbiota DNA sequence
ttatttgcttttgtgttccggattgaccatcagccacataaatattagtatttaaataatgcgcaccatagccatcctcagtgtaaataagatagacatctccattttgaggattcacttgtatgcctgcaccatatattgattgtattttggaaggggctttgaaaaattcttgagcaattttgctttccgtgttgtatttgtagatgttttttccatagtaactatcgccataagcacctggcacgacagtagtattaactatatacaatgcattttctgttgtagatgcacataatcctgtaggagtatatgcccattgattataaaacacatttatattatcaggtagctcaacagtggtttcgtctaacgttttaggatcgatttttattaacgattggccgttggcggcccagatatttccatcttttgtctgcgcgaatcccgttttcattaaagcggttagtttttttacgaaagagaggtcggaagatttgtagatctttattgtatccatattatttacgaatacataatcgcctgactttaagatgtctttacagccatttccgttggctgactcgctattgagttgtgggagcatattgccgatagataatggatttaaattaattttataggcacctctgcttgcggtcaatatacctgtagtttcattaattgtacagaaactgtttgcttgtccgtagtctaattgttcttctatttctgtacttaattgtttggtgatgttgaagttagccagctcgatttgggttagatatggagcatctttagctacgatatacatgtatgaatcttgaatgactccaacagttcctgtttggccaagtgattcaacaatgttaaagttccattttccatctttataataatttacggaggctggatcgtgacctgcccatccttcgttaatcacatagaaaccaccgtaatatgcgaaaacatctactgttatttgggctttatccgtgttccctttagagtcttgtgcttcgaaaatgatctcgtgttttcctccaaccgaagtgctgaaagtgtagttaacctcattggatacctctttgccatctattttccaagaatagattttagggttaattaggtttagggtaggctttaaagttaaatcttcacctttagcaatgatagtgtcattgggaagactcagattttcgaaattcgtaggataataatatttatcatcatcgtcattacatgaagagatgattattggcaaagcacaaagtgcaataaagcacattttagtaattaaagcatttatttttttcatgttacaaaaattaaatatataaataagtgagataattatttcttgtagtgtaaatcttccaccgcctgtatctccgtagaggcttcacccagccaaccgcagttctggttgaccgctgtataaatcttcacgaagtcgatgccgtccagatgaaccggttttccgtctttatctaccgcccagtctatcttgaattgagaatattccgtattgttcggatggttgtcggcatatccccaggcataacagtagcctacccaatgctcgggcatgcccggacgcggctcgttgatggagttgtccgccaggcggcttccgcggaatgtgatttcagccggcatccatgccggataataagaaccctgggtgtgatacgtgttccggtagatgtatccctctttgccttgattgtctttccacttcacatccccgtctgccggagtgggacggtagtaagtgatttcgtagttgcggatggtggcaggcgagttatattcgcttcctgccaattcgtaccactcatcatccggcaatccgttgccattcgtgtctttggatacaagcacgattcccggttcggagtttcctccgggtttatccagcagagtgccatacatatcatagtaggcgttgccgtatatcttgaagtcatattcaccggggacgttaaggatggtatggtcgaatcctacggtaatgttacctccgaatcctccgagcgtgaagagacaggtggtgcggtcctgcagcagttcggtggcgcgtgccaacacttgaataccggtgaatccctcttcgtaagcagtataagaggtattcatatattgtgatggcgccggattatactccaatactttattggcgaaagcgcctgcttccgggtctgcgggattttcgtcaggattgccttgggaggctttgttccggaacaggacggtattggagttgattcccacattgggcagcttaaatataagttgtccctgcggactaaagcataacacatctcctttcaccttatagtcgtaagcgtcggtgatgtagacgtttccactgtaagggttgacactgatgctgtaaggagtgcgtatcgtggtgccgtctgtgatgaagttttcccgctctgtctttccggctttcagattgaagactttgatttgagaatcttgggtgcggtagtcgtagttatacagataggccatgttgtcgtgaatggtaaagctcaacaccttttcgtcgaaagtccgtaccacttgatcggtatgaccgtctatttgtacgaagtgatagtcacccgcctctatgttttcgccgtgcgtggctacatagacgctgccatccggcccggcctgtatatctcccggattgggacctacttctatcttcttgatttcggtgaaagaagggatgtcgatcacagagaccgtgcggtctaccccgatgccttcccagtccagtcctccggaattggaaacatacagctttccgttctgcacgcagatgccgtcagggtttctgcctgcccgggtcagtgcgtcgatggaaagagaggcagtatctattcgcgccactgttccgtcgaaggaacacacgtatgccttgcctccgtcgaaagcgatgttgcggggttgccgggaacttccgttttctgacagcatgggtatctgcttgacagacttgccgctttgcaggtcgaccacttctatctggctcgatacattgaccacgatatagagtttgcttccataaatgcccatgtcattggcggtatctcccaggccgcgtcggttgatgctgcggaagtagtcggtgttcagctgattgttcttgaaggaatacaaagccagcgagctgttgttcaggttgaagagtccttcgctgaggatgtagagttcggctgttccggtttcggcgggcataccgccgtcgccacccgaaggggtatctgtgtcttccaggtcatcgcacgaggcgaagagaagcaggaagaggaggaaaaagaaggacacgcctccgatacctttccgaaagagggaagaggaattgcttctgccgttattgaatgaagttgttttcatattgctgattcttttgataattactgattcaatgtctggagtatctttagtatcttactttcatcgtcactctcaccgagcgtcccggcatggggaagttcttcactatctcgtaattcttgtccagtaagttcagcacttccactgtcagagatgtgtttacgttacggatgcgcagatcgcggctgacggatacactgtggtcgctgtaactgtccagccggttttcgcgaaggttctgtcccagcatatagcgcttgcccgaaaagaggaatgagtaggagaggttcacccacggagtctcgatgccggcttgtcccgatccggatacacggggagtataggcgatttgttgcttgtaggttttccctcccggttcggttatatccagtgcacgctgataagtgtagttccccgaaaggttcacccgtagtttctcccagggttgcaggctgatgtttccggcaatgtctattcccttgatgtccactttgccgaggttcaccatgctccatataaagaggtttttggtggggatggcgatgattttgtctttcaccttattataataagcatctgccgtgacggatacgtaggggatcagttcattgatcgaccggctgtacgtcagtcccaggttgtattgtgtggtgctttccggtttcaggttcgtgttgcccacctgcccgtagtacaggtcgttgaagctgggcaaccggaagatgtctttatagaacaggcggatgcggaactcttcgccggcaaagggcttgaacgacgcgctgacgtacggagagagtttccgccggttggctgcggcgctgccttggcgcacctcttcgttgatgaccgttgccagtaccgaggcggataccgtcaaccagtcgttaacgtattttccggcaaaagccgtcagccacgaataacgggtaggatatgcgaaatctttcaggttcgcgttcagccggttgatgctcgcgtctgtcgaaagcgaaaaagagaggttgctgagcacccggtagagcgccgaagccgagaggtaatactcttgctggtaataactgttctccgttttgccttccgaacctttatagtcggggtcgagataacgttggtagctccagttccatttggccgaagtctggaagacccattggcggctgaattcttttttgtattggctttgcacgaagacattcttatcccagagatgctgtgaagagtagtcgtaataataagtcgtggcattgggcagtccgcgggacgactgatagtaataggcctttagccgccattgttccgtatccgagaagttgccgaacaatcccgcttcggcacggaggtttttcacttccgtgtttttccgtttctcacgggaggtcaggtcattgtcctcgccataatgcaatgtgaaaggataatgaccatcggccgacatccattcgccgttggcggagagcacccatttacggctcagtttctgttcgagcaggagagacggattgaccagtccccacgaacccgttttgaacgaggcactcaggttggtacgccggttgtctttgaattgcggtgtcagtgtctgtatgttcagtatcccggcggaagcgaaaaaccttgcgggctgaaagatgttgtcgctttgtccgttgctgagtgacaggcggtctacattgtccagtgagaaacgtccgatgtctatttgccccgtctggcagtcgctgatcgttattccgtcatatcccacggcggtatgctcggctccgagactccgcaatgaaacggttttcagtccgccgatgccgccgtagtctttcaccgtaactccggcaaagtgtttcacggcatccgacacttgcaatacgttgaggcttttgagttcttctttagagaacacctgagtgggagccatggctctcacttcgcgggtgtggtatgcttcggcaacggttacttcggggattgaataagtacgggcggtatctgctttctgctgctgggcggaaagcgaaacggtaagagcctggcagcaacagaaagcaacacaggagtataatagcttaggtaatctgagtatattcatctttgttttttgttgttaaaatgtccggacgaactcacttcggccggacacactaaataaacttggcagagtttattatcataacttactttctctgaatcagagtgatgaataaaatgacggatggaatagttccggctcattagactcaacgctttttcctcgaaagcaatgaaaaagatgcacaggcaggtcttctgactcgtttctgttgataagcgccttcccaggaaacgtttcccagtggcaagtggtggttgcttacaacaatctgatgtgaaacttacagcagcgggactgttcaggatttgcacctgattcccttttaattgcatccccggaacacggagaatacaaaccaatgcactgcaaagataaaaagaatattagaaatagcatactaatttgtgattattctttgtgcatcgcagagcggacggaacagcatcgggcaggtgatcggaataacgtaaacagtcggtgtcatttgtcttgaccccgggcgataatgatgtcagaatgacggataatcgctctttgggctgacacactctttctctaaaaccggtgaaccggaagaaaaaacggaggaaagccgggcttttctgccccgaaagccgggttttgagtggtgaagagccgggcttttgcagaaaagaagcaggcattcactccaaaagacgggtacatttgctccgaaagaagtaagcattttccaaaaaggtttacttctttttcaaatatctctatatgttatgctccattacatatattgtcatgaaaaccgggacttatagctccgggttttgttccggttgcttaccggatatgatcgttcgggaagtgtcggaaagagtgggtttgtctctaaaaaactgctttatggacggaacatttccaggtagctttcttccggtggataaaaggaggtaattactgtcgaatggatgaacgggcaatcgaatagggagcgtttttcagaaccttgccgtgtatcggcccgaaagaacggaaaatagagaggtcggattatcattctgtcaaaatgataacccgaccttccgtatgtctccggagtgaaatgccccgcttcggtatgcttgttcagccgcgttctgccagatactgctctaccttttgcagggtggcgtctttcagcaatacggttttgttcttatccagtaaataaagagtgggaatggctctcaggtcatacaggtttttgtttttgatgaccagttctttatcatatccgttggtccattctttcgcaaagtcgttgcggtgctttttccattcatccaattcttcatccggatagatggacaggactttcagtttcttggcggctgtgaatccgttgatgaccggagaagcctttaacccctctatcatctccgcgcacgcatggcaacccggattgttgataaacagcagtgtgtattccgcagggaactgataaagcgtacccttggcgcccgaatccaatgtgtaggtgaagttgagtgccttagtgcctaaccggttcttctgtgccagctccaaccgtgcctgcggacgtatcttcgccgtttcgtccagtgcgggagaggcaatcagggcttccagtaccgggatatagaattcttcgttgcgcataggcgagttgggatcgtacagatatttatcggccagttcctcaaagaaatgaagcatcttccggttcttctccgcccggttgaaagtttctttcatggcagtttgtgccacaggcaagggcacatgttccaacaggtcacaatagtctacccaagcctgttcgggcacttcggcctgattgatgtaggtggtgtccgagaagtcgaaacgatcccaatagtgttttaccatatagtccgtacgttgttctacggtattcagtactacaggtatctggggtaaattgaaaattttaaccgtatcttgcttttcggaaggctcctgactagaggcggaaccgcttttacaggcactgaatgccagtatcaaggcaaatgaaaggtattttacattgttcatcataatcttttgttttgatatgggacaaagatagtatttttattctatatttgtacttagtcatgaaaacgtcagacacacaacaagcaaattgaacatggagaataaaaaaggacaacctactacagaggcaatctttaggggaatacagtcaggaaaagtattagagctttttgacaaactacaatatcagatcgccattcatggtgatctgacttatagtgatccttggggggaagtacaccggttcagggatcaatttgaaagtgcgaaacgcgactcggattcaccaactgcgatagggcgctatccgtttgccgatgtatggatacaattttacgagacggaagtgaaggattattcgcttctactggaaatgtgcctgatggcatcccattcacggactagtgtctggcgtaaaggtttcgggacgttactcgataaattatacggaaaaatacctttggtggagtacgaacaggcattggaacatctggaacatccctatgccctgagtgaaattctctgggctttggagtgggactatcgggaccaggaggtgtatctgaagttttcacattacatcctgctccatcttttgcccttgcttactccccggaatatcacctttctgtatagcgtgcgcgagtggtttggttccaccagtgatcatcgtgtcgtgcttgttcattgttattggatagactgctggctgaagcacccgaaacgtttactgaccgatgatgaatttacggccgatttcaagatacgttacgaactctatcgtttgtgtaatttcttatcctataaggaagagccctatccgcttgagttccctattcgtgctgtcgacttcgggagagcctgtcagatggggcttctgtctgaagatacactgatggtcgaactgatggatcgtcccctgtcgcctgtgctgatagaagaggctgtggactttttctataagaaagaccaaaaggagaaacggctgtataccgattgccgggattatgatttcagccgtttcaagaaagtattggaaaaagtaacggaacgtatcctcgacatcgagctggaaagaggagaagcctgtaccgatgtcacttcgttggctcggaagctggacggggtgaccggagccgaactaatgatccgcttgttgagtctgatgggtaaggagaaattcatacggctcgataaatggtactacgataccggcgaaagccgtacaggtatgttctgtcatctgatgttgcattgcactccctcgccgacagatacgccggactggttgaagatgctcgtcgaacgggcgggtatcactccgaagcgtctggtggagatggccgtgtattctccccgttggctggagatggtagaagaggctatcggatggaaaggcctgacttgtgcggcaaatttgttttatgcttacacaagggagtgttatgatgatgtggatgaggcaagaatcacgccttatacactcttgtcacctttggagatctcggtgggagtggtggatacggcatggttttggaaagcctacaatgcactgggacgcgaacgttacgaaaaagttttcgcggcttccaaggctgttacggaatcttccggtgtatatagccgtttccggaagtatacggatgctcttgtgggaaagtatacgatagcacagttggaaagcctggtgatggacaaccggaataaagattgggtgcgtgcctatccgcttgccccgtttgccggaaaagcccggaagaaagaggtagatgcgcggcttcgcttcctcaaagctttctggctaagcagtgacaccctgtccggacgtcatactgctgaaaaggaggccgtacaggtggctcttgacaaccttaccggaaattccggactggggaatctggataccaggtggtttaaaaagaaggtctggtgatggctctacctctccttagccagggtgaatacaaactccagaccgcctccctggctgtttttggccgatatgtttccgccgtggaggataacggcattcttgacaatggccagtcctaaccccgtgcctcccagtttgcgagagcgccctttgtccactcggtaaaagcgctcgaaaagacggttcaggtgttcgggcgacactccgacgcctgtgtcggcaaagctgaagtagtagaacttctcgtcttcgcggaaacagttgatgtggatttggatattgtttccggcgtaagcgatggcattgtccatcaggttgcggaagatggagtagagcagcgagtagttgccccgtatctgaatctctttcttcagtgaattgactaccgtgatgtgtttctcttccagttccagggatacctcgttcacgatgttggtcaccaggacactgatgtccatcttttccatgtcaatcatgttggcggcctcgtccatacgcgtcagtacggagatgtcacgcaataatcggctcaggcggttactctgtgcataacagcgttcaaggaacacattcatcttttccttcggaaggttttcgttgttgacaatggtctctaggtaaccttggatactgctgaccggagttttcaattcatgcgcgatgttttgtgtcagttgccgtttcaggcggatctgctcttcttcctgagtgacgtcgttgatgctgatctcaaagctcatatcctggaagatgatgcactctacgataaaagttttcccgtttttattgatagtgatggacattcgtttctcctccttgccgacgggacgtttgggagctttgttgatgaagtccgttatctctttgagctcgctgatattgaatacctcttctgccgtttccaggtttgagtccgatatcagattgctgtattgggtaaacaagttgttgaccaggatctcttttttgtctttattgaatactcccagcccttcatgcgaaatctgcaggtgtgtgatcagcttctccctctcgatgtagagtgcctctttcgtttcgtggagacgtttgtatatctgaatgatgtgttgcgaaatctcacccagttcattgtgggggaaggccgactgcatcgccatttcgataggttcattgcggtcggcacgcatagcgaattcgcggagctggctgatggaagtgcccagcttgttggtaaacttatagaagatgatcatcagcaacagagtgacgataacggtgaaccagatgtaatgcgggtccgctttcaggttattgatcaggctgacactgtagggcagagccgagcggatgatgtagtccttatataaggtggcggagtagaagtaggggactccggttgtttcggaggtacggcgtacatcgaagccgaccccattgtacaaggccttttgtacctcttcccggtcgagatgattgcccaactgctccacattctgttcctgactgtcgaaaagcactttcccatcgaggtttactacagtgatgcgcaaatctttcaatacgttatgttgcaggtaatcggagatcacctcagtcatatcctgtgggtgatcgtacaacttctcgtacagtagattattgcaatcctgtaactgtatattcagtaactctactttatactctttctccctctgatactgataggccatgaagcaggcggcaaacaccaggaacagggaaatgaccgaaaggaataacttccggctgaaagagagaaagtgcttttgggtgacaggtaggttcatatatgtaatgtttttgagttttgattcaccacagagtaacaggagtctcacagggttttaatctcttgtttataggatattaagagaaaataatctttgtggaactctgtactactttgtggtgaggtccgattcgcttctattccgtttcgaagcaataaccgtatcccaggcgggtgacgatacgtttaccgtaggtaccgatcttttttcgtaaccgggtgatgttgacgtctatggtgcggtccagtacatagacttcgtcgctccagatccggctcagaatatcttcgcgcgagaagacgcgtcccttgttttgtaacagcaggaagaggatttcgaactctttcttggtcaggggtacttcttcgccgtcgatgcttactttctttttggtaatatcgatcaccagagactggtagcaaagttgttcgggtgctttttccgtatcggaggtagcagtacgccggagcacggcctttacacgggcaatgacctcacgcagggagaagggctttgaaatatagtcgtccgctcccaggttgaatccggtgacggtgtcattttccgtatctttggcagtgatgaatataatgggaacctgcgctgtctttttatcctttttcagcagattggccattttgaatccggaaatttcccccatcatgacatccaataacagcaggtgatagctgctgatattcattttcagggcctcttccgcagagttggcagtatctacttcatacccttcgttctcaagattgaacttcagaatctcacagaggtcttcttcatcgtcgaccactaaaatacggtaatcgttcattgtattctttgttaatgtaatactacaaagttaaactttatttcttttcttttgcaaagatggaggctttttgttacgaggggatgaaacacgtattacgattcgattacatttccatcccgtctgcaaccctctgtaggcatgattccgttggttctaaaccgaccggacctaccttttaaaccaatgccctttgggtttaaaaccaacggggctttgttttcaaaccaacaatcccgaggttcgggagacactttatcaacaaaaatgttgtatctttgttatgtcaataaattgaaatatcaaaatgattaagatagatttcaagcaacgcaaacgtgaggtgctttggacggttgtcgctttgttctttatagctataggagtgtctgtgttcaagttctcttccgcaacttccggctttgagataactgacgagctgggaggaaatatttttccttctgccattctctcggtggctacgaccgatgcccaggtcattcaaccggccgactccatatatctgggtaaccccaagtcgtgcattgccataaaagtaaaatcacgttcggcttatagccgtgtgcggatcgatgttgcggaaacaccattcttttcacgttcggtgtcggagttcgtgctcaataagcctcgtacggaatataccatttatcccgatatcatttggaactacgaagcgttgaaaaacaataatcaggcggaacccatcagtgtggccgttacggtagagatgaatggggaagatctgggacagcgtgtacgcactttttctgtacgaagtgtcaacgagtgtctgttggggtatgtgactaatggcacaaaatttcacgatacggggattttctttgccgcatatgtcaacgaagagaatccgatgatcgaccagttgcttcgcgaagcattgaacacacggatagtcaatcgcttcctgggctatcagaatccggctcccggagctgtggataaacaggtatatgcattatggaatgttttgcagaaacgtaaattccgttacagttcggtgtccaacaccagtctgtccagcaatgtggtttattctcagcgtgtacgtacgtttgatgacgcattggagtcatcacagatcaactgtgtggacggcagtgtcctgtttgcttccttgctccgtgccatcaatatcgaaccgattctggtacgtactcccggtcacatgtttgtggggtactataccgacaattcacataaggatatgaattttctggaaacaacgatgataggtgatgtcgatctggacgacttcttccctgatgaacaactggactccactatggtaggcaagtcacagaatcaaatgtccctgctcacctttgagaagtcgaaacaatatgccaataagaagtataaggaaaacgagaaaggcattcattccggcaagctgaactatatgttcctggagatttcgaaagatgtacgccggaagatacagccgataggaaagtgatctggagacaccaaagtaaaacgaaggcggggacttacttaaaaaacgattcgtacggttcgtagctaaataatcctaataaaactctaatatatagattagtttcatgtctttgttgtacttttgccgttcaatatttggatgtattccaaacacacgttagaatgaaacgaagaaactatttcatattcagctgtttgatgctgatggctcctgcggctgtgcaggcgcaatttgacaaaggcctaaactataagattgaaaccagtgcaaccgtaagtggtgggcacaacacgcctttttggctcgtggcaaataagcacgggctttcgtctattcgaaaaaacaatgcttatttggatgcgggtatctttcgggatttggagaaggataaaaagttctcttatgcctttgggttggaaatggtgggtgcaagtcgcttcacttctaaattcttcatccaacaggcttatgtggatttgcgttatcgggggatggaaataagtgtcggcagtaaggagcgtggcaacgaaatgaaaaatgatcagttgagctccggtagtatgactttttctaccaatgcccgtcctattccgcaagttcgggtttctatacccgagtatattccttttccgtggactaaaaactggttgcatatcaagggacacgtggcttatgggatgtttacggatgaaaagttccaggagcgtttcactgccgggcgttctaaatatacgaaagagactctgtttcattcgaaagcagctttcctgaaggtggagaatctgcagaagtcacctgtttcggtggaattgggtatcgagatggcagctcagtttggaggcgattgctattatccggacgggacggtattgcgtacaccggacagttggaaagactttttccgtattttctttccaagcaacggagacagtggagcttcggagagcgaccagataaatattctgggaaatcacgtcggaagttacagtgccgctgtgggatatcattttccgacctggaaaataaaggcttactgggagcacttttttgaggaccgctcgggaatgacactgacttatggtatgtggagagattgtctggccggattggaggtgacgttgccggagaatccttttgtgaaaacgattgtcggagagtttttgtatacgaagcaccaatcgggagctttccattactttgctactccggccattgatcattcgtttaccggagctgataattattataataattcgcagtatgccggttgggaacattggggacagggtattggtaatccgttggttacctcacctatatataataaggatggaaacctggcttttgagagtaaccgtgtgaaaggattccatatcggtttgaatggcagtcctacctcagagatagattaccgcattctggtaagtgttgctaagcattggggaacttacggtagtccgtaccggaatatcagaagaaaccagaacgggttgttagaagtgacttataaacccgaacagattcggggatggagtttcacgctggccggtgcggtagacggtggcaatatgttaggagaaagttggggaggtatgctcaccattcgtaaaacaggtttaattggtaagaagaaatgaaaaaaggaatcctattgttgtttgtcgtcctgatgggtttcacgtcgtgtggaaagaaattcgggcatcgctatctggatggaatgtggcagatgcaacgtatagaatataaagatggtaatatcgatactccactggacacttatttcagttttcagatggatatcatccacttgaggaagttgggtaatagtgagttctatggaaaatatgtctacgagaacgactccatgcacatacaagtactcgacgctacggcggaacagatgaaagttttcggcatggatggccgggtacaggactttgccgtagagaagctgaacagtaacaaattggttcttcagtcggactatgcccggttggaattcagaaaatattgaggacgctaaaaagctgtcttcattcatagatgatgattggaacagccggttcgtgagaatcggctgtttttttatgctattttttgcatatcagcgatgggattgttacttttgtaaggttatcaacattcagaaagcaatatgatacaaggcaagaaatttatctccccggggacatggttctcaatgatatatccgtcagactggagcgaatttgaagacggcgaaggctccttccttttttataatcccgaacattggacgggtaatttccgtatatcagcctataaagaagatgctgccgcacctggcggtatgaattatggaaaggattccgtccgtcaggaactgaaagaaaacccttcggcctccctggtgaaggtgggacatctggaatgtgcctacagcaaggagatgtttgaggaagaaggtacctattacaccagccatctctgggtgacaggcattgacaatgttgctttcgaatgttcgtttaccgtaccgaaaggagaacatgtggatgaggcggaaaagattatatccagccttgagatccgtaaagacgggcaaaagtatcctgcggaaatcattcctattcgcctttctgagatttatcaggtgaacgaagcctacgagtgggtgacagatacggtgaaaacgcaattgaaaaaagactttcagggactggaagaagacctgcaaaagatacaggatgtgattgacagtggcgttctctctcctaagaaaaaagaaccctggctggcgttcggtatcgccatctgtacgattctggctaatgaagtggagggtatggaatggatgacgctggttgacggtaaccgtgaagtgccggtgttgcggtatgaaggttcggaacagttgattgatccgatgaaattgctgtggagccgggtgaaagccggagaagcttgcgaagtggcagaggcatataagcaggcactgatacactaaccacctattatcacattcgattattatgatcccttatttacaagtagataatcttaccaaatcttttggcgatttggttcttttcgaaaatatttccttcggtattgccgaaggccagcgtatcggcttgatcgctaaaaacggtacgggtaaaaccaccttattaaatatactctccggaaaggagggatatgatagcggcaatattgtgttccgccgtgacctccgggttgattatttggaacaagatccgcaatatcctgaagaattgaccgtgttggaagcctgctttcaccatggtaacagtaccgtggagttgataaaggagtacgaacggtgcatggaaaccgaaggacatccgggactggatgacctgctggtacgtatggaccatgaaaaggcctgggagtatgaacagaaggctaaacagatactttcgcaactcaagatacggaactttgaccaacaggtgaagcatctctccggaggacagcttaagagggtagctttggccaatgctttgattaccgaaccggatttgctgattttggacgagcctaccaaccatctggatctcgacatgaccgaatggctggaagagtatcttcgccgtacgaacctcagtctgctgatggtgacgcatgaccgttactttctcgaccgtgtctgttccgaaatcatcgagatagacaaccgtcaggtttatcaatacaaaggaaattacagttattatctggagaaacgccaggaacgcatcgaagcgaaatcggtcgagatagagcgtgcgaacaatttatatcgtaccgagttggactggatgcgtcgtatgcctcaggcacgcggacacaaagcccggtatcgcgaagatgctttttatgaactggagaaagttgccaaacaacgatttaacaatgacaatgtgaagctggaagtgaaagcttcttatattggcagcaagatattcgaggctgatcatctctataagagctttggtgacctgaagatattggaagatttctcttacatcttcgcccgttatgaaaagatgggaattgtggggaataacggtacggggaagtctacttttataaaaatattgatgggacaggtgcagcctgacagtggtacactggatattggagagaccgtacgtttcggatactattcgcaggacggattacagtttgacgagcagatgaaagtcattgacgttgtgcaggatatcgccgaggtcattgagttgggtaacggcaagaagctaacggcttcccagtttctgcaacacttcttatttactcccgaaactcaacatagttatgtatacaaattgagtgggggagaacgccgtcgactttatctctgtaccgtgctgatgcgtaacccgaacttcctggtacttgacgagccgacgaatgatctcgatattattaccttgaatgtgttggaggaatatttgcagaacttcaagggatgtgtcattgtcgtttcgcacgaccgctactttatggataaagtggtcgaccacctgttggtattcaacggacagggagatattcgtgactttcccggtaattacagcgattatcgtgactggaaagaagccaaatcccaaaaggagaaggaggcggagaaaccacaggaagaaaaaacagcccgtgtccgcctgaacgagaagcgcaagatgagtttcaaagagaaacgggaattcgaacaactggaaaaggaaatagccgagctggaaacagagaaactacagatagaagaactgctctgcagtggtacgctttcggtagacgaactgacggagaaatcgaagcgattgcccgaggtaaacgatctgatagacgagaaaaccatgcgttggcttgaacttagcgaaatagaatcatgaacctgaccaattatcatagtcataccctctattgtgacggccgtgccggcatggaggattttatccgttttgccatcagccggggatttacgtcctatggtatttcttcgcatgcccctctgccgtttccgactcattggacgatggaatgggatcgtatggacgactatctggatgaatttacccggatgaaagagaaatatgcttcggaaatcgaactggctgtcgggctggaaatagattacctgaacgaagatagtaatccttccgtccggcgtttccaagagttgccgctcgactaccgtatcggttcggtacatctgctttacaatgaccgggatgaagtagtggatatcgatgtatgtgcagaggtgttccgggatatcgtcgatcagcatttcggcggtgacctcgaccgtgtgattcatctgtattatgaccgtctgctacgaatggtcgaactgggaggctttgatattctgggacacgccgataagatgcatcacaatgcagcctgttaccgccccggtctgttggacgagtcttggtacgatgcattgatacacgactatttctccgctgttgcagccaaaggatatattgtagagatcaatacaaaagctttgcatcatttgaatactttcttcccgaacgaacggtatttcccgttgctgaaggagttgggagttcgtgtacaggtgaacagtgattcgcattatcccgaacggatcaatagcggacgtcccgaggcattggccgcgttgcagaaagcaggctttgaaacagtgaccgaatggcacggggggaaatggatagagatgccactttaaaccaatatatcatgaaacacaaaaacttattgttagctttgccgtttgctttctttgtatttgccggcatatcattgtcctcttgtaaagacactcctgtccgtaaactttataaaagtgatatagactggaaacttacctggcaggacgagttcgataaagacggtgcacccgatcccgaaaaatgggtattctctccctggcaccctttctgtcgggataataactttgtcacctttgtaaaagacggcaagctcgtcttgcgtgctttgcccaataacgatccgaatgacacgatccgctatatggccggctgtgtggagactttgggcaaaaaagattttttgtacgggcgctttgaagtatgtgccaaattgggcagtgctaaaggttcctggcctgccatctggttaaaaccaaccgattcgaccacatacggggcatggcccaaatgtggagagatcgatattatggagcagctgaataaggatacatttgtctaccacaccatgcatacggaatatattaaggtattagggcataaaacagatccggattattacaccactgcgtcctataatccgcatgaatttaatgtgttcggcatggaatggacaccggacaaaatagatatgtttatcaacgattccctgaccttcagttatccccgtattcaagaagaaggttctgtgcaatggccttttgacgttccgttcttcctcttgctcaaccagatactcggaggatgggcaggcgagatagacgacactgaacttcccgtacagatggaggtagactgggtgcgttattacgaattaccggaaaataaaaaatagactgtaagaaggctttattgtatgccttttttcgggaaaacagcttgggacaccggggctccgtctgcacgatacagataggttcccggtgtttttatacatatctctttattgccggacagtctgatggttgcagtctgccaggcggcaatgtaatacattccaccggtaaaagccacctgtgcctcttcatcatttcgcaagatctgtatcctcgaagtatcgaatgtggctgtcttctcctgagtagagcccggaagaagtaggtaccgatagctggcaggggctccgggcgaatgttttatgtaaatagagaagatattactttccagcatttttggagcatacattcccataaagtcatgccattgtcctttcttcttttctgtttgtaccggacaaagttcgtcttgcaggaggatatatccggtgttatcatgaaaataccggcggtttccttccgaccatacttctcctttcttaaaacgctggtcgatggaggtgatcagtgtggctgtgctgtctgtgtggatattgctgcccaggcacaggataaattcatcggtaaatatccatactttgtttgcagacagtccgttacggttcaggtgcatggctgtgattccatgtttcccatccgttgttccgcctacgagattggtttgattgcgtgaatccgctccgctttctgttggaataggagcgtcactttcgtaggttgtaataccgggtatccgccgccagtcccagaaaggaaaaatattgtggtattcatcaccacgaatgtatgtatagatagctccgtctgccatataatagcctttcaggttatcttcatttaccagctccgtcccgatcaccctgtcggatgccatgcgtacggatgccatccaatggggggtgcggtggatggtgaggtccgaatctccgaagaacttgtttccggtaaactcattgttcgtatccggatggaggaagttgcgtgcaatcaactcttttatctcccgcgcttgttgatcattgcttcctttcatcaaagaacaggctgcgaaaagtaaattgaatgatttatgaatgtcagcactatggaagagttgtcggttcagtccgttcacatcccagtaacccctccatacaatccattggtaccctttcaggagcagagatacgagaatatcctgctgccgacggtcgaatgccagcggcgtaccggcaaatagttcggagtaaaaactcatattacagagaaaagagagtccgtaattgccgaactgttgctggggaccgtgctgatgaaaactccagtccggttgaatcccctctttctgtcccagtacgatttccgagcatatattttcccgtgcttcctttatcagttcggcatcgttcagaagtaatccccggatcagtacgttgcctgccagccataccttattttgtccggtcatgccaaactgtgattgttccatcacccggatggcctcttgtttttctttctccgtcatttcggtttcgaaaaggaggaaggccggacccaaggtgcggggaatacctatctgattgtaccaccagtttttgcagaccggcttttggacaaaccagtacttcattgcctgatggatgatgctgactactgcggaaatctcctgtgcagatacgttctcttgttcacgggcatagtatttggtcagtttcagtattcgttcggtatgttgtttcggttcccatcccgagcgttttgtgtcagcgtaattaatatccggccatgaaccgtctccccggatcgtgctgatcaagcgatgtatctcctcctgtcggatgggataaagttgttgtagttcgataacgttctggtcggaaacctctttttcgggaggaatcttcgacaataattgtaaatagggttgtttctcttcatccatcccgattatagaccggatgtagttctgcttgatacgttcattctctttgccggtttgtgcagaaaggcaggaaaagatcgtgcagataaatagcacgaacagggagattcttttcatatatcgagtgtgtttttcattgtatatattaatagggccgaacgaatcagaaaaagtttctgacccgttcagtctctgtgtggctattctgtacgtttacaagagtttgccattaggaattcattcagggagttttcataattgccttgtagcaggatatggtgattacccagtgggtttttcaggaaatagtcggccggtgtattcatctttacacgtacttgtgtacggcacatattgatgtaattggtgttttcggtcagagttccggtagacaggtaatattcgtccaggcattcgccaccacatttcacaatggtgacatctccttccggtagcagtccttgaataccgatgccgctttctgtttcaaagtgattgcgaatgatgtaacgttcggtctgtttcattccgattgtgcaatgggccaatataatttcgttgttacgggcgtttatcatcgaaggatttgccatgaaacccactttcccggtcagtgctttagccactagtaatgtaaatacggattgtaagtcgccttcacatccggcaatgatcccttcgtcgttcaacatggcaagggcaagacagcctgtagtgcctgtacgctctatcagtttgaagcagctcactgtcactgcacttagtttttcttctttacagatacgcttaatggcccgatagagacgcatggctttaatcatatcttcgggagtgccttcgcggcaagccagtgcctgtgaagccacagcggcacacgaagcgccgacttcgttatccttaatccggtcatatacatcataaatccgttccaacgggatgtccagatactcgattccccaacgtcgttttgcgagcaggtagtccacattgcttgcaatcaaccaggaagagggagtgccgatcaccccgatgcggagtcctaccaacgaacgctgcgccttgaaattggtatatagtacctgtattctctggacgatactcataaagtccccgtggaggatctcactcttcatgccccggccgcgcaaccaggaagagatttcaagcgccgccgccaaggagttttgcattccgtcggccagaataatggcagggcgggggagcgattcaaagcattgcatgaccaatctttccacccctccggtagctatgaaaataatgctgaaatcatcttttgtcaactggtggatgtcccggtaatcgacaaacttcacggtgaaatatttttccagttcactaagtacggcttcgtgcgaactacgtatagttacctgcttatgcagaatcgatgcaaatgtgattaggtttatggtcattatgttatcgttttaggtttgtagttatacaaatgtatcgttttccgttgagattatcataacgtttttaaccttgataaggtttttaaagtttttatgtctttgtgtccgatttattatgtacatttgccgctcatatttattaattgaccattatataattaaagattatgccaaccatatcgattcgcggaacagagatgcctgcatctcctatcagaaagctggctcccctggcagatgctgccaaacagcggggaatccatgtatttcacctgaatatcggacagccagacctgcccactcctcaggccgcgattgacgcgatacgcaacatcgaccgcaaggtgctcgagtacagccccagtgccggttatcgtagctatcgcgagaaattagtaggatattacgagaagttcaatatcaacctgacggcagatgatattatcattactaccggtggctccgaagcggtgcttttctcattcatgtcgtgcctcaatccgggagatgaaatcatagttcccgagccggcatacgccaactatatggcttttgccatttcggcgggagctaagatccgtaccattgccacgacaatcgaagaagggttttcacttccgaaagtagagaagttcgaagaactgattaacgagcgtaccaaggggatcttgatttgtaatccgaacaatccgaccggttacctgtatacccgccgtgagatgaaccagattcgtgatctggtgaagaaatacgatcttttccttttctccgacgaagtctaccgtgagtttatctataccggttcaccttatatttcggcctgccatctggaaggaattgaaaataatgtggtgctgattgactctgtatccaagcgttattccgaatgtggcatccgtatcggtgccctgatcacgaagaacaaagaggtgcgtgatgctgtaatgaagttctgtcaggcacgtctgagtccccctttgatcgggcagattgctgctgaggcctcgttagatgctcccgaagaatactcgcgtgaaacctatgatgaatacgtagagcgccgtaaatgcctgattgacggactgaaccgtataccgggtgtgtattctcctattcctatgggtgctttctatacagtagccaaactaccggtcgatgattcggataagttttgtgcgtggtgtctgtctgagttcgagtacgaagggcagactgtgtttatggctcctgcttccggtttttatactactccgggttccggaaaaaatgaagtccgcattgcctatgtgctcaagaaagaggacttgacccgtgcactctttgttttgcaaaaggcattggaggcttatccgggaagaacagaataatacttgtacatgtcgttcactcatccacataatcaaagcaattcagtttcctcttccggagcgaaggggaaattgaggctttcttattttcttgcccgtcggatttatcgtgatacggatggtggaaaacaagtttcccgtcctgccgttgtgattgccatgattggtattgccatcggtctggcggtgatgatcattgccgtatccgttgtgattggattcaagagtgaagtacgcaataaagtaatcggattcggttcgcatatccagatcagtaatttcgatgcggtaggttcttacgagacccacccggttgtggtgaatgacagtatgatggtcgcactttctgcccttcccgaggtaaagcatgtgcagcggtactccacgaagccgggaatgattaagacagacgatgcttttcaggggatggtgctcaagggagtcggcccggagtttgatcccgcctttttccgtgatcatctgatagaaggagagatcccggctttcagtgatacggcctctaccaaccaggtagtgatatcgaaagcaatagccgacaggctgaaattgaagttgggagataaaatctatacctacttcattcagaaagacgtgcgtgcccgccggctgacggtgaaaggcatctatcagacaaacttttccgaatatgataatctctttctgctgaccgatctgtatctggtgaaccgtttgaataactgggctcccggtcaggtgagcggggcggaattgcaggtgcgtgattatgataagctggaagatatcacctatcggattgctaccgatacggataataagcaagatatctacggaggtacttattatgttcaaagcatagagcagatgaatccccagatatttgcctggctcgatctgctcgacctgaatgtatgggtgattctgattctgatggtcggcgtagccggtttcaccatgatttccgggttactgatcatcatccttgaacgtacacagatgatcggcatattgaaggcattgggagcaaatgatttcactatccgtaaagtattcctgtggttttctgtcttcctgattggcaaggggatgttgtggggcaatgcgatcggtatcgttttctgtattttgcagtcacagttcggactgttcaagctcgaccccgaaacctactatgtaagtatggtgccggtctctatgaatatctggcttttcctcctgatcaatgccggcaccttattgacttctgtactgatgttggtcggaccttcttacctgataaccaaaattaatccggccgactccatgcgatacgagtaatggggttatctgcgcatgaaatcaccctttccgcgatagaggcggtaaagcttcaacttcaaggtctgtaacggacggattatgtcaaaaaccggcagcgtaaagtagtaagaacggttgtcacccatctcaccggctgttttgttgatgacgtaggcttgtaccgaatagcggacgaaccacagtaacagggataacccgacaaccaaccagtggaagctgaggataccgaatacaatccccgccaggcaagcggcataaaacagcagtcgcgtaccggtttccaatcccaggagccagcgttgcgagcctttatagaaccgggaagttgccatgtagctcaccttttcttctttccagtccttatagcgttccacgggttgcatccgtatcacggcatccggtgaggtctctacccgggtgttgttttcattggcaacctggttgatgaacagatcgtcttctccgcgctgcatattcagatgggtagagaatcccttgactttgaagaacaactccttccggtaggccagattgcgtccgatacccatatacggtttacctgccagggcaaatcccagatagcggagcgaggtgaaaagcgagtcgaaagatgcccgcttgtgcagccagccttttcctcgttcgtagccgctatatcccagtacgatgtctgtactcgatgtgaaattacgcgccattcgccggagccattggttgctgaccggagcacaatcggcttctgtgaataccagccagtcgtgtttgctggctttgattcccagtgtcaatgccagttttttccggctgatgtaccgggcactgtccggagtaaaactgtgatacaggttgggatattcttcctccaatgccgatagcaagtcttcgctttcgtctgtggagccatcattaatgacgattacttcaaagtccggataatcctgtttcaagatcgtgggcaggttgcggcgtaggttttccgattcgtttcgtgcacagatcaccacagataggggaggcagttcccgtccgaagtgtacttcgtcttttccgacagcgaggttgtgggtgtgtatacggttgtacagtccgagatagtagataagttgaatgattaaaagaacacctgtagccgacagtagtatcagttcagttgtattgaatgtgaatgcttccatttactcttacaagatttttatgtcacaaaagtacataattttttcagagattcgtcgatttgtatccctcttatttcttattgtccagatattcttttttaaacatatcgacaaacaacaagaacagcgacagcacaagcggtccgaagatgactcccatgaatccgaacaaggataatccgatgactacgccgaagatggttattagcggatgggtgtctgccattttcttctggaggataaaccgtatcaggttatcacattgcgagacgacaattccaccgtaagccgccagtccgatggcgtttgcccactcgccggtcagtgcaagataggcggctaccggaaaccataccaaggctgtccccaccatcgggatgattgtggcgaagcaggtcagcactcctatcagccaggcattcggtgctccgaagatgaaataaccgatcagggctacccctccctgaatgactgcaagcaagggaatgccaatggcattggaacggacaatcatattgatttcatgggttacctcccgggtattcttttcgttgaaaggcaggatgtcgtcgatgtaggcttccattttagttcctcctatcaacatgaagtacagtacgaagaccaatacaaacaggttgacggcaaaactgctgatgcctcccatcactgcctgccctatcttgggaagcagggagacgatgaatgaaagtgtgtcgctgcccagcacatcatatcctgtttttgctttaatgattcccgctaactcttcgacaggggtaatgatggcttggggatccaggttgatatcctgcaatttattgaccagcatccatacaatcagcgagatgggaaccaggaagcacagaatggcttctcctgtgatcagcagtgctgcgaagcttcgtttcattcgtgcaccgagatagatcatctgtttgcgtacaaggatgtagatagtgagtgcccccagtaatccgccgaggaagggagtgatttgccggaacaagataatgcccagtccgataatgataataatcagagaatatttccaatatttttctttcataataaataaaaaggagaatagagattcctctctatttataacattacaccaattaaaatgtttcggtcctaaggcagatcgagactgaaaatagtttgtcccggacggctttcccggatggataagtgtccgtcatgttgccggatgatctgtttgcaaagactgagcccgattccgcttccttccgttttcgttgtgaagaacggaatgaagatctgttcccgtatctcttccggtatgccggggccattgtcttctatctcgacctgcagacggtctgcccgccgtacacggagaatgattcttccgtccgcctgtccctcgagtgcctgcatcgcatttttcagcagattaagaaagacttgtgacagttgattgggatcaccatctgtttctatcgggtccggcacgcattgcagcatgaaccggataccgcgttcccgaaagtcgctttgcagcaattcttcaagattgcggagcatctcggtcaatgcgaagcgccttttttccggatgggggagataggacagatgccggaatgactccgtaaactccatcagccgttcgctctgagcctgtataatccgtagtccgcgggccgatttttcgttgatatccggacgttcggacaaggtttgtgagagtgaaaggatcggtgcgatggtattcatgatttcatgcgtcagcacatgcgtcagtttgctccatgattcgttctccttatcgctcaattcgtcgccgatgtctttgatggacaagatggtgatggtttcgccgtccagaatcatctttttctccgatatgctgagactcttgcggatgccggttgcattcagcagttgtgccaattgggtttcggtatagagacggttgcatttcagcagcgagaaagcggcactgttggcaataatgattctacctgagtcgtcccaggcaagcacgccgctgggcacctcctcgagcagtgattgatagaaatgttcttgtttgtgactttcgcctttggtgcgggcaaggaggtcgttaagccggttgagggagcggttcagctgtgcctgctctttgccgacatttgcctccggaaagtagagcatattatccttatcctgcacggcgtcgaagaacagtctgattttccggttaaacgtattcaactgccgggtcaatgcaccgatctggaacagcgaacagagcagcagtataccgccgatgatgtatcccgtatgtgacacgaccaaccatagtccggtgcctgctgtgcccagtatcagcaatacgtgaaacagtatgatgaaatagatgcgttgactgaatatcattggggtcagagtttgaatcgtttgagtttattgtataatgtttgccggctcactcccaattgttcggctgcggcagtcaggttaccgttgttttgcaggatggcagtttcgatggccctccgctccacctcttccagattggggacagtggcggttgcctgcggttgccaagtctgtttcaccaggatatctttggggcggattacgctgccttcacacaagatgaccgctttttcgatggtgtgctgcaactcccttatattgcccggccaatgataactgcgtaatttttcgacagtctgctcgtgtatccgtatttcctgccgttgatatttagaggtgaatttacgtaagaagcagtcgataaagagtaggatatcatctccccgttcacgtaggggaggcagttccagatgaatggtgttgatgcggtagaacaggtcttcgcgaaacatgccctgcttcaccatttccggtatatctttgttcgttgccgaaatcaggcggatatcgaccggaatcactttgttactgcccagacgagtcacattccggctttgcaatacggtgaggagcttggtttggagtgggagagggaggttgcccagttcgtccatgaacagtgaactgccgttggccgcttcaaactttccgggacggctttcgtgggcatcggtgaaagctccccgttcgtgtccgaacagttcactttcgaacagcgactcgctgatggcccccatatctacgttcagcatcggacgtgcgccacgaggtgagaggcggtgtatctcccgtgccagtatttctttgcctgttccgttttctcccgttatcaggatgttggcgtccgtgcgtgccactttcgataccactttcatcagttgcaacatggcaggcgaacgccccaccagcatttcgaatccctcagccctgtcaacttttgcagtacgttccggagctttgcggctacggtaggcttccgtcaccttgtcgatcagggtctggttgttccatggtttcagcaggaagtcggctgcaccgtttttaagtgctttaacggcaagttccacatctccgtaagcggtcagcatcactacgggtagggtgggagccatctgccggatgtgccccaaccagtaaagtccctcgttgccattgttgatacccgccgagaagttcatgtccaggatgactacatcgatgcggcgcgttgtcagcagggcggtgatctgatttggattcgaagctgtcagtatcttgctgaagtagttttcgagcagaagttcgagtgaggccaatactcctttgttatcgtctacaatcagaatggttcctgtgttcatagcatctccttttgattcgcttccttttttaagttcgtggtaaagatatttgtttttgtaactccctgcaagagagtgtccaatatttagacgttttcggattgagaatttatgccggagaagtatcagaaagtattccagtgggaaacaatcgtcaagtgtccaatatctgtacacggtggcgtccagatattggacactattgtatatggttgaattgtatctatttgattataagttgattgtttcttttggcactgcgtttgcatattagattaacatgaaacattttatatcattttgtacctttcttcttttttcaactctcttgtttgcacaagcagagaggtcgcttgacgaatgtatccgtattgcatggaaacagaatccgtctttacggaatagcgggatagatatcaaagaagcccggatggattacatctcttctgtggcgagtttcctgccccgtgtcagtgtatcggccgaagccggacgtaacttcgggcgttccatcgacccgaataccaacggatataccaacgatacctttgatgaaggaaccgtcgggctggacatgaccctttcgctctttgagggtttcacccgtatcaaccgggtacgttttgagaagatgaaccgcaaccggagtgagtgggctttgaaagaacgccgtaacgaactggcctgtcaggtgacggatgcctattataaacttctgcttgaagagcggatgctcgatctggctttagagcagagccgccttagcgagcgttatctcaaacagatcgaggccttcgtcgagttgggattgaagtcggtttctgatttgcaggaagtcaaagcccgtcgcgaaggtgatatttaccgctatcaggcccgtcagaatggttgtcgtctggcattgctccgcttgaagcagttattgaatctgcatgccgaggatacgctggccgtgcaagatactatcaactacgaacttctttcggcctatccgctgccacaaacggaagagctctatacgcagtctctggtggcgatgccttcgatgcggatgatggaactcaggcaacgtgcagcccgtaaggaatatgccatggcaggaggtaaattttcgccaactgtctttgcccgcttttcaatggcttcccgttacctcgatggtttttctaccaaacagttgaacgacaatttaggcaagtatatcggtatcggtatttccatccctctgctgagcgggctggaacgactgaccaccctgcgcaaacacaagttgaatatattccgcctccggaacgaggaagaactgcaaaagcaacaactctatacggaggtggagcaaacggttctttctctccgttccggttatgatgaattccggcaagtgttgcagcagttcagagccgaagaactggtactgaaagaatccgaacggaaatgggaagaggggcttatctccgtctttcagttgatggaggcccgcaatcgcttcatctcctccaaagccgagttggcgcgggtacgcttgcaggtagatatgactttgaagatggaaacctattatcgcacggggagcttctgtacgttgcccggtgaagagtgatggacgagttgtacaactcgtcgtataccagttgctcaactcgtcatgtaccagttgtacaactcgtacaccgtttctctacggcccgatgatatgaccttataaacaaacgtgaattatatataaagcaataattatctatggatacaatgatcgaacgcaagcccggaatgaagcggaagcattattatgccgtcgccggagccgtggtattggtgggacttgttttttactttattttcagagacacttcctcttctatgaatgtggaaaaagaccggctgaccattgctacagttacccggggagagttcagtgattacatccgggttatcggacaagtgatgcccaaccgcatcatttatatggatgcgatagaaggaggccgtgtggaagagcgcctgaaagaggaaggagccatcgtcaaggcaggcgatgtgattcttcgtctcagcaatccgctcctgaacatcggaatcatgcagagcgaagccgatctggcctatcaggagaacgagttgcgcaatacccgcatcagcatggagcaggaacatctgcggctgaaacaggaacgcatcggcctgaataaggaactggcagtgaaacaacggcgttacgagcaatacagccgccttatcaaagagcagctgatagcggaagaggagtttcggctggctgccgaagagtacgaagcggcaagggcacaactggaagtcattgacgaacgcatccggcaggacaattttttcagggagagtcagatcagcagcctcgacgagaatatccgtaacatgaagcgcagcctcgccctggtacgcgagcgggtggaaaacctgaaggtaaaagctcccatcgatggacaggtgggcaatctcgatgcccagatcggtcagtccattgctgccggcgaacatatcgggcagatcatcacccctgacctcaaagtacaggctctgatcgacgaatactacgtggagagggtagtacccggacttccggcggatttcacccgtgacggaggcaactataaacttgaagtgaccaaaccctatccggaagtaaaagagggacaattccgtaccgaccttcagtttactgccggacgtcccgaaaacatccgtgccgggcagacgtatcacatcaatcttcagttgggagatcctgcccaggccattcttgtacctcgtggaggattctttcaaataaccgggggccgctggatgtatgttgttgacgaaagtggtaaatttgccacgcgccggcctatccgtatcgggcggcagaatccgcaatattatgaagtgactgagggattgaaaccgggcgaccgggtgattgtatccggatatgaattgtttggggataacgagaaacttatattgaaataagaaccgaatactatgaactacatttcgcaagtgatacgaagccagcgggttaaaaagtctctgacgctgataaacataacagggttgtcggtctgcattgcagcggcacttcttattatgctttatgtctggtcggagttaagttatgattcatttcatgataccgaccgtgtgtatcgtgttgaaagcagactgtatgagggcgagatgctgacggataattgggcgactacggcttatgggcatgctcctgccatgaacagggaaatagcgggaattgagaagtacgtccgtgttacggctcaggatcgcgagcaggtggtgaattacttcgacaggagatttgccgaggaacattactgctataccgagcctgcctttttcgaaatattcaacttccccatagttaaaggagaaaagaccgggcaactggtacgccctaatacggtggtactgactgaaagcgctgcaagccgctattttggtgaagaagacccgataggcaagatactgaccttcagtacctcttcatcacagcaaaactttgaagtaacgggcattattgccgatatgcctgtccgttcgcacctgcattacgatttcctgctttcctacaatacgattcccaaggaacggcaggacatctggtacattcacggtgtatatacttacgtccgcctgatgcccggaaagactccgggagaaattgaacaggctttccgtgacatatccgacaagtacaagactgatgcactgaaacataaaacctgggctgtagaactgatctcgttgaaagacattcaccttactccgcaaaaagcatacgagaaagaggtgaaaggaagccggacggcggttcttattttgttcgtaatgtccgccattctgctgctgataggttgggcaaatgccttgaacctgaccgtagcccgctttttggagcgtggacgggagttcggactccgtaaagcttttggtgcttcgcgccgtcagattattattcagggacttcttgagtccggtttcatgaacttgctggctacgttgatagctttcggctggctggaactcctcttaccccttgtctatcgctgggcagggcaaaacttcgggacagacatacttatgcaacccgctttttgggggattgtagccggagtggttatcatgggtacgttggttgtagggctttatccttcctggctgatggtcactatccgtccgtcggagattatgcgcggtaaactgttgcatggaaagagaggcaaccggatcagaaaggcgttgattgttgttcagttcctggcttcttttgttctgattgcaggtacgtttactgtgtttcaacaggtccgttacatgcagcgtgaggccgaatcggatctgaatacccgcattctggtcattaaatatccttcgttcaccgagggactgtcgctgcgcatggagagtttcaccaaacgtttgaagcaacgggcggatgtaagtcacgtgacagtttcgggagctgttcccggtgtggaagttgccaactattttaccaatcggccgtatggaagtgatccctcacaagtaaaattgatacagatgttttctgtagactacgactatttgtctgcctatatgcctcgtatgatttgcggacgaagtttttccgaagattatggtggcgatcttaaccgggtggtgcttaacgaagaagctgtcaggctgttgggctacgaatcggcagaagcggcgttggggcaacaacttaaaatggaagtggttagtgacccgcttgagataataggagtggtggagaactaccaccagcaatcgcttgccgtggcttacaagcctatcattttctttttgaaagagcgtgttccttttattgcaacgccttatatttctgtctgtctgaaaggaaagggggatgccggcgtcttgacggaaattgaacagatgtatcgtggatacttcccgacttctttattttcttatttctttttgaatgattttaatgaattcctatacaaatccgatcgtaattttggctggatatttgccagcgcctcattgcttgccgtatttgttgcttgccttggattgtggattgtaaccctgttttccaccttgtcacgtttgaaggaggtgggtatccgcaaagtgctcggcgcaaataaaaccagcctgttctttgtcctgaccaaagaactgttgttgcttaccgtattggcatctgcaatcggtattcctgtatcggcagtgctgatgaatgcttggctggaaacgtacgctttccacatttcgctgtcctggtggatatatgcagccacttttgtactgctgatgctgatagcctttctcactgtgctccaacaggtatggcgtaccatccgccagaaacctatgcacattttaaaatatgaataactaatataatatataacgattatgattaaaacagaaaaactgtctatgctcttcaccaccgaggaggtgcagaccaaagccctgaacgaagtgaccatgcaagtagaacagggagaatttgtagcgatcatgggaccttccgggtgtggcaagtctactctgctgaatatcctgggtacactcgattcacccacttccggctcttacttcttcgaaggcaaacaggtggataagatgaacgagaaccaactgacggctctgcgtaagggaaatctgggatttattttccagagtttcaacctgattgacgaactgaccgtatacgagaatgtggagcttcctctggtatatctgggcatgaaacctgccatacggaaagaaaaggtgaaacaggtacttgagaaagtaaatttgttgcaccgtgccaatcattttccgcaacagctttccggtggacaacaacagcgcgtcgccatagcccgtgccgtggtgacggactgtaaattgttgcttgccgatgaaccgaccggaaacctcgactcggtaaacggtgtggaagtgatggagctactacgggaactgaaccgtcaggggactaccatcatcatcgttactcactcgcagcgtgatgcgacttatgcccaccggattatccgcctgctcgatgggaagatcgtagccgagaatatcaaccgtccgctggacgaaacttccgggactaatacagagagcgtatgatagggaattattggaatagtgcctaccgcaacctgatgaagcggaaaggattcagtttcatcaatgttttcgggttggcagtcggcatggcatcggctctgctgatcttgacttatgtcacttttgagttcagtttcgacaagatgcacgagaagtacgaacgcattttccgtgtggaaagcactttctatgaaggcgaagtacagaccgactattgggccagcagttcgtttggttatggttcggctatgaaagagaatctggccggaattgaagactatacgcgggtggtttccttgtatcagccggaacagattgtgaagtatggtgaacttactttgcgcgaaaaccagatagcttatgccgatcccggcttcttccgtttgttcgactttgagttggtgaagggagataaggccacttgcctctccatgccccgccaggtggtcatcaccgaacgtattgcccggaagtattttcaggatgaagatcccatcggtaagatacttatctttactggaccttatgacaaggtggtttgcgaagtgacaggggtgatgaaagagatgccttccaattcgcatatccattataatttcctgatttcctataaatcgctcgggcaatatctgcatgactattggtacaagcacgaggtttatacttatgtgctgctcgattcgcccgaaaggaaggaagagatagaaaaggcgtttccggcaatgtcggagaagtataagacggacgaggcgctgaaaaataaaatatggggtgtgtcactgacaccgcttgccgatattcatcttaaaccgcaagttggttacgaggccgaaatcaagggaaaccgtacggccatgatcgccctgatctttgctgcaattgccattttggctattgcctggatcaattatatcaacctgactgtggcccgctcgatggaacgtgccaaggaggtaggagtgcgccgggtaataggagctttccgcaagcagcttgtatctcaattcttgtttgaggccttggtcatgaacctggttgcattggtactggcagtgggactgatcgagttgatcttgccatacttcaatcagttggtaagccgtacggtaactttctccgtttggctgacgggatactggtggcttttgcttttaatcgtatttgtagggggaattttcctctccggttactatcctgcattggcgcttctcaaccggaaaccgattacgttgctgaagggaaagttcctgaacagcaagtcgggcgaaggcactcgcaaagtattggtagtcgttcagtacacggcatctatgattctgctctgcggcacattgattgtgtttgcgcagttgaacttcatgcgcaatcagtcgctgggagtgaagacggaccagactctggttgtcaaatttcccggacggaccgaaggcatgaacacgaaactcgaagccatgaagaaggccattgcccgcctgcctttggtagacaaagttaccttctcgggtgccgtgccgggcgaagaggtggctaccttcttgtctaacaggcgaaagagtgatgctttgaagcagaatcgcctttatgaaatgttggtatgcgacccggattatattgatgcttatggactgcaactggtggcagggcgcggattctccgaagattatggagacgatgtgaataagttggtggtcaacgagtctgctgtccgtaacctgggaattgcctctaacgaagaggctctcggcgaagagatagaggtggaatgtaccgatgccccgatgcagattatcggagtggtgaaggattaccatcagcaggcactcaacaagaattataccccgattatgctgatccacaaagataagatcggttggctgccgcaacgctacatctccattgtgatgaagtccggcgacccgaaggaattggtttcgcaggtggaggagatctggcatcgctatttcgaggattccagctatgacttcttctttctcgatcaattcttcgatcatcagtatcgtcaggacgaggtgtttggtgtcatgatcggttgtttcaccggactggccatcttcatctcatgtctgggattgtgggtattggtgatgttctcctgcactacccgtaccaaggagatgggtatccggaaagtattgggagctacccgttggaatctgttctatcagctgggtaaaggctttttccaattgatcctgatagcggtaatcattgcgttgcccgttgcctggttcagtatgaatgcctggttgagtcattatgctttccgtaccgatctgaagatatggttctttgcagttccggtagtgttgatgctgttgatttcgtttgtgacggtagcctgccagacggtgaagattatcgtaggcaaaccggcacggtcattgcggtatgagtaagattccggaataaaataagtcgcattcggcacagagtgcatgagggtgtcatagttcaccacagattatacagataaatattattggttatcagtagattaaaaatctatcttgtaaatccgtgtaatctgtggtgaactatgaccccctcagtgccttttgtggtgaactttagcctttgggttgttgcgtctgggtttcttctccccaatgcgttttggcttccagttcttcccggtcacgcacctctttcgccttctttgcatagacaatcatgcgcagggactggtcgtaagtaaagtaattccatacccagttcagtaggacgtttgctttgttgcgtactcccaggatcgaacgtaaatggacgaccagccacatcacccaagccagccatccggcggttttgaaactactgaactctgccacggcgcgattgcgccctacggttgccatcgatcccaggttccggtaatggaacggctgcatcggctttcctttctgtagtctttgcaggttcttggcaagcagttcgccttgttgaatggccacttgtgccagttgcgggtgtccgttaggatagttcttgtccgtagtctgaatacattggtccccgatggcaaaaatagtgtctgttccctgtacacggttgaattcgtctactttgattcttcttccgcgtcccagtaattctccgtctatattgccgaaagtgatggctgccacgccgctcacccagataaacgtacgtgtcgctatctctgtaccgtcttccaacatcactttatgatctttgtaatccgtcacccgcttgttcagcaggatgttgactcccatttcacgcagaaactgttcggcatggcgggatgaatcttcggacattcccgccaggagacggtcgcccgcttcaatcaggtagatgtgcatcaggctgctgggcatatccggataatcgttgggcagtacgaacttcttcatttccgaaagcactccggctatttccactccggtggcccctccgcctacaacaacgacattgagcaactcctgccgttcacgttccgtactgcaagtgatcgaccgttcaaagtttgccagtagggcatttctcagtcccatggcttccgaaacggttttcataggcatggcctcttcttcaatgtgctcgttgccgaagaagttggaggtggtgccggctgccagtaccaggtagtcgtattctgctttaccgatggaagtctgaatcatctttttctcggggaagatggcccgtacttctgccatacggaagtaaaagtcctttcgtttctgaaaaatcttccggaacgggaaagagatggaactgggttcaagtccggctgaagcgacttgataaataaggggaggaaactggtgataattgttcttatcgactaaaacaacctggaaaccagacttttttagcttgttggccaatttaagaccgccgaagccaccacctacgatgatgacacgcttcttgtcgttttttacaatgttgaaactcatactgaaaacttctatttaacctgatgtgtctaaaacctaatgtcatggttataaacgcttgtcataggtaaaaagttcagctaaaagaacggtttcagaagttgtttcaagaggctttttcaccatagattacacagattaccgcaggtagtttgtgctgacaatcggtcgttcactcttttagagcctgttttaattttgcttgagatatgttttcagggatgttttccggtttttgcaaggagcatagcgggctatgtgacgggtaaaaacggggaaatagaccgagaaaaaactcaaaacaggtcaataaaattcctgtaaatttattcaaggaaaatttaaacagggcacttaatctgcgctaatctgtatcatctatagtggtttctgatgttccctgtaggctttttataattccggtaccatgcagaatttagtttccggaaaatctttcttcagataccgttggatgaagagttgtgtatcctcctgtatcgtccggtcctctaccgtcgggtagaggttgtacagaacggtatccagtttgatcccccggtttttgatggcttccaggctgagcaatgtgtggttgatactgcccagtttgccggaagtgacaaacagcagcgggtatcccttctgcgcaatatagtcaatcgtcagcaattcgtcggtaagcggcaccatcaggcctccggctccctcgagcaggacaacgtcataacggcggctcaactcttctgtagcacgttctattttgtcaaagtcgatgggacgtccgtctatgcgtgaagcgaggtgtggagaacaggggtaagagaagatttcgggcatggtcagtccttcccggtcgtcatcagtgggggcgatacccatgatgcggcggtgcaggtcgatgtcttccgagtggcctgtattgcctgtctggataaatttctgagtaatggtgcgttgccctttccggttcagttcgcgtgccaggaatcctgtggcataactcttgcctgcatccgtatcgatgccgctgataaaatacacattctttttcatacttcttttgtttgagacccgcaggtcgtttttcttatctcttttttgctattatatagatggggtggtaggtcagtgaaacagaacctttgccgggactgaacagacgttcgtattcctgacagaagaggttcagtttgctccgggtccagctttggttacaagtacctgtcactccggtctgcttcagatgataaagcacctccatcggattgttaaaattcagtgagatgacttcttcctccgtgtgcacaatgtcatatagtgccgagagcgaggcagtcagctcttctctcgaacggtaggcgagtccctgtccggtcagttggcgaatctccttcatgttttcttttccgaaagtactgaaggcaatgtatccctgcgcattcaggatgttttcacatttccggaaaaaagcatcgggatgttcgaaccattgcaggacggaacaggaagtgatcagttccgttccgtgtgggaagtcaagtgcttcggcatctccgggcaagaaggagacccgctcgttcaggatatctctgcagctatggcgcatctcttcgcaaaggtcgttcagcagcaagtgttccgggcggaacgaacggagtagcagacgcgaataagtacccgtcccgcagccgaactctacaacacggcggagggagtgcgcagggaggtgttgctgcaacaaactgcacattttccgggcgatttgttgttgcacccgggcttcgtgcggataggtgccgattgctttcgtgaagcgttgggcgatcagtagtttggaggaagcagcagcaggagcgagattttctttcaatatcttttcgtcataatgtgctccgtcatatcgctgaatttcattgcaatatttttgccaggcctgttcctggttcttcggtgggaagatatgatcggattctccgatgattgctttattccagacaaaggtggatgggggcagttcgctgtattgtctgccgatggccgccagttcttctttcaattcttctaccggtcgttggggagctatttccaggaaagcttgaaaggcacttcccgatccgcacattcgccggcggaacttctgtagggtcgcttcattgagattattgagtgtaccttcaaatatggcgggaggaattccccgcatatcatcgatagggaaaggtgtcccgttgatggcaatgctttgcttgagggggaggttgctgtccggcaacacttgggaagctgcccatacccccatggaccaggcaacaacatagatcccctcatacgtggagagcaatgtgctgtcaaaatcgagagaacggtaatcatagcagattatcagatctttatttggggggagattgtgcatgaagggagtttcatccattccccatccggcaaagaagaggagagcctcttttcggaggggagggcatccggcgacttcacatccggttcctgtctcagagtgaagggagtttacagctttttggggtggatatagtcttttcagtttcataaatttattactttgatgatacaggccgtattgttgctatcactcttttcacttcctcttccgttacgtctgccgttaatgaaaaacggatacgggaagttccttccggtatcgtaggcggacggacaggcaacgcataaaatcctttgcgttgcagctcttctgccatacggacggcggaagaactttcacccgcgatcatgggtacgatttggctggccgaggcagaaaagtatcctttctcctggaggccggtccgcaagtttctgctgatggctgccaggtgttccctcttctcctgatattccgccagatggcgcagtacaaatgaggtccattgcagggtgacaggcgggagtgcagtggtgaagataaagggacgcattttatttatcagatagtcccgtatcacctgcctgcacacgatatatgccccagaggaagccagtgcctttccgaaagtgcccaccaaaaagtcgatatccgatatgcatccgtatgcttcggcacatcccagtccgccggttccccggacaccgacagcatgggcttcgtctaagtaaagcaatacgttcggatacttgcgtttcagtttgaccaaccggggtaagtctgcttcgtcaccatccatactgaaaatactttcggtaacgataataatctgttcatattctttgtggtaagtctctactagtctctccaactggctgtattcgttgtgccggtagcggatacatttggcatctgatagccgaatgccgtctatcaggctggcatgtatcaacttgtcggccaaaatcagtgtttttgtgtcgcatacggcaggtaggattccggtattggcatgatatccgcaattgaataccagtgccgcttctgttccaaataaggaagacaaggtggcttccagttcatcgtatgcggcaaaattgccggtaagcaggcgggaagaagaggaggagaacttaatttcttccggcttcactgtctgccagaaagcttttaacagtccactgtcgttagccaaccccagataatcatttgacgaaaggtttagcatccgttgtccctcgatgattacctctttgccctgatgtaccagggtaggaagggtacggaagttatctttctttttaaggagttgcagctcgtcaaggaaacgggtgagttcacctctttccgtttcttggtttttattcatatttgtaatgtttttgagtttgattcaccacagagtagcacagagtttcacagagattattttctcttaatatcttataaacaagagattgaaactctgtgagactcttgttactctgtggtgaagtttgattcgcctctatttcgtttgggaaccgggaaggccgttacttatgatccttatcatcccttccgtgagtttggtcaactgttcgggcgtaatgataaacggaggcattacatagatcagtttgccaaacggacggagccagatgccttcctccacaaaacggcgttgcaggtatgccatattcaccggttctttcatctcgatcactccgatggcacccagtacacggacgtccgctacctgagggagctcacgtgccggagctaattcacggttcagttgagcttctattcgttttacgttttcttgccagccggaagttagaagtaaccgtaccgatgcgcaggctacggcacatgctaacgggtttcccataaacgtaggcccgtgcatgaatgctcccggtgcatggttggagatgcagtctgccacttcattggtggtcagtactgccgataaggtcatgtatccacctgtcaatgctttgccgatgcacatgatgtccggctctactccggcatgttcccaggcgaagagttttccggtacgtccgaatccggttgctatttcatcgaagatcaacagtaccccataccgatggcagaggcgcgcagcttctcttaaatattccggatggtagaaacgcatgcctcccgcaccttgtacaatgggttcgaggatgaaagctgccagttcatcggcatgtttctccagcagatgctccaacggacggatgtcttccgggttccattcatctccgaaccgggaggagggagcagggaggaagtggcggatgggaagtgccgaaccaaagatactgtgcatccccgttacaggatcgcataccgacatggcattccaggtatctccgtggtaaccgttacggatggtgacgaaattatttttctccggttttccggctgcataccagtattgtacggccatcttcagtgcaacttcgacagctacggagccggaatcggcatagaatatcttttgcatagagggggggaccagcggaagcaacagtttgcccagttcgatagccggatcgtgcgtcagtccgccgaacatgacatgcgacatccggctgagttgatcttgtacagcctggtttaatatcgggtgattgtatccgtgcaccgcacaccaccacgatgacattccttcgatcagtgtctgtccgctttccagggtgatggtggcaccgtcagcccgtttcaccttatataccgggagcggattcgaagttgaagtatacggatgccacaaatgttcgcggtcaaattgtgagtcggcaaagtgatatccttccgagagaatcatctctttgtcgtccgataccttggagccgagtgttgtcagcagatcgcctacgatggcggagttgatgccgatatagagggatttccggacggcctctggtgtcagttgcgagcgccctccggcaaagcgcaggtaagccgcagggttaatgaaccggaaaagagccacagtggtcagtatctcttcttcactgagaggagactgatgctcgagcggagtgccgggtatgggttgcagcaagttgatcgggatggattggatgttgagatcgcggagtgtgaaggcaaattcgatccgttgttccacagtttcacccatgccgatgatgcctccgcagcagaggtccatccctactcgtcgtgcggcatgcaaggttttcagcttttgttcctgtgtatgcgtggtacagagcgagtcgaagtgggaaggagccgtttcgaggttacagtggtaccgggtcactccggcatcatacaatgcctgcaactcttcttcgtccaacagtccgagcgaagcgcacaaccggatagacgaatggcgacgcatccgccgggccgctacacagagctctttcatgtttttgggagaaggtttgcgtccactggtcaccaatgaaaagcggttgaccccttgtgcttcgttgtattttgcttgtcgcaggcactcttccgcgctcaccagatcgtatacatcggccttggtcttgtagtgagacgactgggcgcaccatttacaattttccggacaccgtcccgagcgggcattgatgatggaacacatgtcgaactcctgcgaagcgcaggcggtggtgatgtcgtgcgcggcatcatacaactcttctttacggggatagagcgccagccattcggcctgctctcggctgatagccgttccttgtaatacttggttttttatttcttcgatagtcatagggtggggatattaaaaaagaggttgccggtcccatcgggatgggaggcaacctctttaggtgtaatgtatgaggcggatgtcacaacagttgactgtgcggcaccggcataagaatatttggatgattggagttgagtaagaagcaagagcaatggttcgggagataacgtgaggttctcccaatcttcttccggaacggaatcttctgtttcccgttgcggatcaagtccggttgtatgtggagtttgctgcttgcacaacgcacattcggtgatgttctttctcaactgtccgatggtgacacacaaacccagagtggcaaatatggcataagccttccggctccactggcggaagcggataaacgaatgtgatatgtacctttcttttttcataagccgtatggtgatatcgggtcatcggacggcggcaaagctacaaagaatctacggaatgaccaagggatagcatcggtttgtaagcagggacctctcctctaccacaaagacggtataagaatcccttataaaggggatttcaagaacaatccccatactctacttttgcagcaggaaatgatccgtgaaaattaattaaaaaatgtaggtggcttttgacacaccttcaagaataagataacaatttcaagccttttaacaacaatctgccggattgtgtgttaaacaaaagattctaatttaaacataactaaacttaaggtatgaagaccaatttacgtctattatttacgttgctctttgtcgtttcggttgttgcattacgtgccggaacaatgaatgacatacgtgtttcgggcactgttgtgtccgaaggagacccgttgcccggtgtgtcggtattagtgaaaggaaccggcgtcggtactattaccggtattgacggcaagtattccatcaatgttccgtccgatggtacgctggtattcagttttatcggactgaaatctgtggaacataaagtgggaggacgctcagtgatcaatgtcgagctggtgcccgacagtaagcaattggaagaagtaatggtagtagcctatgccactgccaagaaatatagtttcaccggtgccgcctctaccgttaaaggtgacgagatagcgaagttacaaacctcgagtgtatcacgtgcccttgaaggaaccgtagccggtctgcaggcaagtgccgcaagcggtcagccgggtaccgatgccacaatccgtattcgcggtatcggatccatcaatgcatccagtgcacctctctatgtagtggacggtgtgccctatgacggtagtgtgaattctatcaaccccgaagatatcgcatcgatgaccgttctgaaagatgcggcctcagctgctttgtacggttcgcgtggagccaacggtgtgattattatcaccaccaagcagggacaaagcgattcgaagactacagtaaacgtgaaagccagcttcggtggttccaatcgtgcggtacgtgattacgaccggatcggcaccgatcagtatttcgaactttattgggaggctttgcgtaaccaatatgcactggatacaaagaactatactcctcagacagcagctattaaagcttctaaagacttggtaggaaaactgatgggggccggccccaatccttatggctctaaatatcctcagccggtaggtacggatggaaaattggcggatggggccgttccgctctggaacttcgactggcaggatgccatggagcagcaggcacttcgtacggaactgggactgaatgtttcaggaggtggcaaaaccaatcaatactacttctctgccggatacctgaatgataaaggtattgcgttggagtccggttatgaacgctttaatctccgttcgaacgtgacaagccagatgaccaaatggcttcggggaggagtgaacatgagttttgcccactctttgcagaattatcccgtatcatcggatacgaaaacaagtaatgtcatcaatgccggccgtttgatgaacggattctatcccatctatcagatgaacgaagatggaacctataaactggattacgagggacagcggatgtatgatttcggttcttaccgtccgtccggttcgatggctaactggaaccttccggccacattgcccaatgataagtcggaacgtatgaaagatgaattttcaggacgtaccttccttgaagttacctttatcgaagggctgaagtttaagaccagcttcaactttgacctgatcaactataattcactcgactataccaatcctaaaatagggccggctgttaacaccggaggttcatcgagccgtgaaaacgaccgtactttctcgtggacctggaataatatcctgacttatgacaaaaccctcggagagcatcatttcaatctgctggccggacaagaagcctattcctaccgttacgatgtgctgcgagcatcccgttcgaacatggcattgcctgattttcccgaactggctgtcggttcgttggtaaccggagggacaggataccgcgtagattactcgttggtgggatatttcctaaatgcccaatatgactatcaaagcaaatatttcttctcgggttcgtatcggcgggacgggtcttcccgttttgctcccgaaacccgttggggtaatttctggtccgtcggtgcttcctggcgtatcgaccgtgaagatttcatggtagctgcgagcgactggctttctgccctgactttgaaggtcagttatggtgcgcagggtaacgataacctgggaacgtattatgccagcagcggactttattcggtggtaagcaataatggggagaatgcgttggtatccgatcgtctggctacaccaaaattgaaatgggaaaccaacctgaacttcaatgccggcatagacttctcgttgttcaacaaccgattctccggttcgttcgatttcttccagcggcgttcgaaagatttgctctattcccgtccgctggctccctcgctcggttataattcagtagacgagaatgtaggcgaactgaagaataccggtgtggaaatcgatctgaaaggtaccttaatccatacccgggactttatgtggcgattggggcttaacctgacacattataagaatgtcgtgaccgaccttccattaaaagatatgcctgtaagcggagttcataaactggctgtgggacgttctgtctatgatttttacatgaagcaatgggcgggtgttgatccggagaacggcgatccgttgtggtacaaaaatgtgaaagatgccaatgacaagatcaccggacgtacgactaccaatgactatgcccaagcggattattactataccggcaaatcatccttacccaaagtgtacggaggatttaataccgctttctcgtataaaggctttgaactgtccaccatttttgcctatagtatcggtaattatattgtggaccgtgacgtaactatgctgtggcataacggaagttctaccggacgtgcctggtcgacagagattctgaaccgttggacaccggagaatcgatatactgatgtgccggctctgaaaaccgtatcgaacagttggaatgcaaattccacccgtaacctgttcaataactcgttcctgcggatgaagaatatcacattatcgtataacttcccgcaaccgatgataaagaaaatcagcctgaacagtctgcaattgtttgtgcaggccgataatctgcttaccgtttcgaagaatcagggactcgaccccgaacaggatatcagtggactgacgtattaccgttatccggccatgcgttccatttccggaggaatcaatgtttcgttctaaggctttaatccccggaaaagggctgttgcaatcatatgctccgccctggtttaatcatgcataaatcacatataacagatatagtaaagtataaaataacagatgatatgagaacaatacgatttaacaataacagacatatctcttcttctcctcttcttcggacagagggtgggagagaggcttccgtgagtaatacctccggagataagatccctaaaggtaagttttcctttctccttctcttcttccttttgttcctggggagttgcagcagcgacttcctcgacaataagccgacagatgccgtagattccggcctcgtacctgtaccttcgaatgccgaacgcatctttaacggtgcgtggtacaatctattcgaatatggtaccacttatgccaacatcggctatcgtgctttgatgtgcttggacgacatgatggccgacgacgtggtttcgcgccctatgtatgggtttaattcttcttatcagttcaatgacgtggtgatgccttccgacggacgtaccactttcgcctggtatctgatgtataagaccattgacaactgtaatacggccatttctattcaagctaccggagatgatgatacacctgagttccggcatgcccagggacaggcacttgccgtacgtgctttctgttatcttcatttggcacagcattatcagttcacctatctgaaagataagaatgctctttgtgtaccgttgtataccgaaccgaccaatccgaatacccaacctaaaggaaaggcaacgctcgaagagatctatacacagatcatcaatgacctcaaccgtgccaaaggacttcttgacggttatgtacgtccgaatgacaagtcgaaatacaaacctaacaccgatgtggtaaacggacttctggcccgtacttatctgcttaccggacagtgggacgaagccgctaaagccgcattggaagctgccaaaggttacactctgatgacggatgccaaaaactatatgggcttcaacgatatatcgaataccgagtggatctggggacatccgcaatctgtcagccagtccgatgccagctataacttctattatctggatgtggtagaacccgattcatacaatagttttatggccgatccgcatttcaaggacacctttaccgaaggtgatatccgtctggaattgttccagtggatgcgtgaaggttatctgggataccgcaagttccgcatccgttccgaccagacgggcgatattgtcatcatgcgttctgccgaaatgtatttgatagctgccgaagccttggcgcgtaaaggtcaattgggcgaagccgtaaaaccgctcaatactttgagaaacgcccgcggactggccgattatgatcttaccggaaaaaatcaggagcaggtgattgatgaaattctgatggaacgtcgccgtgaactttggggtgaaggatttggcattactgatgttctccgtacacaacgtcctgtggtacgtgtcgctttgaccgaagatgaagctgccaaagaatatgattgctggcaacagaacggtacttataaaaaatatcatccggaaggtcattggttcaccagcttccccgatggaacgaagtttgtgcccaatagcatatattatttgtattctattcctgaaaaagaaacgaatgcaaatacgaatctgaaataagaaatcatagtcaactgattttatatgaactgtttctgaaaaatcagatagattaatataatagacgaaaggtgtgtcataactctacggtgaataagagttgcgacacaccttttttatcaatatcgttaatggttaactgaatatatacacaatgattcccgttatgactacataagccagtgcataaggaatggctgctttcaggatctctccctccttaccttgctggttgcctgctgatgtggcgatagcaatactttgaggagagatgattttgcctcctgtcgcacctaccgtattggcggccgatagccagtcgggactgacattgatatgccctgctacgctggcttgcagctttccgaaaaggatgttcgaggaggtatcacttccggtgatgaaggtacccaaacaaccgataaccggagcaaagagagggtagaggcttccggtagctgtggcgagtgcagtggcaatcacggaaatcatgcctgccgtatccataatggtagataaacccaccaggcagataacggtaacgaatgtttttttcaactgctttacagtgttccataatacaatgaacagttctttcactttagctccctgtatcagaccgcctacaaacgtgcctacaaaaagcagaactccggcatgtgtcagccaggcgatggtataattcacggtggagtcattgatggggaggctgatgcgtgtcacccaattgttttcgagcgtacttcggaggcccggaaaaagcggactggtcagtatgatcagtaacaaaatcagcagatagatgctccaggcattcaggatatctttccttttcagtgcgttctgctgcgctttctctttttttggggcagtcagtttgccataaatgacgataacgacgatagacaagatactgccgatgatagccggtgattcggcccccatatatcgggccgcaacgtactggctacctaaagatacagcgcctaccagcagtgccagaaatagatttttgggtaatgattttattttcgggtcggtcaggaagagcagtaccaacggtatcaggaacattagtacggaaagttgtagtacgacgttcgtactcagcacctgtacatccagattggtttctttggcaagtaccagtaccggtgtacctatggcaccgaaagccgtagccacactattggctatcaagctgacggtggctgaaaagatgggtttgaatcccaggctgatcaggatagcggcggggatggcaacagctgtaccaaaacctgccatggcttcaagtaaccctccgaaaccccaggtaaggagcagtacctggatacttttatcggtagagatggaagagaattgttgtttgataatctccatcttctctgttttcagcaatacattgtagctgaagatagccatcaggatgataatcaggatgggagaaaccgctttcagtgcaccgtatacgaatgaaaataccaagttatctaccgcataatggaatccgaaaagagctatcagtatagttactatcagggagatgacgctacttttgtcacccggcattttaaaaaatgccattaatacaatcaagagcaataccggaacgatggcaaggatcagtgtcataattgtctgtttttaatagttgatgtttaagttaagatattgatataacaaaaccggaacctgttttgacggatgaaataattatttttttgctgtatagcgttaaataaaaaaaggtgtagccctccgcatggaaaggctacaccctttggtccggatagctacaccctttttatcggatggctacaccccaatgccggggatttattttttcttcatattcaagatctgttgcagttgctgtaggttggctttagcggcctcgttacccatttgggcagcttggttgaaggcagcgatggcgcgttgtacatctccattgaggaagttgtatacacctacgttgttgatgaattctgctgtttgatggttggctttatccatatatttgattgcgttttccagatctttcttggtcagtgatacggctgcggcattcaggttggctacttcatcgttcggatatatgcgtacggcaatgtcgaatacattcacaaaatcgttgcttcctttcggataactgttggctacctgatacatctcgttcagactcagatatttcgggttgacttttatcaccacccgtccttgttctacatcgaagttggctacggtgtagtctatcttgcagttcactttgcggagtcccggataaatctctttcagcattgtgcgataaggagcaccgccgtccacgcgcatgatttcctgtttgcggcgcgcatcgtcagtcgtattcttgatgataccgataaatttatctttatccttcatggacgatttttccaatgcttgtaccaatccgtcccaattttcaccaccaaaagttactttgtaaagtttgccgggaactttttcgttggtagtcagataattcttcagagcttcggcacgtttctgcgacagttgttcgttgaatttcaacggaccctccggtgaagcgaatccttcgatactgattcctgttactgtcaggttcttgtcattctgaatcttgtcgaacatagcatgaatgttcatcagctctttgtggttattcatgaattccggctggatcacagctttgctgacaggaaagtcgaggtgagcttcatactgttcgctacggtttttcaccacctccacagtcggctgaatataagcaaccaccggtatcatggcactcaggcgtttcgcttcggtagaaacgtcgtttgttatcagctcctgagcaagcatctcttcgttgttgccgcagccgcatagattttctaccagattcaatgaagcatttgccatccaaggttcgtaagggatcacctgggcatagttgagcacttctcttttattataaggaattacgattcctgcaggtagttcgcggctgatggctaatccgcgcaaataagccttctgacggcgtttgccgttgatgatgatctcttccagcgctacgttgtgctgtccgtctgtcaggagcggagtaagtgtgagcatacgttcgggactgactgtcagatttttcatatcgatcttcatgtctacataaagcgaattgccctgttgccataatgaaacatcggatagactgatggcatctttaaaaaatttctgggcactggccggcattactactgcgagggccaagaggaagtatatgatttttcttttcattgttactgttggtttagttttttataattggttccggtgaatgcgggacgtttacttgatggtataaatgatgctgagtccgactttggtcggtccgaaataattcttattgttgtgccccagcttttcaccacacttgccacatgcgtatttgtcatagtccaggcgggcatatcctgcaccgatagtggcttccatactccagcggtttttcagtatccaatggtagccgtaagagatacctgcaccatagatcttgccgtcatagcggtagttgcccaacccgaagatgtcgagattgctcatgttaacatcggcataatggccatggagaccgaaaaaactaccgttgaaacgttcgcaaagccagtagcggagttcaggttgtaccagccagtgcttgatttgtctgtctttggaaaatttccagggattgtagttgcccgatacatcaagagtgagttttttcgccaaggctacttcaaatcctaggttcggagtactggtggcccagtagagggcattggttttgatggcgaacttgggaagataagtttttgttccctgctcttgtgcatgtatgcttgtggcaaatacaagcaggaagcatgctgctaaaaaatgtttgattgttctcattttcattttggtctaggtttttacataaactatttgcgagattaaacgtctgagagggggactttgttgactcatactcaaaataatgttataggacatgcacgctaacatttttaagcaaataattgttatcttaataaagtcaggattccaaacttttcattttctccgggaaagagggtgaaaataaacaagcaattgtaacttggattacatctgttctcttttttacatgctaattttacatattctttaaaataatagcctatgaaagagcttatcaatcgcctggaagagttgaacaggcaagccgagaaaggtggtggagacgcccgtatcgagaaacaacattctgtcggaaaattgacggcacgtgaacgtatcgacctgcttctggagaaaggatcgtttattgaactcgataaactggtgacccatcgttgtacggatttcggtatggagaaacagaaaatatccggtgatggagttgtaaccggatatggtatgatcggcaaacggcttgtgtatgtttttgctcaggacttcaccgtttttggcggtgcattgtccgaaacgtatgccaagaagatttgtaaagtgatggatatggctatgcagatgggagcacccatcatcgggctgaacgattcgggaggagcccgtattcaggagggagtccgttcgctggccggttatgcggagatattcctgcgtaattctttggcttccggtgtcatccctcagatcagtgccatcatgggtccgtgtgcgggtggggcggtctattcgcctgcattgaccgattttatcctgatggtgaaaaattccggttatatgtttatcaccggtcccgatgtggtgaagagcgtgacacaggaagaagtcagcaaagaagatctgggaggggcggatgtccataccatgaagtcgggggtggcacacctctctgccgaaaatgatattgaatgcatcaattacattcgtgaactgatttcttatctgcccggaaataatatggaagagcctccgtttgttgctactaccgattctccgacgaggcttacgcccgaactgtcggatctggtgcctaccaatcctaatcagccgtatgatatgaaggagatgatccgtgcagtggcggacgataacagtttctttgaattgcaggaagagtttgcccgtaacatcgttatcggttatattcgcctgaacgggaagacgataggggtggtggccaatcagccgttggcattggccggaacgctcgatatcaatgcctctgttaaggcagcccgttttgtccgtttctgcgatgcgttcaatattccattgctcacactggtagatgtaccgggattccttccgggggtagatcaggagtatggcggcatcatccgcaacggtgccaagttgctttatgcctattgtgaagctacggtgccgaaggtcacggtgattgcccgtaaagcttatggcggagcttatgatgtaatgagttccaagcacatcaggggagatgtgaatctggcttatcccactgccgaaatagccgtgatgggtcccgatggagcggtgaacattcttttccgtaaagagattgacaaagctgccgacaccgaagccaggcgtaaagagttgcaggatgactatcgcagcaagtttgccaacccttaccgggctgccgagttgggctacgtggacgaggtgatcgatccggccataacccgtatgcgcctgatacgcagttttgagatgcttgccaacaagcggcagtctaatccgcctaagaaacattcaaatcttccactttaaagcagaggagaacatcgtatgataaaaaagatattagttgcgaatcgtggcgaaatagccatgcgtattttccgtacctgccgggtaatgaatattgccacagtggctatctacacccgggtagatcggggtgccttgcatgtgcgttatgccgaagaggcttattgtatttccgattctccggaagatacgtcttatctgaaaccggaaaagattctgcaaatagccaaaaagacaggagctgccatccatccgggatatggctttctgtctgagaatgcggacttcgcccgtcgttgtgaggaagaaggggtaatctttattggtccgagtgccgatattattgcccgaatgggtatcaagactgaggcccgccggattatgcgtgaagccggtttaccgatcgtaccgggcacggaagatccggtgaaaggcattgccgaagccaaaaaggtggctgccgaagtaggctatcccatcatgctgaaagcactggccgggggtggtggaaaaggtatgcgtctggtacgcagtgaagaagaaatggagacggcattgcgcctttcacagtctgaagccggaacgtcgtttggcaacgatgctgtttatattgaaaaatatatcgagaatccccatcacattgaagtgcagatactgggagataaatatggaaatgtaattcatctttatgaacgggaatgttccattcagcgacgcaatcagaaagtaattgaagaatcgccttctccttttgtgaagcccgaaacacgtgccaagatgctgaaggttgcagtggaggcctgtaagcggattaattattacagtgccggaacgctggagttcatgatggataaagaccagaatttttattttctggaaatgaatactcgcctgcaggtggaacatccggtgacggaagagtgtaccggggtcgatctggtacgcgacatgatactggtagctgccggcaatcgtctgccttacaggcaagaagatgtcgagttccggggagctgccattgaatgtcgcatttatgccgaagatcccgagaataacttcatgccttctcccggggtgataaccgttcgtgaagctcccgaaggacgtaatgtccgtttggacagtgcggcttatgcgggatttgaggtttcgctgcattatgatccgatgattgcaaagctctgttgttggggacgtaatcgtgattcggctatttcgaacatggcccgtgcgttgcgcgaatataagattctgggtatcaagactacgattcctttccatcagcgtgtgttgaagaatgcggctttcctgaaaggagagtacgatactacctttatcgatacgcgcttcgataaggaagacctgaaacgcaggcagaataccgatccgacagtagcggtgattgctgctgcgctgaaacattacgaagaagagaaagaggctgcttcacgcgccactacgcttccggtagtaggagattcgctttggaaatattacggcaagttgcaaatgactgccaataactattaaactcagaatgcttatgacaacaatattagcaacttattatgccaaaatacaggatgtgcccgacagcgagtataaagtggagattctggaagacgggccggtgaagaaagtggctgttaacgggaaagtgtatgatgtggactacaacgtagggggtgactctatctattccattatcatcaatcatcattcgcacggagtacagatatctccgacttcccattcctcttataccattatgaataagggggaactttatcagatcgagctgaaaggagaactcgagaagatacataatgcccgtagcggagcagatgccgtagggcgtcaggtagttgtagctcccatgccgggcgttatcctgaaaacttacgtcaggaagggagatgaagtgaagaagggtgatccgctgtgcgtactggttgccatgaagatggaaaacgaaattcgttcggtggccgatggggtggtaaaagagatttttgtggaggagaatacgaaagtggggctgaacgaccgtatcatggtggttgagtagtaagagtagaaaccgcaagggctctggaagtatgatctttcagggcccttatcgtatgatgtatcaactgtctctataaagtgacatttgcgaagagcagggttgtcagactctattcttgtatatttctcctcctttcatgatcattatgaaattcttttccggatctcccaatagggtaatgtctttcagtacgtctccatctaccagaattaagtctgcccaggcatcttcttctataacacccaatttcccgggatagggatttcgtgcaccggacagagccagcaattccgcattatcatgtgttaccatcttgagaatttcaaagttactgaaccattgtcttaatttaaggattccctgattctgattcttcgtgttggcaggattgaacagtaaatctgttccccatgccagcttgacgttgtatttctttgccagttgataggtttggtccgtaccttgaactaccaaggcatgcttctcctgttgttcttttgtcgggaattgattatctcctaaagtgaagggttgcatactgagccatatctctttctctgcgatcagctgcatggtgggttcgtcaatcagatggccgtgctcgatgctttttacacctgcatggatagctcgttgaatagctctgggcacatagacatgcaccattacgtatgttcctgcatcttccgccgctttaacggcagcatgaatctcttcctcgaagaactgtgtatcttccaaccgatcatacaaggaagctaccccgccgcctgtcatcaatttaatctggctggctcccaggcggagattattgcgtgcggcgacggtcacggcgtctattccgtcggcgataatggcagctcccatcttttcggtatgcgtcagtccgcaacagtcaaagggacggggttcgtcatataccgcccggaaatctccatgccctcctgtctgggagataagagagccactgggataaatgcgtggtccggaaaggattccttcgtcgatggcccgtttaagcccgaagaccggaccacctgcatcccggatggttgtgaagccgcggagtagggtagctcgagcttcttgtccggctttgaactgcgtataggcggtgtctgcagtaagcagatccatcatcgtattgcatgacatataagcatgccagtgtgcgtcgatcagtccgggcatcaggaattttccctttccgtcaagaatggtaacattgggaattccgtccgtagggatcggactttctgaaacggttttaatccggctgtttaccaccagcacatttccccggccggtctgttcgctgcttccatcgaaaatttgaacgttattgattaaaatactattgtccatgatacattattaataggtgagtactgttggtataacccgtctgaggattattagtttagctgcaggactgataaacttcgttaagtgagagatttattccggtctcttcctaaaaaactttactcaatatgggatgactttctgtctgatgatttctatcaatgtattgggcgttttatttcgtatcgttaatcaacagaaatcttccgtccggtcaggattattaaaatgaaataattagaaagttctaataactttctacattgcagtgtttatagggattccgggcatagattgcttctatttgatagactgtattttaagctcgaatgatatcgggttgaacctattctttttgctatacgttctctttttatagacgaagtaactaaacccgtcacatttcagccggtaaatgtggcatattgtctcacttttaaacatatatgaatatgaaaactttattcatttttctatttgttttgcttgcattttactcctgcgatacggatgaaccgatcagcgcagaagacttatcggctgcaaccggtactaatacggatgaggtcgatgtagcttccaggtcgggcagctatctgatctggcttaatggaatgagtgcggaaacaaagaaagttgcagatcaactgcaaaccgtgaaccactatgacaagatggtggcttttaatgatttaccggggacagacaaggtggaaaccttggaaaccatggcaaaagattctttgaacgatctgacaattgtaggcagtgttgccgatttcatagcaggtacttacagtcctgagatgatacaggacatccgtcacaatcgtcagggagtcatcttaattgccaaagacggtaagggagaagatttgaaggcgcaaatgcttaaacttttcgggctttatgtagataagggatattataaagtcagctttccgcgtgaacagcgctatgcctattatgacgcaaacgatccggatgctttgaagaagctttgcggaacgggtggtctcaatcctcacacccgtagcatgttgggctctcccggaccgacggatgatccttcggctccggaagttaccgaacgggctttgcatgctatgaagaagatctatatcagcaatcggtattatgtatataccagtgattataaatatcacatgaccggatatgagacgctattaccctatacggctgatatcagggagtatctcccgcgggatgataaaaggtatgatgggatggttgatcgcgaatggaccattgatgcttataatctgcgtatttacgcaccgaccaatggagataatatgcttgctgtttatagttcgggcggaaatggtttttccaacaggctcgaccattcattggtatctttgaataatgcaccgatgtatgaactttgggcgttgatatggggattgcgaaacaatgcttatacaaagattaatatccgtgacgaccaaagttcacagttgaatctcaaactgattgactttgcgccgggtttgccggagacagagagtaccattgagcatgcatacgaaaagagcgtaggatttgatttgggagcgactccggttttaaagggtgagtatcgttggggcaagtccattacatatcagttggcggaaatgacccgtgaggtgactcgtaccattaccgatgccgagatgagttattgctggaagtggtatcctgaaacgcttttccggggtagcaaggctatgaatgcagaggggatgatcgatgctgttactatgatttcgcctgcatggtatgatattctctatgatcatgtggcgggaactccgggtacggataatcctttctgtgactatgacaacgacttgcagtttaaccagaatctgctcaattacgagcagcaatgcgccattactgcccggacaaccggtgcgtcggccggtgttgtagccatcgagataaccgatggaatggtcttacagcgtggaggagcttggtttacgagttggggagcggcggtgattcattctttgccgagcagtgccggaacagcttacaataccactgtggatgtacacaaaaccactacagtgtggatagactataataactggtaaaacgaaccattaaaaaaagattatgatgaaaacaaaaatgatatatatgatacttctgttctcaagtattcttttcgggggatgcgttagggatgtcattgatgatgttccggggacggatgaggactatgcggcagataagaaggacgtggtcctgatacgtatgggaactaacgatgcggaagtgaaagatattacatcccgcttgttcaacaacattccttcttcctgggaaatagggaagaagaccattgtggactatgacaagatgaaagatcctgagacggaacttaatgctgacatcaagaatccgaagatttatatgacggtcattttgaatgtcgatgatgttatctccggtaaatatccgatatctctgttccgtatgttgaagttctataaaagggatttttatgtgattgccactcagtccactccggaacagaaggaggagatgctttcactgataggagtctatatggaagcaggttattacgcgatcaactatgataacgtacagcattaccgtatttttccttctgccgatccgtatgccaaagataatatgattggtaagggagtggcttccttcaatcaaaaactgttgacccgctctgccgataccttacccgaaggtaacgatccggatcccggatataatgcacaaatggcggataaggaggctttgaagaggattgagatttacaaccgtatctatggctatgctcagggagacatgaactactccatgcaggcggtcccttataagatgaaaccgggtgccgcacccgatgtgattatagataactcctgggcgatagatgcctataacttccagatatacagtaagaacaacaactgtatattgagtatcacgaataatgccggaaatggcttcactgccaatatcaaagactataccactcccaaaggtgccaatgtctatgcttacatctggaatttgatgcgggaggcttccagtgagataaccgttcattcggacggaggaattttcagggagatcagttatcagccgcagacggtgaatcacggtgccagctataccgagaactctttctggaaagtgtctgtttccgtatcgcccaccaaactggaagacaaaccttgggaggcgttcaaagtgtcgtttggtaaagaatcgtctaccgaagtgtcttacaagactaaatcgatggactattcctgcaaggggcagtttggtaacgggctgtacagcaaactttggcagtttattcccggagagttctacgacagggcggaagcctttgtttacgaaacgagtcagggattgcgttggatagacgctgcacaagcgatgacacccaattatgtgacatggggaggctggacccttcgccagaattatttaaatcacatcaacaacagtatgaagttgcatcaacagcagtgcatttactctctagagtcggacgcacagcccggagtcgtttctgtggctatcacagacgccatcgatttacaaaagacgtatgtacactataactgcggcattcgctatgggcacgattcggctaggacggatctcaaaatgtcgaagatggtgtggattgatttcaggcagtgggacaattgacctgcacccttaactctacggctatatgaggtttttatccatgcctaaagcctgcttcattacagattgagagattacacaactatatagcaagagataagtgataatagtgtttctctgtgtaatctgttaatctgtggtgaagttttggcttattagcacaggatggtggcgtatcgcttagaatcttgtcagttgtttgggcgatccatgccaggaacagcccagacaatatacttccgtaaaatcgaatccttcgattgggatttccggatatttgggtacgactgttccatcttgggcaatatatactaacagacgttcaccctgatcgttttttacatacataccggctattttacactggggacaaagcaatttcttcatattactaaaatggattctttatactgttttatttttatagttagctctatcttgatattatccgttcatatcagacggatgatatcctgaaagctttttgtatcccgactttccgtaaatacagatagtaggtttcaaaagtgcgcaaatatgcaggcttgtcgcttaatagacaaataatttatcagaaaaatatcttcccttatctaaaattgattaataagtcctgctttctatacgggtaaagggggacagagtaaaaggaaacgatcatattgataaagatgaatgaggtgtgactgcttattcattctataatagaatttgcctgtagataatctttttgtttggaatgtcatcgatcttcgtaaccggctctttgctctttccctgtggcggtaggtatttctttattagtgaacagttttatcatgatttatactttgtgtagcaaaagtaactgttttaccttatgagggccattgtaaaaaaacggctttttaaaactaagctctatctttttttgttgttaatcatatgaataactaaaaaaaatatacgattatgagatatgatatagctattatcggtggtggacctgccgggtatactgctgccgagagagcaggagctaatggtttgcgtgctgttttgttcgagaaaaaagcaatgggcggtgtgtgtcttaatgaaggatgtattcctaccaaagccctgctttattctgctaaggtgttggacggtatcaagagtgcgccgaaatacggtgtctcggtagagggtgctcctgcatttgatatggaaaaaatcatcggccggaaaaacaaaacggtgcagaagttgacgggtggagtgagaatgacggtaaactcttacggagtgactattgtagataaggaagcggtgatagagggcgaaggtgaagaaggattccatatccgctgtgatggagaggtatacgaggcaacctatctgttggtttgtaccggatcggataccgtgatccctccgataaaggggctttcggacgtggattactggacctcacgagaggcgctggatagcactgttcttccatcatcgctcgccattattggaggcggagtgatcggaatggagtttgcttcattctttaacagcatgggcgttagggtgaaagtgatcgagatgatgccggagattcttggagcaatggataaagaaaccagtgcgatgttgcgtgctgactataccaagaaaggggttaatttctatctgaacacgaaagtaaccgaggtgagtgataaaggagtaacagtggaaaaggatggaaagagttcgtttatcgatgccgaccggattttagtgagcgtaggccgtaaagcgaatatcacccaagtaggattggataaactgaatattgagttgcaccggaatggggtcgttgtagatgaacacatgttgacctctcatccacgtgtatatgcttgcggtgatattaccggcttttctttattggcacatacggctattcgtgaagcagaagttgccattaatcatattttgggaatagatgaccggatggattatgattgtgttccgggcgtagtctataccaatcccgaactggccggtgtgggtaaaacagaggaggagctgatagctaagggtatttattatcggatacaaaaactaccgatggtttattcggggcgttttgttgccgaaaacgagttgaagaacggactgtgtaaactgattatcgatcataatgatcggattgtcggctgccacatgttgggcaatccggcttcggaaattattgttgtggcaggcattgctatccagagaggatatacggtcgatgaattcagaaagagtgttttcccgcacccgacagtcggtgaaatttatcacgagacattgtttgcctgatgcggtttataaatagctcttttacggatgccggtttcaatctggcggctgaagagtatttgttgaagcagggtacagaagatgtattcatgctttggcaaagtgctccgtccgtaattataggcaagcatcagcgggtggaaacggaagtgaaccggatgatggcggaacaaaacaagattcctgtattccggcggttttccggtggcggtgccgtatatcacgatttgggcaacatcaatcttacgttcattgaaactacctgtctggcgcgtttcgaaacttatctggagcgaacggttgaaatgttgactgccgccggagttgcagtgagaggcgacgaacgattgggtatttatgtcgacgggcgaaaagtctcgggcagtgcgcaatgcgtacatcgcaatcgtgcaatgtatcattgcacactgctgtatgatacaaatctggtgttgttgaataagttgcttgaggtagaaggacttgaggaaaaggttgccgtacatcctgctgtccgttcggtacgtagcgaagtgacgaatctgaaagagtatatgcatccggctctatctacagataaattccgggagtgggtttttcgttattttgcaggtccttcggttgccgaagcgttcagtaaggaggaactggctattatcgaggggttacgggaaaataaatacaacactatctgtaactgacgtgaatatcaccaagcagtctgattattcagtatccggtggaggagaactattttcctttcaaaattcagccttctcatacgaaaagtgtacttccatcttccaccctcgattgggcaagctcgattcattgtttgtgtttgatatacagatagatgtatctgtttccctatctgttcataccatttaaagcagtttgtttttcttagtatctttagtgaaaatggttaggttcttatctcgtcccgcatacccgggttgagataaagatactttagaaagaagtaaagtaattattgataatgcgttatgcttgctatggaatctgcttgctttcttgctaatgcgtgagaacggatatttaaaggatgcgcgagattgatttatgtttttagccactaaacggctttcttatccaggcgattacttaaaaaaacattaacttaaaactttctttttcacaatcttgttctacttgtacaagtgaaagaataaataattgtgtatatggcaagattcgaaataaaaatgcccaagttgggcgaaagtattaccgaaggaaccattttatcatggtcggtgcaggtaggtgacgtggtcaatgaggacgacgtacttttcgaggtgaatactgctaaggtcagtgcggagatcccttctcccgttgccggaaaagtggtggaaatattgtttaaagaaggcgatacggtaccggtaggtacggtagttgccattgtagatatggatggagaaggttccggagaagcatcggaaaccgcaggttctgtagaaacggcgtctgctccaaaggctgccgaggtgtcgggcactgcgtctgttccgaaagttcaggcggaagtaaccgctcccaaagtggaacgttggtattcgccggcagtacttcaattggcacgggaggcgaagatttctcaggaagaactggattcgattcccgggacaggttatgaaggccggctgagcaaaaaagatatccgcacttacatcgagatgaagaaaggtgctccggcagccgacgtctctactacggtggtttcgacagtttcggcaaataattcgggctcttctcctgttccttctgcagaagtacaaaagaaggctgccgctgcggctcctcaggctcagcatggacaatctgcttctgccgtttcttcagatgcatcggtagaagtcaaggagatggatcgagtacgtcgcatcattgccgaccatatggtgatgtcgaaaaaggtttctccgcatgtgactaatgtggtcgaagtagatgtcacccggctggtgcgttggcgcgaaaagaccaaagacgctttcttccgtcgtgaaggtgtgaagctgacttatatgcctgccattgctgaggccactgcccaggcgttggctgcctatcctcaggtaaatgtctcggtggacggatacaacatcctgtataagaaacatatcaatgtgggcattgctgtttcgcaagatgatggaaacttgattgttcccgtagtgcatgatgccgatcgtttgaatcttaacggacttgccgtagctatcgattcgttggcgaaaaaggcacgggttaataagctgatgcctgatgatatcgacggaggaacattcacaatcaccaatttcggtacgtttaagatgttgttcggcactccgatcatcaatcagccacaggtggctattctcggagtgggtgtcattgagaaaaagccggctgtggtggagactcccgaaggagatgtgatagccattcgccataagatgtacttgtcactctcttatgatcaccgtgtggtggatggttcactgggaggtaacttcctgcacttcattgccgactatctggagaactggaaagaatagttgccatatcggagatttacagaataataaatcagtctcaccacagagctcccggattgttgcggaacttgtttggggatctttatccttaaactgtgatcatctgtgtgatttgtggtgaaaatcctaaacccactttaaatatgaagaaatacgatataaaaaccactgacgaacagactctccgcaagtggtatcatttaatgactttggggcgtgcgctcgacgagaaggcacccgcctatttgctgcaatctcttggctggtcctatcatgctccttatgccgggcatgacggcatccagcttgctatcgggcaggtttttactcttggtgaggactatctttttccttattaccgggatatgctcactgtgctttctgccggaatgactccggaggaactgattctgaacggtatctcaaaagctacagacccgggtagtgccggacgtcacatgtccaatcactttgccaaaccggaatggcacatcgagaatatctcttctgctaccggtacgcacgatcttcatgcggcaggcgtagggcgtgccatggtttattatgggcataagggggttgccattacttcacatggtgagtctgccacatccgagggatttgtctatgaagctatcaacggggccagcaacgaacgtcttccggttatttttgtattccaggacaacggttatggcatttccgtccctaaaaaggatcagactgccaatcgtaaagtggccgataacttctccggttttaagaacctccgcatcattcattgcaatggaaaggatgtatttgactcgatgaatgccatgaccgaggcccgtgaatttgctatagccaaccgtactccggttatagtacatgccaattgcgtacgtatcggttcgcactccaactctgataagcatactctctatcgcgacgagaatgagttggcatacgtgaaggaagccgatccgctgatgaagttccgccggatgctgttgcgctacaagcgcctgaccgaagaggacctccaacagatagaagctgccgccaagaaagaactggctgccgccaatcgtaaagcgttggctgcacccgatccgattccggagagcatttacgactttgtccttcccgaaccgtatattcctcaaaagtataaagacggacttccggggcctgtcgaaggtgagaagagtttcatggtgaacgccattaatgaaacgctcaaagaggagtttcgccgcaatcctgatacctttatctggggacaagacgtggccaataaagataaaggaggcgtattcaatgttaccaaggggatgcaacaggagttcggtgatgcccgtgtgttcagtgctccgatagccgaagattatattgtgggaacggccaacggaatgtgccgtttcgatcctaaaatacatgtggttattgaaggcgctgagtttgccgattacttctggcctgctgtcgaacagtacgttgagtgtacacacgagtattggcgtagcaatggtaagtttactcccaatattacacttcgccttgcttcgggtggatacattggcggtggattgtatcattcgcagaaccttgaaggggctcttacgactttacccggtgcccgtattgtttgtccgtcgtttgccgacgatgctgccgggctgctccgcaccagtatgcgttccaagggattcactctttatctggagcccaaagcgctttacaactcagtagaggctgctgccgttgtgcccgaagagtttgaagttccctttggtaaggcccgtatccgccgcgaaggaaccgatctgactataattacttatggcaatactacccatttttgtctggatgttgccgaacgtcttgcccgggaaggggtggggagtgtcgaagttatcgatctacgttcgctgattccgttggataaagaagcgatttttgcttccgtacggaaaaccggtaaagtgatggtggtgcatgaagacaaagtcttctccggattcggtgccgaaattgcagcgcagattgccggggaaatgttccgttacctggatgccccggtacaacgtgtgggctccacctttactccggtaggtttcaatccgatattggaacgggctatcctgccgaatgatgaaaagatatataaagcagccaaagagttgctggagttctaattaaaaaaacgatcaatcatgaaaaagataggaatattctatgctgccaaagccgataaaacctcttgggtggctgaaaagattcaaaaagaatttggtacttctgccgagtctgtagctatcgaaaatgcctggcagaatgattttgaagcctatgataatttcatagtcggtgcttccacctggttcgatggcgaactgcctacttattgggacgagcttctgcccgaactccgcaccttgcagttgaaagggaagaaagtggctatcttcgggcttggcgatcaggtgaagtatcccgagaactttgccgatggtgtcggactgcttgccgaagtctttgagaatgatggagctacgcttgttggttttacttctatagacggatatagtttcgagcgttcccgggctctgaaaggtgataaatggtgtggattggtcattgacatcgaaaatcagtcggaaatgactgataagcgaataaaagactggtgtaggcaggtgaaaaaggaatttgaagtttgatccggtcataccgcagagtagcacaggactgactgttatgtcgttcgtgtgttactctatggcaggcctgtgtgtgttaaagtacgaactttactgctgcccatcggtttttctcttgatggtgtacgaaggtgagtccgtgcttttctgcttcccggcggatagccggaatatcatcgatatagaatccgctcataaataactccgatcccggatgcatgcatgctacatactgcttcatatcgttcagtaagatattgcggttgatattggctattactacatcgaatggccctttcccttgcaatgccgaagcatccccctgcgagacggcaatatctgtcactccgttcagttcgatgttctctatcgagttgcgtacacaccattcgtcgatatcgatggctgtgcaaggcttagctccccgcattcgtgcgagaatagccagtattgaagttccgcagcccatatccagcagcgacttgccggtcagttcgctatccaacaattctccgataatcaggcttgtcgtttcatggtgtcctgttccgaatgccatctgcggattgatcaggatatcatattctgctttaggcacgtcctgatgaaatgtgctatgaatcacacaacggtctccgatcacaatcggttggaagaaatttttttcccattcttcgttccagtccttgtcttcggcctcggcaaacgtataagaaatttccgtatccggcacaggaaaatttgccagctctgttttcaatgtctcttcgttgtaaagtgattgctgaatataagcggtcagtccgccttcccgttcgacaaaactctcgaatccggcttcgcccaacacggcagcaagcacatcattcaccgtttcggtgcaaggatgtgtatcaaaagtgaactcaaagtacttcataggtgtttttatttgcaaaagtacgatttaaagggatagaaacaaagtaaacattgtttttatcgggttgagatttgttaagttaaagaacaggctattatgcagtgagcgcagatagtccaattgcctcaagaagtagttcttagcgagtcagaacatatatacgatacttctctgtacgttctgccaatatttgcgatatcaggcagcattattctggcccattttacaacctaacgattaatcggctgtattagattagaacgataacagaagaaatgaataaggcgactgaataagtcgtctttaacactatagcttcccatgtatgtgtggcgcgtccaatatgtcgtaatttctaataatggcaataactggttcagaaagaaatactatctttggtcatgtagaagcaaactttgttatttaactgaagtgtaagtctccgggtcgaaagtctcggagtttttttgtgtatttattccccaaagtgtgtgtttattccccgaacttttttattgtcttgatcataacttgttgttttatagttgatttatactctttggacattttggcatgccctttgctttttatttagcataaaagttgttttaattattcacaccaaaaaaattacgattatgaaaaaggtattagtagcattagcaatgattatgggattaggaacatcagtagcgtttgccagtgtatcgggtgacactttagcagtagaacaaactctgcaaactcctcaggacgaatttacacaaatagccgcaaaggaacttcctgctgctgttatcaatgcattggccaaagattatgaaggtgcttcgataaaggaggctttcgtttcggaaagagaaaccagtaaggtatataaagtgattgtgactgtaatcaaggaagatcaatctacggaagatgtaactgttcttttgaatgagaaaggtgagatagtgaaagaataaagcgattaaatgagaggctttcatttacactctactttctatagccctgatttttaaagatcagggctgattattctcgcaattataatcaaagttttttttaatcagaagaatcttccgggattgttttacatttccacgaatcagtagtcttatgataagcctatacgttgtgaaacggaggttcaatctctttttaatcttgaacgtagtaagaggtaaacacaggcctctttagagggaggacaatatatgtgttgttatgtcttcttttgtcagttctcccggatataaggtttaattgtaatttgttgacgtttccccgcttcttatactaagaagtggggatttgtttcatctggaagattttagagaatgtatttttactccttgctctttattatatagtatttagctttagatctctgttttatgtataaatacctaagagtaggtattggcgatttaccatcctttacttgtctttataaaatatatgatttaagtcttttttattaatgaatttaatctctttcttttttttcggatgttctgatgatataggggagtccaacaaaagtctttgcagataagctctccaatggaaaaaacttttcatgttgtaatgatattgtcggtgactggttgtttttggctaagtttttggattcagtattcctcatatgaagatctgctagttttctttaaacttactgaattttaggtttttttgtaaaagcagtaaactgataatctgttgtctaataatgtatttgacttttatcatttgctaaaaaacaaatcataaatgaactttttgatccaaatttttgttatttgaaataaattttcaataattgatactatgaagtctaatcgacattttttttatttttcatttagattttgttatttctattcatctatcaaaccaccataaaaatctatattatctatatcttacaatatagagacgaaaataaaaatctaaactataacttacataaatcattagaatgaacaaaaatactattctatatgcaatattggcaatgctgtactttatgttattttcttgctcccaagaagagttgattctgccagacccgacacctctggatgcctataaaagacagagtactcaactgggtattgacagagaaaaaatcaatattaatacagaagatgctagtatagtcgcagaaatattcaatagaaaaaatcatcatttaacaaggaattcgttaaatgaacctaccaaacggataaaagaaatctttactttatataataatggaaaaccgatgatgtatattatcaattatcaagatcaaaaaggttacaccattattagtgcaactaaaaaatactatcctgtaatcgcatactccgatgtgggctctttttctctgcaagagtcttataacgatggttcctccattctattagatgagtataagaaaattatgcaatataacgaaatacagccagatagtatcatagataaatataggaaaaaatgggttgagtttgaaaatttaaaaacagaaaagctaagtgatgtttctacaagatccttaagtgattatgcaatgtccattaaaaaagaggagcaaaaaaagatctggactaacaagggttatgaatgccatgacttgggcgcaatccgaaattttctttctaaggaaagggctgatggatacatcagagacatctgtaatcatacggatcaaaactataactgtgagaaagtaaacctactgttaataaaaaaatatccaataaaaacgattggaccattactaaaaacgagttggcatcaacgctctccctttaatgtagatgcccccaataagttggctggttgcgtaccaattgcaattgcgcagatagccaaatattatgaatggcccgttacatatagttggacacatattccattgagatgtaatacgaatatggaagatgatgaatttttcaaaaagtttatcaaagacattcgtagtttctcaaaagtaacctacaaagataaagccacgggagctacgatgggcaacgctgtaaaagcattcaaaaaattgaattattctgcaacactaatggactacaaaagaagtgagacaattcaagaaatacaaaacaacagacctgtttttatgggaggagacagaaaagcaattttttttgatataatcactaaaggtcatgcatgggtatgcgatggttatgaagtacgccagacacaatatgcatcattagtttggggaagtaaattcaatatacccgatatggaagaacctgattattttttcaccaatggtacctatgatacctctgaatttcttcatatgaattggggatggggtgaaaatgggggaaatggatggtatatttttgacaacatatataatagaactcatgatgtcagctatcatttaaatagagaaattattaaagtgtcacctaataaataacaacattatgaaaaaattattattatctgtattatcaatctttatgattgcctgccaccaaccagatactccaccatattcatacagtatgaatatagatatgcaaatcatctcttctttggagactacctatcctcttgataacttagaaacagttattattaactctagattagaactcgcttcgtcaagttatcgaataaagaccttgatcagttctaatgacttacaagagagttggcttgaacgtccaatcgttatgctgggaagagaaggacatagatatttgtctttaccaataacttttaatgaagagaaagatagatataatgtgaaaattgaattttattgtccagaaatttttaaagacgataaataccacacaataaatatcgtttattcgattgttaaagggaagtatttatataatttagaatcttttacattagattcatatgcaggagaaatagagaatcagggagagaataatgctcctattattgtattctctatcaacacagccgaaaaaaaagagtaaacaaggtcttataaagaataaggcgactgaattagtcgcctttaacactatagcttcccatgtatgacgtgtctaatatgttaaagacgatctttttggtgccggtttttcgttacccgaagtgacagtaatcggtagacgtcctacatcttctgaagacccgtttaaatggccttttggggatatgccttctgaatctccgaaagcccttcccggacttgatgacttttttctcctcaaggaggcggttcatctccgttatcttcaccacagcaatcaggctctttgcctaaacctgaagaagtcattaaggatgcaactgtaaaaaaggctttggaagaagcctggagtgatatgcttaagcgttccacagaggtccaaagacaagaagttggtttctggatttattatgatccggtgaaaaagcaatattacataggtaagaaacgatatggtatggcagtgaagaatgacggaaaagcaagaggaaatataagccttggagacaaatctccttctataaatggtgtgcctgccacagcaaaagtggttgcttcttttcatacacacactccaatgactgaaataaaaggtaataaaagaaaggcaggtccatctaaagaagataaagaaaatgccgataaaaataaaatacctattgatatattagttttccgttgcattttaggaaatcgtaatttattaagtcagctatattaatgccgccaagataatatgacagcataaaaatgtctcgtatccgaattagatttttttcaaatcagtatctcgtgttgctttaatttcatctatttatatgatgcaaaagggtatgtgacgtaggtgataaatcagcattgtagagcaaatctcatgattgctcttacaaaggatagccttattcttattgtatcagagcgtaatttttcgtttcttaatttgctattgagataagaagtgtctgctcttttaatgatatatccattcttgaactcttgtatggaattcactgttagatcagtcactatatagcgagtttcacaattgtgcgaaagagctattcgtattttatgtgtattgtctcttaatatttttccagggacaattgtcggaaatagatttgtcataatttgttctacaataaattgataatgtaaatgtgtcttcggcaattaaatagcctcagaagtaacagctctttactgactattactaattgataatgaaatagtttgctgagtattagtgctgtttttgtttaatataagataaatagggaaatccctattattgtttggggaaaatctatccggcagcgtgaataccttgcttatctttgtaacgtgaataaaaagattaagaaaccaataaaccacggaaatatgaaaaagattgtgttattatcgctgtttgccctgtgcctcccactgcttgtgatggcgcaaagcaataatgacgacctttatttcgtaccttctaaggaaaaaaagcaggaagccaaaaagactcctgtgaagaaggaaccggaaaaaaaagttgtcaccacgaacatttatacgtctccgggtactacggtagtagttcaggaccgtaaaggaaacaaacgcgatatgcgtgatgtggatgagtataaccgccgttacgatgccaaagataacgagttcgcaatggaggacgatacattatacgtaaaagaaaaagctgtctccgatccggaaggtgaatgggtgaacgggttcaatggctcacaggatgactacgagtacgctgaacgcatcattcgtttccgtaatccccgttttgcggtaagcattagcagcccgctttactgggacattgtttatggaaccaattcctgggattggaatgtttatacagacggtttctatgcttatgcattcccgacatttaccaaccgcttatggtgggattggcgttacaactcttatggttccggatggggctggggatggggctggtcttcaccttattatgcttggggtggctattggggtggttactggggcggctggtatggcggcggctactggggacaccatcatcactatcatcccggatggggtggcggcggcagctgggcaggaagatataatacctatacccgtcgtggttcgtctgctgtgagaagcagttatggcaactcttcgaccgttcgccgttacagttcaggtgcggtacgctccaatagcggttcttccgttcgttcgtcagggacatcttcttacaatagaggagagagctctgccagacgtgtgataggaacgcgtgtagtcggtgaacgtccgggatctactacgcgtacagatgcttcttcttcacgtcgaagtacctatacccgtccaagtagtacacgcagtagttcttcttatgaaggaactcgcggcggaagcactactacaggttctccgtcttactcggaaggaggcagaagggcaagtacaagaagcagttctacttatactcgtggcagttctacggctccttcgcgtagttacaatgagagtaccactcgtcgttcatacaacagtactccttctcgtagcagcagttcgtctacgcgcagttattcttcaccttcaggtagcagttcacgtagttattctaccggtggcggtggtggttcttcccgttcttccggtggcggtggcggctcttcaaggggcagaagatgataatggaggtattaacttaaaaaagcatttgacgatgaaaaaaataattactttagcaactttggggctgttggtagcagcagccccgataagtgcacagactgtgtacgatgctgccaagataacaggaaaggacttgaacggaaccgcccgttttgtcggcatgggtggcgccatgggagctttagggggggatatctctacaatcggaacgaatcctgccggtatcggtatctatcgcagtaatgattttatgacttctttcggcttttcttcatacgggacggaaagcaaatatttgggagataaatttaagtcggataaaatgcaaggttcttttgataatctgggttttgtatttgcatctaagattggcaatgaaacttctttgcgttatgtgaattttggatttaactaccacaaagccaaatctttttataagaatatgaagatgacaggaggacttggtaacagttcgcaaacctatcagatggcccaacaagccagtggcataaccaaatggggagattatccttatgatgatccggagataggatggctttccatattgggatatgacagttggttgataagtgatatcacaactgataaaatgaatgcagttggcaagccgaattctccatatgtggataaggatggaaatcaaagatacgatgcgaatggtaaacctctgtatacgacaccgggtaattactatggtatgtataatgatggtatcgctaatttccactcgcaagagcgtggtggaatcgatcagtacgactttaatgttgctttcaattttaacgaccggttctattttggactgacccttggagcatatgcggttgattatagcaagtacacttattattccgaagcgtatacaggagcaaatgcaccgcagaactacaatctgaagagttggaataaggtaagaggttcaggtttcgatcttaagttgggtacgattatccgtccgtttgaaaattcgcccttccgtatcggtctggccattcacacccctacgttctataatctggattataagaccagtgcccgtgtagaatcggatgtgttgaacgttgagacaggaaagatagatcagtggtcggtggatacgcgtgataagttacctggaaatggagatatggtgcgtgaattccggttacagactccgtggacttataacgtaagtttaggctataccattggtacaagtctggcattaggtgccgaatacgaatatcaggattattcaacgatgaaatttcgaggaccgaccggttcaagctctgagtttacgtttgaaaatagtacgagacctatgatgaaaggtgtaaataccctccgttttggttttgaatataaagtgatcccgcagtttgcgctgcgtgccggatataattatacttcggctatttttcatggagatactttcaagaatctgccttattattctatccagacagatactgactgggcaaatacgaaagctctgagcaactatactttgggtatcggatatcgcggttctgtattttatgcagatttggcttataagttttctacttataatgaagatttttatccgttcgcaaataagtatgaggaaaacaacgtaactacggtgctgacaccggaagcaactaaagtgaccaatacccgtagccaagtgctgcttactttaggtctacgtttctaattagattcccaaacaattaaattataacttttgtgtgtatagaaatccccgaaggacgatgcagtgttctacggggattcttgtttataataaggcagattattatttaattactat

SEQ ID NO: 5047 - DNA, 35859 bp, Unknown
  gut microbiota DNA sequence
tatgattttccagtgtagatatgtatatcagtaccaactgttaacttcatcggaatacgatgttaacttcctgcaaatagagtgttaacttcctgtagacagaggcttcgtttcttgaaaggagagccttgccttaaaggattttccggtatctttccgtctgctttgtcccttggcggatactgccgcgagatggcataaagaatctgtttttgcttccgggcgttgtcggagatagtacgaagaggtattgctttgacttttggcgagaaattctgaatatacctgtcaaactgataattgcccgaatggcgtggatgcgtttttttcgtactccgtcggcatctgttcggaaaaacggattctgaggcctcctgaatatcattttgacaaatcgatactaatctctcctgccatcgactcgttcatcctccggcgtacttcgtccggcgaatatccgtgtcctaacagaaacatcagttttgttacggccgattcggtagtactgtcgtgtccactgacgatgcccgccttcagcagatgatatcccgtttcgtaacgttccatctctacgctaccggcgctacattgggttacgttgacaatgacaacacctcgttcgctggcatcacgaagcctccgcagaaaccactccttgcgggaagcgttgcccgaaccatacgtttcgagtaccactgccttcaatccttcgatggcgagtgtagcggttacgacgttctcttgtatgcccggaaagagtttgaggatagctatattggtgtccagcagatagtgaggatgcagttcgcgtttctccccttcaatgtgaatctgcacattgttgtatttaatatgtatccctgcctctgccagtaccggataattgaacgaacggaaggcgttgaaattctccgcactcattttggtcgtacgattgccacgcattaaccggttttcgaaaaatatacatacttcaggaaccatgggattaccgcttctgtcgcgtgccgatgctatttcgatgctggtcatcagattctccttgccatcggtacgaagcactcctatgggcagttgtgaacctgtcaggataaccggtttgtcgagtccttcgagcatgaagctgagggctgaagcggtgaaggccatcgtatccgtaccatgcaggatgacaaagccggtgtactggtggtagtgttcactgatgacgtgtaccagtttcctccaggcttccggttccatgtccgaagagtccataggcggatcgaattggtaagagtctatcgggaaggtaaacttctgaagttcgggtacatgcttctgcaattgctcgaaattgaagttttcgagtgctccggtttcagggttttctatcataccgatggttccgcccgtgtatattaacaatatggaagtatctgatgggttcatagtccttaaatgaagaatgtattgttgcaaagataatgatatatcttgtaaatggcagcaaagtgtcaagaaagtgatccgctttatccggagaaaaagcaatgggcactataaaaatgtaattgtcctatgttacatttttacccctctttctggggctttctgtgcttttatcgcaaaataatcgcaaaaagtgatagattgaatgaaattattcttatttttgcaacatcttatcaaaatcgaacgtagaaacagaaacaatgatgcaatgctatccacatacagtcacatcgatgtgtaccatgattgggacacaggggacaatggggatgacccctaggggttaatatatagtatgatgtgtatctacgtgattcacgcttacaggaagtaagcaaaactcaattttatattttattattcgtatcaacaaagatggttttgtatgcctgaaagagcgtacaaggcattccattaaataagtatctgcatgaaagtaatgaaattcggcggaacgtccgtaggttccgtgaacagcattttaagcgtaaagaaaatcgtagagtctgccggtgaaccggtaatcgtagtagtgtctgcattgggcgggatcactgaccagttgatcagtacctcccgaatggccgccatgggtgatgtagcttacgaaggggcataccgggaaatagttcgccgccacgaagagatggtgcagggagtgattcctgccggagagactcagaccctgttgcactatcaggtgaatgaattgctcgacgaactgaaagatatctttcagggtatttatctgattaaagatctttctccgaaaacgtccgataccattgtcagttatggtgaacgtctgtcttcactgattgcgtcaagactgatccaaggggctgtatggttcgactcacgtacttttatcaagacagaaaagaaacataataaacatacactggacacggaactgaccaatcggttggtgcgggaagctttcaaagaaatcccccgggtttcgctggtacccggattcatctcttcggataaggtttcgggagacgtaacgaatctgggcaggggcggttccgactataccgcagctgttattgccgcagctctcgatgccgatagtctggagatttggacggatgtagacggcttcatgacagccgacccgcgtgtgatcagtacggcctatactatcagcgagctgacttatgtagaggctaccgaactttgtaatttcggtgcaaaagtggtgtatccgcctaccatctatccggtatgtcacaaaaacataccgatcctgattaagaatactttcaacccggatgcccagggaacggtgatcaaacaacacgtagaccacacgaagagcaaagccatcaaagggatttcgtccatcaacgacacgagcctgattaccgtacagggtttaggtatggtgggcgtgatcggtgtcaactaccgcatctttaaggcgctggcaaagaatggaatcagtgtgttcctcgtttcgcaggcttcatcggagaacagtacctctatcggtgtgcgtaatgccgatgccgatctggcttgcgaagtgctgaacgaagagtttgccaaagagatcgaaatgggtgagatttcgcctatccaggcagagaagaacctggctacggtagctatcgtgggtgagaacatgaaacatacgccgggcattgccggaaagctgttcggtacgctgggacgaaatggcatcaatgtgatagcctgtgcacagggagcttccgagaccaacatctcgtttgttgtcgattcaaagtcgttgcgtaaatcgctgaatgtgattcacgactcgttcttcctctccgaatatcaggtgctcaacctctttatctgcggtgtgggcacggtgggaggaagtcttgtcgagcagatccgccagcagcagaagaagctgatggtggaaaatggcctgaaactccatgtggtaggtattatcgatgcgacgaaggcgatgttcagccgtgccggattcgatctggccaactatcgcgaagagctgaaagagaagggagtggacagttcgctggatactatacgtgacgagattatcggcatgaatatattcaattcagtatttgtggattgtacggccagtccggacatagcctctctatataaggacttcctgcaacataacatttctgtggtggcggccaataagattgctgcttcatcggcttacgagaattaccgtgaactgaagctgatagcccgccagcgtggtgtgaaatatctgtttgaaaccaacgtgggggccggacttccgattatcaataccatcaatgacctgatacatagcggtgataagattctgaagatcgaggcagtgctttcgggtacgctgaactatattttcaataagatcagtgccgatgttcccttcagccgtaccatcaagatggcgcaggaagagcgttattcggaacccgatccgcgcatcgacctgagcggtaaggacgtgatccgtaagctcgtgatcctggcgcgtgaggccggatacaagctggaacaggaagacgtggagaagaatcttttcgtaccgaatgacttctttgaaggttcgctggaagacttctggaaaaaagtgcctagtctggatgctgatttcgaagctcgccgcaaggtgctcgagagtgagaataaacattggcgtttcgttgccaagctggagaacggcaaagcatccgtcggtttgcaggaagtggaccgcaaccatcctttctacggactggaaggcagcaataacatcatcttgctcaccaccgaacgctataaagaatatccgatgatgattcagggatacggtgcgggtgccggagtgacggcggccggtgtatttgctgacattatgagcattgcaaacgtataaaaaagaagcttatgaaacacatcatcatactgggtgacggaatggccgactgggctgtaaagtcgttgggagacaagacgctcctgcaatatgcaaaaacgccttatatggataaactggcccgtatgggacggaacggacggttgataaccgtagccgacgggttccatccgggaagtgaagtagccaatatgtcggttctgggatacaatcttccgaaagtatacgaagggcgcggaccactcgaggctgccagcatcggtgtcgatttgcagccgggcgagatggcaatgcgttgcaatctgatttgtacggaaggagatatcctgaagaatcattcggcagggcatatcacaacagaagaggcggatgtgttgattcaataccttcaggagaaactgggggacgaccgggtgaggtttcataccggggtgcaataccgccatctgctggtggtgaaaggcggaaacaagcaactcgactgcacccctccgcacgatgtgcctttgaagcctttccgtccgctgatggtgaaacctttggtaccggaggccgaagagactgctagcctgctcaatgaactgatcctgaagtctcaggaactgctgaaagatcatccgctgaacctgaagcggatggctgaggggaaagaccctgccaacagcatctggccgtggagcccgggttaccgtccgcaaatggaacgtctgtccgacaccttcccgcaagtgaagaggggagctgtcatctcggccgtcgatctgatcaacggtatcggatattatgccgggctgcgccgtattgcggtagaaggggcaacggggctgtacgataccaattacgagaataaagtggccgccgcactggaggccctgaaaacggacgactttgtctatctgcacattgaagccagtgacgaagccggtcatgagggtgatgtggcgctgaaactgaaaacgattgaaaacctggatagccgtgccgtaggtcctatctacgaggctgtgaaggagtgggaagagccggtagcgattgccgtattacccgatcatcctactccctgcgaactgcgtacgcataccaacgagccggttccgttttttatctggtatccgggtatcgagccggacagcgtgcagaccttcgatgaagttgcagcagtggagggcagttacggattgctgaaagaggatgaatttattaaagagcttatgaaccgttaaggaataggaacagagtttgttcaccacagattacacagattttcacagatgaatgatttatttttattgataaaaagattgaaagttctgtgaaaatccgtgtaatctgtggtgcaccgactccgaaaccatttataaaaatacccatgaaatattatagtactaacaaacaagctccgcttgcttcgcttgaagaagcggtagtcaaaggacttgcttctgataaggggctattcatgcccatgaccatcaagcccttgcctcaagagttttatgacgagatagagaatctttctttccgggaaatcgcttaccgggtggcagatgctttctttggagaagatgttccggcggaaacgctgaaagagatcgtttatgatacgttgaattttgatgtcccgttggtgccggtgaaggagaacatctattccctggagcttttccacggtcctacattggcttttaaagatgtaggtggacggtttatggcccgtttgttgggatacttcatccggaaagaggggcggaaacaggtgaatgtgctcgttgccacttccggagataccggtagtgcggtagccaatggctttttgggggtagagggtattcatgtgtatgtgctctatccgaagggaaaagtcagcgagatacaggaaaaacagttcactacgctggggaggaatattacagccctggaggtggacggaacgtttgacgactgccaggcgctggtgaaagcagcctttatggatcacgaactgaacgaacggttgttgctgacctcggctaactctatcaacgtggcacgtttcctgccgcaggcattctattacttttatgcctatgcgcaattgaagaaggccggccgggcagagaatgccgtcatctgtgtgccgagcggaaactttggtaacattactgcaggcttgttcggcaaaaagatgggcttgcccgtccgccgttttatcgccgccaacaataagaatgatattttctatcaatatttgcagacaggacagtacaatccccgtccgtccgttgccaccattgccaatgcgatggatgtgggtgatccgagcaactttgcccgtgtgctcgacctgtatggcggttcgcatgcagccatcgctgccgagatatccggaacgacgtacaccgacgagcagattcgtgaaagcgtgaaagcgtgctggcagcagacgggttatctgctcgatcctcatggagcatgcggttaccgtgcattggaggaaggcttgcagccgggtgagacaggcgtattcctcgaaacggcccatccggccaaattcctgcaaacggtggagagcatcattggtaccgaggtcgaaatacctgctaagctccgggcttttatgaaaggcgaaaagaaaagtttgccgatgacgaaggagtttgctgatttcaagagctatctgctgggcaagtagagactctcccttgagggcacagggtgatgtagatgacttttgttatggattattaatgtgaatgctttgcgctctctatggtgaaatatgcttttcccacagccggcggctcttttcccggatggagatgctgacgggaaattgtttgtgaaaacggtctcagagatacttctgggggggagtggcgggacttttttaaaaaactcccgccactttttttgcctgcaggcatctccggtttcgcttccgcccgcccgcggattttcttcgttccgcatgcgggtgaaagtctgtttttagtgtaaaactaaataatcgtaatctgctttccgctccggactttatcgtccttctttctccgaactttccgtctccctcttttgttgtacggaaataaaaaaataaccctcatatgatgaagaataagaaagtggaggccaatctgagtatggtggtttccaaaacctttagcggattgaacatgaatgcgttgaaatatctgcttcccgtatgggtcagtcccctttcgggagttaccctccggtgcgtgtttgccgccattgctttctggatcatcgggatgtttgtcaagcccgaaacttccacccggaaagaaaaaatattcctttttctcctgggagccttgggcatctatggtttcatgtttctttatctgatggggttgagtaagacgactccggtctcgagttccattttcaccagtttgcagcctatctgggtgtttgtgatcgccgtggtcttcttcaaggagaagatcagtgcgatgaagatagccggcatctccctcggactcggcggggccattctttgcattctggctcagaagagtgacgatctggcttcggacgccctgacaggcaatatgctctgcctgttgagttcgatcgcctatgctgtctatctggtggcaagtaaccgaatcctgaagtcggtcggaatgtttacagtattgaagtatacctttgccggagcggctttttcaagcatcgtcgtttcggctgtcaccggtttccatgctccggtattttccgggccgttacactggtttccgctgtcggtgctcctctttgtcctgatattccctacggttgtcagctacctgttggtaccgatcggactgaaatatctgaagactaccgtggtggccatctatgggtatctgatactgatcgtggcaaccatcgtctctctactcgtaggacaggaccgcttcagctggtcgcagaccattgccatcggcatgatctgcgtcagtgtctatctggtcgaagtggccgagacgaaggagaaaccggtcagtaattcagataaaccaagtagtctccctccgcatggatcgtaaattcggtgcctgtcgcttcgttcagcgtaccctgccaccagttactgaagtcactgagtggatataccagcccatcggccctcaatccggtggcgttgaagttgaagatggagatttgttgtccgggatatgacttgaaacagttcctccccgatgccggaataaacattccgtggtccgtcagcatcgttacctgcgctcctgctttcatatagtctatcagcagactgatgtttcccagggtatggtcttcccgtttgccggttgcacccacgaggatgattgtttttttgccttggtcgagcaggaagtgtaccgctttggtctgatcgttcgtctcctggtcgtctatctggtggaagatggtcctgaaccgttctttgttatccggtgagagcgagtctccgtcgccgatgatggcatcgggcgtaaatccccttcggatgtgttcgtcggcagacccgtcgcagcacaccacgtaaggcgccataatcagcatggtttccggcattgagtgggttggatattcgccgttgccaagtatcacggcgtccatctcgatatcatttactttcatgatgcatcatttgtttccatttaaagtagccaaagatagcgattattgagtaaagtccgtaaagagcggatgtgaaataaagctctttatagatgtagagtccgcaacataccacgtcgaccacgatccatgcccaccactgttcgacgtacttgcgtgccagcatccacatgccgatgatgctcagcgccgtggtgaacgagtcgagccaggggacgttgctgtccgtaaaccggatcagtatccaggcgatgccgaagaaggctgccaggaataccagcaatagggggaggtatcttttcaagggtgtgtgcgtgatgggcagctcggcccgggtctcttttccgcttccccgcatccagaccatccagccgtaggcggccgcgagcaaatagtagatattgatgccgaagtcggcatacaatcctgcttggtagtatacaaatatatagatggccggcatgatgatgcccgctatccagagataaatgcttgcccggtattccagccaaaggtaaatcagcccgacaagggcacctgtgatttcgagatagttcatggcttagaagcggatcgagatgttacccattacatttgtacctgcctgggcggcatagccggcataattatagcgttcgggcttgccgtccttcagcgtatagccgcttccggcatacccgttgttttcatacttttcgttgaagaggttgtagatggtgaatcccactgtaaccgacttcacgtgtcgcaattggaatgtatatgccagattgaggttgctcacaaaataagcatcgagtgtctgctctgcttgcttggcattgctcatatactgcttgctgacgtactgtgactggagggcggcttcgaatcctttgtggctgaacgagaaacgattattcagtataaagtccggagagaaagcgatcggggtgttaccatgttccacttcgatcgggttcttccactcgtcttcgtacagtttttcggtgaagtttttcacccggttcttgctcagcgtaccgttgatgtcccattggaaccatcggcatggcttaactcctagcatcagttctacgcccgtccggtaactgtccggcacgttgcgtgccatggcttcgcctatttcgttcaattctccggtcagcaccaactggtccttgtagtccatatagtagaagttgactccggcgctcaaccatgtgtttcggtaggtataccccagttcgtagtcgtacagtttttccgccttcggatattcgtctgcgttaccatcggtatagttgtttcgtgtaggttctttctgggcaacggagaaagaggcgtaaacccggttgttggagtcgatatcccagttcagtccggctttcgggttgaaaaagttgaagtgatcgttgactgcgagcttttgtagtccgtcagtgttgtaatcgtacttgtcattgtcaccgtgtatcttatagttgatgtagcggtattgcaggtcggcatacgcgttgaggcctgccaccagattgtagttggctttcagatagaggttcccgtccgtcttcttggctttgttacggtaatattcgtggtcgggcagcaactcgccgatatagttcttcacccagatcacccgtccgaagtgccatccgtcgtagtagttcagtgcgccgcccagcgaagcgtccagcttctcattccggtagttcaccgagaatacgccgccgccaaagtgattgtccatcttcttctgccggatcaggtcgcttttttccacttcctttccatcgtacataaacggatgcaggcgatactctttcaggctgcgatcctctttatactcctgatagtagccgtccccctttgtataatggagtgccgcattcaggttccatgctgccgagaaagtatgattcagcaagagctgatagttcatttgcaggtagttgtccgtctggtctttgtaaaagcggatgtgtccgtcgtcatctgtgtacatgccgcatgagttgaagcgtcggccatatttcttcatctcttccttagttgcataattccaggcatgatacgtcttttctttaccgccgaaggtgatgaacttcaccgaagtattgtcggcaaaatatccaccctgtgcgtagaaagagtacaggtctactgatgcccggtctatgtatccgtccgtaccgatgttggacaggcgggcatcgaatgcccaatgatccttcagcagtcccgtcccgaattttactgtctctttgtgagcgttgaagctaccgtacgaggcgtttatttcggcataaggttgcattgaaataccttccgtctgcatattgacactggctccgaaagcgcctgcgccgttggtcgatgtacccgcaccgcgctgcacctgtatatcctttacggacgaagcaaagtcgggcatatttacccagaagagtgtatggctttcggcatcattcatcgggattccgttggctgtgatgttgatgcgtgtcccgtctgttccccgtacgcgcagtgtggtgtaaccgatacctgctccggcatcactggtggtcagtgccgaaggagtcatactgagcagaaaagggatgtcttgcccgaagttctgctttttgagttcttttttcgaaacgttggtgaatgccaccggggtttttgaagtggcacgtgtggatactatctgcacctcttgcagatttactactttcaagctgtctgtctcgcccgcttgcgcgaagacacttgctccggccatcagacagccggcaaaaatcatctttttcatgttgctaatttgtttttctctacgccggcattacccggatcaggtcaaagggtatgttctcagcccgtcatgttaaggcacccctactaagtgaatcggcggcaaatttacgctttttgcttgtgtaaagcaagaaacacttcgctatttgataaaaacattgtagctttgtccgctgttattaaatggacaaactctaaaattgtattattatgctactattccaaactacacaacaagtcgccgattccctgcaagtggcggctgagaagctggaccaggctatagcccaggcagacgggctcgataagttgggactgatcacccaacaactgatagactcgggcatacaggccggaggacatattctgaaagcggtcattgtatttttggtcggacgttttctgatccggatgctgaaccgtctggtcggccgggtgatggataagagaaacgtggatatcagtatcaagacttttgtaaagagtctcgttaatatccttcttaccgtactattaattgtttccgtggtaggcgcattgggcgtcgagacgacttcgtttgctgctttgctggcttctgccggtgtggctgtcggtatggcgctttccggtaatttgcaaaattttgccggcggactggttattttactgttcaaaccctataaggtaggcgactggatcgaagcacaaagtgtttccggtacggtcaaggaaattcagatattccatacaatcctgacaactgccgacaacaagctcatctatgtgcccaacggggctttaagcagtggagtggtgactaactatagtaaccagaagacccgtcgcgttgaatggatctttggcgtcgattatggtgaagactataataaggtggaaaaagtggtacgtgaggtgctgaccgccgataagcgtattctcaatgatcctgctccgtttatagctctgcatgcgctggatgccagcagtgtgaatgttgtagtccgtgtttgggtggagagtggcgattattggggcgtttatttcgacataaacaagacgatttatgctacgttcaatgagaaaggcatcaattttccctttccgcaacttacggttcatcaggctccgaattgatgaatattcaaaaagggtggctacttctgaagaagcaatcaccctttttgcaaatttatatttaaccaattaacacactccgaaatcttctgtaggatcatacgtgttgtctgtgatgcctaacagatggtttatctctctccgtttatccagatccttgaaataggtttccaccactttgtaaaggtcaaaactgaatgtagatccggcggccatatccaatgactctaccatctgctctactgcctggtggattctttcttgatcgatcaggtgcagctcattactgtgaataagatatttctccataaccgttattgttttaagattctacagttaaaacattctcaaagaggataaggttcaaactgttttttcttatctttgccatttctaaaagcaggaccttagatcaccaagtgagaaatattcgataatgaatcaatttttagattttgaccagaaactgtatgctgaactccgtaaaggcagcgagcacgcttttgttactgttttcgaacggtataaccgcttgttgtatgcgctggcttatcggtattttaaatcaggtgaagaggctgaagacgcagtgcaatatacttttatgaaattgtgggagcaacgttccagttttgaatttcaatccggcatcagaagcctgttgttcaccatcctgaaaaactacattatgaacgagttgagacatcggcagattgtctttgaaaagcattacgagatggctcaacggaacgaagaagcggacgacagttttctgaagaattttgaagataaagatttcagggaacatcttcggactgccatcggtaaactacctcctcaaaaacagaaaatatgccgcctgaaaatagaaaaaggactttctaaccaggaaatagcggacgagatgcatatcacggtgcctaccgtaaagtcccattatactcaggccattaagatactccgtgcggagattgaatcgttaattgtattacttcatgtattgtggattcattttttagagtgagcagcaactcatacttttaagttgatgaagtgtttttattattagataaagaaaagtcgaaatgaaaatagatgatgcgattatagataaagtgctcaataacgaagcttctgtggaagaagcgggattggttgcggaatggtttgctacagaagagggtagcgaatatttgtcggggcgtttggagagcgagtctgcacggctcaccgaagaacgggcccgggaatggttagaccatccggtgccggaagaacggatgcgggaacgcttcatcgggcaaataaaacctgagaaaaaaatagtttcttatcgtcgtggactgatagcggcagcggtattgattccttttttattccttagtatatctctttggtttctggctgacagaaccggagtcttttctgccacagaatatgctgaattaaaggttccttgcggagagcaaatgcaggttgttctgcaagatggaacagttatacagttgaattcggatacccgtttgcggtatcccaagaagttcggtctgttcagtcggagtgtggagttatggggagaaggcttttttgtggtcgctaaggataagaagcgtccgtttatcgtcgatttgaaaggtgttgaagtaaaggtcaccggaactaaatttaatgtaaaggcatatccgtcagaacccaatgtatgggtcaccttggaagaaggaggcgtgctgttgaaagataccaagaacaaggaatatcctcttgtaccgggtgaaagtgccgaatacaaccggacatccggaatttgccagataaccaaaccggatgatatgagccagatttcatcctggcgttccaatagcctgaatttttatcttactccgctgagagatattataaaggtcatggaacggcagtatgatgttcattttgtggtgcgtgattccaccctattgaataacaggtttactctatctaccagcaaagtgaatgtggacgatgtattgcgtgatttggaagcggtttcatggatacgtttcttgcaaacggaagatggggtattcgaaattcagaaggaaaaatagattgattgaattattattctatagatagatgcagaccctgttcaggagctgcatctatttttttagataagctcttatatggaaactcatactttctttcggatggggtgttagcttatgtagtaaaagggcctttaagaatatttaatttcaagtatgaaccggatatctatacacaagagatatcacagcaaatatgtgtttatatgaaatatctgtttacacttttgatggcctgtctgtcattgtcaactacttacggtacggtacatcatccatcttcttctgtttcgtccggacgatgggtggtttgggcggagaaacctgccacatcatggcaggatgcatttgtcaccggcaatggtcgccacgggacgatggtgatggggcaaccgggatcggaacgaataatctgtgtccacgaggaattgtttataagaggatgggatcgtcataaagtagcggttccttcaacagcttcgcttcttccggaagtgcgccggttgatagaatccgggagaagcgatgcagcagatgagttgatgaccggtgaagctgaccggcaattggttgctatgggagccgtacagcgctggcctcttataccccatccagcttttgatctgtgcattcggtataccgataccactctacaggcagagaatggctatagaagacaacttgatctggaaacgggtgagacttccgccttttggggtggaagaggaggagtgacggaatctgtattctcatccagagagcataatgtcaatgtgctccgtctgaaagcaaccggacaaagaaagataaatttagtgttggggcttaaggagactccgggacgtgaaggagttcattttgagcataatctggatagtgctttctcatcggtgagtacagaagcattttcaggatggttatcttaccgtgccgcttacaaatatgatgccggtggttatgagggattggcccgagtgtctcttaaagggggaagtatgattaccgaaggtgattctttgagaatagcagacgctgacgaggtactcgttcttgtgagaattactccgttggagaatgcaaatttgtcggtacgcccttccgtgcaaggggaattgtcacgtttaccgctcgattataatactctgttgttacctcacagtcggaaacatgccgaaatgtttcgccgcatgcaattggatttaggctgttcttccgattggaaaacgacttcgacagagaaaatgctttccgatattcataagcatggggttactcctttgtttcttgagcagattcatgctatgggacgttatttgcttatttcttcatccggcaagtatcctcctcctttacagggaatctggggaggaggatggaaacccggatggatcggtggctttgtatgggattcaaatatcaacttggccgtctcggcagcatctatgggcaatttgcatgaatgtgcggaatcttatattggttatgtggagagtctgcttcccggatggagactgaacgcgcgaaattatctggggtgcagaggctttattgttgcccattataatgatccggaaagtggatatctcacccatttcggacggtcttttccctggatgtgctggcccggtggtgccggctggaatatacgtcctttttatgagtatgccatgctgaccggtaatgaggcttttcttcagaaacatgtgttcccgctatacagggaaatggccgacttctatgaagactacttgactatggatggtgatagcttatatcacatttgccccagtgtttctcccgagaatgctcctccggggactgacacctggttgagcaaagatgctacaatggatgttgctattgctaaagaagtgttccgtttgcttcttgagatggggcgtacatttcgtgctgacaaaaaagaattggctaaatggaataattacctgcaacggttgccttcctaccagattaatgacgaaggggccttgggcgaatggattgatgaagcttatcaggacgtatataatcacagacatctttcgcatctttatccggtttttcccggttcgcagttgggtaagtcggagggagatcctcgtcttatacatgcagcacgtatcgcattaaacaaacgttttgctttcgataccggttctgcccatggattaattcatgtggctcttcaggcagtgcgtctgggcgatatagataaggtaaaaacaaatctggaccgtttcagtcgtcgtcattatttatatgacggattggtcacttcacatgatccggaacatcaagtatacaatttggatgcagtcttgagcatcccacgcctgctaatggagatgctggtttataccgagaagggaaaaatagaacttttgccggcctggccttgtgattatgccgatggttctataaaaggtataaaaatctatggaggacatactttggacattacctggaaagcgggaaaattgatagaagctgttttgtatgcacggcaaaatgaacggtacgaggtggtttgtggggatgttagaaggcatgtacaactacataagggcaagacctatcatttctctgcatctttttttgcagaaaaataaaaatagcactcataccttcttttcgatggtgtgttagcttatatagaaaggcctttttataaactataaaaataattaatttaatactgtatgaaatgaaaacaagaaccagaacgaaaatgctgttgctcttaggagttcttttatttggcttcactgtttcggcatggtcacaaaaagtttctttgaattttaataatgagaaggtagaaaaaatactgtcttctataaaagcacaaacaggaatggggttggtattcagcgatcagttgattgatgtgaatcgcaaaatttctattcaagtgaaagatgccagtctggatgaagcattgtctaaactgttggcaggaacgaaggtaacttttgaaataaaaaacaataagatttattttattgaaaaaaaaacggaccaacagtccggttcccgaaagaaaaaagtatccggagtggtgaaggatgctacaggcgaaccgattattggtgcgaatgtcgtggaaaaaggagtcggtaccaatggggtgataacaaatctggatggggaattcacactggaagttccggaaaatgcttctttgattatcagttatatcggttatctccaacaagatgtgtcgacaaaaggaaaagatgcgtttaacatcatcatgaaggaagatacgaagaccctggatgaggtggttgtagtaggatatggggttcaaaagaaagtaaacttaacgggagctgtcgctgctgtcgattccaagtcgttgcagaatcgtccggtaacaaacgtttcgaatgcgattcagggacttttgcccggagtaacggttatctccgggacggggcagccgggaagtgataatacaaccatacgggtacgtggtgtcgggactctgaataattctaatccgatgtatgtggtagacggtttgccggtatccagcataaatgaagtggatcccagcgatatcgagaacatctcggtactgaaagatgcttcttcagctgctatctatggttcgcgtgcggcaaatggagtaatcttgattactactaaaaaaggaggagataaagttcccacgcttcgttatgatggctatgtggggtggcagaaacctacggctcttcctgaatatctgcactcgtgggaatatgcgaagttatataacaaagctatggttaacgaaggaaagaatccgatctatacagatgaagagatcgaaaagttcagaaatggttcggatcttgacaattatccggatacagactggcagggattattttataagaccggtttgcagcatagccaccgcgctgaaatttcaggtggtacggataaaatgacctatatgttttctgctggttacttgggacaggacggtattatagatattgctaaatatgaccgttattcggtgcgaggcaatatgaatgccaagatgggcaagttcacggcaggtatgaatctttcttttacttatggggaggcacaagaaccggtgagtggttttaccggtgaaatgtctaacatcttttcgcagatcaatcagatagctcctttcattccttataaatattcaaatggatattatggatatgccaatgatggtaatccacttgcatttattgaagaaggtaatttacgtactaccaaacagcatattaccagagccatcggaaatgtaagttatgaaccgattaaagggttgaaaattcaggaaatcgtgggttacgaatataaatcgatttctgatgaaaaattcattaaggatattcaatattataactggaaaacaggtgagcctacaaagtatcagggacctaacaatcaaactgatgaacgtaaaaatggtctgaaattgaacttacagactttggtcagctataacaatacgtttggaaaacatactgtaggtgcattggcaggatacgaacaggaatattatcgtgaagactggacaaaaggatatcgaaaaaactttctgaacaatgatctttgggagttgaatgccggttcacctgatggtcagactgcagatggttcggctaatgaatatgctttgcgttcattcttcggacgcttgacttacgactatgataatcgttatttggttgaggcaaatatccgtcgtgacggaacttcacgtatctttaaggactcacgttggggagtattcccatctttctctggtgcatggcgaattattaatgagcctttcatggaaggaacccgtaatgtgttgtcagatcttaagctgagaggcggctggggagttttgggtaatcaggctatttcttactattcttaccaatctgtacttgatcaggctaattattcgtttggcggaactgttgtacagggggtagcaccggtcgatggagctaaccgcgatttgatctgggagactaccgagactttgaactttggacttgacatggggtttctgggcaatcaatatactttatctatcgaaggataccgcaaattgacgtatgatattctgatgaaattacccgtaagtaccttatatggtttaaatgcaccttatcaaaatgcaggtaaagtaaagaataccggtttggagataacggcaggttataaattgaatactcatggttggaatttccaggtatcggcaaatgccgcatataataagaatgaagtgatggacctgaagaatggtggtgcacgcatttggagtggtaaatatttcaaccaggaaggatatgccatcaactctatcggaggatacattgccgaaggactttttaaaactgaagaagaggttgctaatagcgcaacgattcccggcactgatacagcaccgggcgacatcaagtaccgtgatattaataacgatggaaaaatcgatggagaagaccgtgtctacattggtaacaccatgcctaagtggacatttggcttgaatctgtttgccgaatggaaaggactcgatgctacttttctgttccagggagcagctgatgtgcaaggctatcttgcaggtccgggtgtagtaggtgaaatgattggagctaagggaaagccttcttatatgtatcgtgattgttgggatgctgaaaccaatccgaatggtaagtttccgagagcattctcttcttatcgccagaacaacagtatttataatccctcttctttctggattgtcaactcttcatatttacgtttgaagaacttccagttgggatatacacttccaaaagagtggtgtaatatgatgggaatttcacgaatcagagtttattatagcgggcagaatctgcttacctttaccaaatttgataaagggttcgatccggaatcacccgaaggaggaagctcttatcctcaggtcaaaacaaatacatttggtttaaacattactttctgatagataatacatatgaaaaagataatatatagtttgttgtttgccgctttgttctcggcatgtagtaccgattttttagatcggaatcctttggacaaaccttcaaacgaagccttttggagaactgaaaaagatgccatggccgcagctacagggtgttataatggttggttttctatggatgaagtgatttatgccgactgtgcgtcggataatgcttataatccttttacttgggaaggctgggcagtacaggctgcaggtacagcgaccccgaccgatccgggttatagctatatggggtatggaaacatggttcgctataataatttcctggagaatatccatcgccccgaaatgaatgaagatttacgcaaacgcttgacagccgaagtacgttttctgcgtgcatgggattattttcagaaagtgacgcattatggtgatgtgcccttggtaacttccgttcttgaaattaaaaacgccaatttgccacgtactgagaaagcgaaagtggttgagtttatcttgaatgaactgaaagagatcgctccgcaacttcccgaatcttactccggaagtgatgtcggacgtataactcgtggtgcagctttgacactgaaagctcgtctggaactgttcgaacatcagtatgatgattgtatggctacttgtagcgaagtaatgggattgggctacgaactgtttcctgattataaaggtttgtttaagattgcgaatgaaaataattcggaagttattctggatgtacaatatgtagaaagcctgtacggtaactgggttttgggagtattgcctccggccagtgtgggcggatggtgttctatcaatcctactcaatcactggtagatgcttttgagtgtgaagatggaaaaacaatcgaagagtctgaggtatatgatccgaaagaaccttacctgcacagagaccctcgtttggctgttaccgtattagctccgggaaatctatacgaaggaaaacgttacgacccaatcgatgtgaaagatccgaatggagattattatgctccctacggacgttctaaaacaggatatctagttcgtaaatatgtggacgatttgtctgattatgcagatatgtgggattgtggtatgaatgccattgttatgcgttatgcagaagtgctgttgatgtatgccgaatgtaaaatagagctgaatcagattgataattccgtttacgatattttggacgacatacgtacccgtgctaaaatgccggttgtagacaggacccgatataccggtcaggagaaattgcgtgaattactcagaagagaaagacgtgtggagcttgctatggaaggacttcggtggttcgatatttgccgttggaaaatcggtgaacaagtgttgaacgggaaggtatatggttgtttacttggaacggtcgatcctgtaaccggtgccctttcattgacaaatgaacgaatttttgttgagaaccggaaatttgatccggcaaagcattatctgtggcctattccgcagacagtgattgatgccactccggcaattgtacaaaatccccattattaatttctctctatttgatatatggttaaggtaacagagatgtttttcaggatattttttttctgtagtatgcttgtattctgctccttccctgcattggcaggggaggcagaggcaagagtggtgttgaacatgaataccggttgggcttttcatcggggagaagttgaaagcggtgggcagcccggtttggatgattccggttggatagcagctatcatccctcatattatgcaattagagaagaagcattgtggaggagatattatttatgatggagtcgggtggtatcgacgtactttcagagtaccgtcacaatacaaagacaaacaaataaaaatttcgtttgaaggagtcatgaatgcttgtgaagtctatttgaacggacagaagattagtgctcatcggggaggttatgtcggttttgtaacagatattactactcggataaactgggaccgggacaatctgctggcagttcgggtttctgccgaatatgatccacttacacctcctggaaaaccacaggcaggtatggacttctattactatagcgggatttatagagatgtggaaatggttatcagtgatccgttacatatcactcatgctttagaagaggaagaggtagctggaggaggcatctttgttacttatccggtagtcggaaaagaaaaagccgtgacccatgttaaggctcatgtcagaaacgaagggaaacgaaagaggaaagcccaacttcgtacgcaactgatagataagagtggaaaaatagtggcctgtcaattgactccttttcggttgtcagccggtgaggccattcatctggagcaaaatctggaaatagtacatccatcgttatggcatccctatgatccaaacttgtatacgttgcaaaatgagattgttgaaaacggtaaggttgtagattgtcatactgaatccataggtatacgtactattgcttatacccacgacggaggtttctatattaatggcgaatcactttatctgcgtggagccaatcgccatcaggcatttgcacatataggagatgcagctgctaattctatgcaagaaagagatgtgatcgatttgaagcggggcggatgcaatgccgtcagagcagctcattatccgcaggatcctgcatttttggctgcttgtgataagtacgggttgctggtagtggagtgtatccccggatggcagtatttcaagaacgattctacattcatttcccgtctttatgaagttgggaagcaaatgattcgtcgggataggaatcacccttccgtcatactatgggaaacagcgcttaatgaaagccgctatccggcagagatagcccggaatctatatgctatagcacataccgaatatcccggagatcagatgtacactgccggcgactactttggacatgcagaccgggtagactgtttcgatgttttttataaacaggtatcccgttttccaaaagacggtgatgtgatgagtaattatccggaggaccagatcgcagtgaaacctttgttttgtcgtgagtggggtgacggagtaggagaaaaacctagggtaagcctgatggaaaatgaagaagagcaattgaaacagtgcagagggcgttttttgcaacttaacgggcatggatatttcgactggtgcatgcttgatgctaatcccagaatgggaggacattttttgtggagttataatgattatgcacgtggagcagagcaggaaaccatgttttgtgggatagtcgatataaacagatatcccaagttcagttactatatgatgcagagcatgcgtgataaagaaatatcccaaccgggattatatgatgggccgatggtatttattgcatcacaaaacactgcttcacgttatgtttcgtcagtaaatgagatcaccgtattttccaattgtgacgaagtacgccttttccgtaatcatcatttgattggaaaacagatgcgtaaggagcgtactcctctctatcgttccattgtagaaaaaggtgggagtccctgttatgtttttaatgccggtacttatgaggccggtgaattagtggcagaagggatagtagatggaaaagtcgttgctacccacagtgtacgcactccggaacaacctcgacaggtcaaaatctggttgaaggaagagaatatacaacctgtggcggacggatcggatatgattcctgtctactttaaggtctgtgattcaaatggtactcttgtcaatacatcggatgtccggatacatatttccgtatccggtgagggaagtctgatcggggatggaatagagcgtatcgggattaatccccagttggtggaaggcggagtaggatatgcgctgatacgaacgacttgtcgtcccggtaaaattcatatttcggttacggcagacggactccggggggacacccgggaaattgtaacccggagatacgacggggtatttgtacctgaagggtatcacgttccctattccggagatgaagaagagggagttgttgtaaaggctactgcctgggaaaacgtcatctgtacaaaaactccgttaaaagtggttcgggttgaggctacttcggaacagaaacgctatgaggcttctcatattacagatggagatgatttttcatggtggattgctgatgatgaatctcagccccagatcgttctacttgaattggaacgatctgtgaatgtgtttgccagtcggattcgttttcagaaggatagttctacttatacccataaggtcgaaatttctatcgacggaaagagttgggagactctatacgaacgagaatgtaccggatgggattttaagcctgtgcagatcggtaaggaactgaaatatatgcgccttaccattgagaaaagctcggagggagcagccggattggctgaagttacattgtatcaataaatgaaaaaagtaatgaatatgaattatcgaagtttgactctatccattctgttaggaatgatagtacatttcgctgtggaggcacagaccttgccggagaagcaatttttccatcccgaccgggtgaaatatgataaagattgttttactatcgaaggaaaggatatttttatactcagtgctgcgttccattacttccgttgcccgcaggaattgtggcgtgaccgcttccggaagataaaagaagccggattcaatactgtggaaacctatgtcccctggaattggcatgaacggaatatgccgaagagtgtggacgactattcgcaatgcaattttgatgatctgaaagcatggctgcatatggcacatgaagagttcggattgtataccattgttcgtcccggtccttttatttgtgccgagtgggccggtggtgcttatccgcgctggcttgccaaattttgcccggacagctatgataccagtttctggcttcggagcaaccatcctgagcacatgaaatggtcggagcattggtacaatgctgtttgccgggtatttagtgaggaacaactcactcgtaagcaaccgggtgagaagggtatcataatggtacaattggagaatgaatacatttactttgatatggagtccgagaaaaaggaagaatttctgcgggtactttcggatgcttgcatccgaaatggcattgatgtccctctttttacttgtgtgactcccgaagtgcgcggttctcatgatccggtgatcagccagctgtttgacatggataatcaatatgtatggtggaatatgcacgaggctaaatcgcgtatagagaagttaaaggccgaacaacccaatgcacctgcatttgtgtgcgagttgcaaggtggctggttctctaccgtcggtgggcgtctgagtgaagacagttatctggacggacgtcatgctcgggggatggctttgatggctatggcgggtggttctaccggattgaattattatatgttctttggcggtactcattttgccggatggggagcccgtcgtatgactactacttatgattatggagctccgctaaaggaaaacggaggggtcggtgagaaatacgctgcagtgaaaggaattggtgaggtggtcgataagttcgggggactgcttgtcagaagtcggcctgtccggttcgatgtgcaaggagccgataacctgactattgggattcgccgggctgccgacggaactttgtttgtctttctgttgaatcgtgataaaaaacaggcattccgtcaattagtcaacctgactgttgaagggaaacccatgaggatagattgtcagttggcagctttggatagtaagttactggtggtgcacgccggaactgatatggtggagtggtatccgcgtgaacaaactttgccggaacgtccggtcgctttacccttacctatcactattacagatgtctggcggaaagacgaagactttcgtggagactggataccgttgcgtaaaggtaaatctcttcccgagttgggagtcaatgattgccgttattcaatgtatcgtagtcaggtgaatcttacccagaaagaagttgaccgctatggttcgctggtttttgaactcttcaccggtgatcctgtttacgtccgcgtgaatggggaatttgctgagcgtgtatcgaaggacgagctggacaatacttttatcgtatccgggcttttacacaaaggcgttaacgagatcattgccatttacgagaaccgggggcatgctcacggataccgtccgatggaggaattaagcggagtcaagcaggccggtttcggacgcaggcagacaggtattcagcctattgaagaatggtttgtaaaatctgtcggaacggacgagccccgtttgatgcccgctgtatttgctgaagatgcggggtgggaaaaaattctgctcgatcagcaaacgattgataacctggctaccttgcaaattgccggattggagaaaccgaaatggcctgctgcctggattttacaggagaaagccggttgtgccgtctatcgtacatgtatccgctggacaccagaaatgattcgtgaagggatgactgtccttgaatttggttgtatagatgatgccggaaccttatgggtgaatggtgtggaagtaggtacgcacgaagagtgggataaaccttatgtaatcaatgtggcccctttcattcacgagggcgataatgagatagctatggtggtgagtaaccggagcggggcaggtggtctgctcaagggagtccgtttaaaacaggagttcgaggtgatcaagaagctgaactgggaagtttccaccgatctcggaggaatctgtcaggactggaatttgggaacgggaagcacagagggctggtctgttgtgaagttatcagccgattatcctttggtgcgtaaaggagagctaaccggaacagtcgatggcggacgggatgcattgcttacctggtatcgtctcgaattcaatatgccccggaaaaatccttcggtatggattccctggaagctgattgtaaatgctaccggaacgggatatatgtggttgaacggacacaatatcggacgctattgggaagaggggccgcaacgagagttctatcttccggagtgttggttacgtgccggagaaaagaatgtgataatacttggattacgtcagtccgaaacgaaaggtgcctgcctgtttggtgctgaggtggctccttatacagaggatgtcgaatgtatggaataataagagctgtcatgaaaaaatatttgtatgtattgattgcatggatgttgcctttatgtagcatccatgcacaagctccggtctggaatccggataatggaaatgggacgtttactaatcctattatgtggggtgactggcctgatccggatgtgatccgggtgggcgatgacttctattttgtctccacaagtatgcattatgttcccggttgtcccattgccacatcgaaagatttggtgaattggaagatggcaggatatgctgtcgaccgatacgatgaagatgcacgctatgatttgaaggggggcgatcgttatctgcgtggatcatgggctgccactatccgtcatcataacggtaaattctatgttggcttttgcactccttcttgggaaggagagggccccgggcacttttccatttgcattgccgatgatgtgaaaggcccttgggaacggactatctttccggaatacctgtatgatccgggattactgttcgatgacgatggcaaagtatatgttttccacggacaagggacactgtatgttacagagctggcttccgatgctaaatctgtgaagggagagaaagtgaagatatgggataagcgatttaagaatgcccatgaattcggaggaggctatggcatggaaggtgcccatgcttataagatcaacgggaagtattatctcacttgtccggccggtggaaccgaaggctggcaaatatgtctgcgttccgataacatctatggaccctacgaacataaactgatcatgaatgattccggttcttatcctcccaacggtttgcatcaggggggaatggtgcagttgaagaatggtgactggtggtttattatcatgcaagacagaggccctatcgggcgtgtacctcatttggtaccggtgaaatgggtagatggatggccgatgcttggcagtggtggtaaagacattattacctatccgaaacctgaggtcggaaagacctatccgttcgcttctcctgccacaacggatgaattcaatacatcttcgctcggacttcaatggcagtggaaccataatccggacaatagccgttggtccctgaaggaacggaaaggacatatgcgactgaaagcctcgtatgccgaatcgttgaagacagcccgcaatacattgacccagagggtacagggaccttcttccgaagcaacagtcgaactggatgtctccggactgaaagacggaaatgtagccggtttcggtgtatttgaattcccctatgcctatgtggctgtagagcagactaatggtgaaaagaaaattgtaatgtgtaatgatggtcaaacgattgaaacaatcgatcgttttgaagggaacaaaatatggatacgtgcccgtgtgatggatgtaggtttccgtgccgttttctattacagtaccgatggcaagtatttccttcccatcggtaatgaacttagtatggggcttgggctggtctggactgccaatcgttttgccttattcaattttagtaaggagaaagcgggagaagacggatatgccgattttaattggttccgtttcaccaataaataataaaaagcggggataaccttttcgccatagattgggagtgtgccgaaactcattgcagagtaacacagagttccacagaacgaatttaacctattgatagctaatgatatttattagtataaatccgtgtaagctgtgatgagtgcgagtttcgacatactttcaatctgtggcgatttcaggtatatggcacatttaccagaacttattttgttcggcattgtattcgaacccgatcgattccagttttccgatcagtatgtccttgctgatattcatatcttcacagagttcgtcgagcgatgcatagcaatcgcgaagtttcatgttgatgacgctaaacagcatcatcggatcttcaggaagttccataattattctttttttaaaacggctgcaaagatacggtaactctgtgtatcctgcaagagcacttctttcttaaaatcatccaaaggtgactatccttatttttcaaaatagtaacataatatcggattgcctaccgtggtcagtatcggttctttagacacttcacctgtctgtatatccagtgagtagataccttttgctttagccgatgagttacctatcaacatacttcctttataaagggaaagcataaccccgaaaccgttggacaagtcaagtccttgcacttttttcatggttttattgtacagatctatttccactgcaagatcggcgatggctgtgtgtccttgttctcccggtttgtagtaacccggcatattgatgtaagcatacgcttttccattacctacataccggatggcggagataaatccggcagtcttttcttctccgctgatggcggctcctgtgattgtccattgataagtcgggtcgaactccgtttctccggctttgatacgcagaactccggcattatgccctttgaccataccaaagcctcccatacacgaaatgtagatgtctttcttctcgtccatgaagatggaatagcggtcgattgggcgggttggcatagagatgccgctggtcttgtctgttatcattttcagcaacttatccgtttgggtgtcaatgatggcaatgtcgctgtacgggcgatcctgtgggggaatccatccacccaccatctggctgaggcctacgaataggagtccgtcgcgcagtaacatggcggatggatccggattgctgtcggatactcctaatgaagtcaggtctatctctccttgctgtgtcatggtagtgggatcgaagatagcgatcttgcctaatcctgccatggatagataagctttgccggtagacgcaaaaacgatattggtggcggaagagttgggtggcaatttcattgttcccgttcttgacagctgcccgttgttccgtgtatatttcactaactcgttcttgctatcgcccatgtatcccggaaaaacgaaaatatcgttcccttcgataatcgggtatgatcctccgtacggaatgggaattccgttgttgttatttgtattttgtggaaactcgtcacggatcagttgcaggtaagctgctcctgtcattccgtcgggattgggcaggatggttgccagagcgatgttggcatcggtggtcgggactttagggttcggatctttttcgcatgcagaaaatacgagtgcagtgccggcaagtgccagcatcaaatttctaatcttcatagtttttgggtttttaaaataaataatcttgtttcatttcaatacatatcttaaccttactccccagttacgtccgggtaggggacgattgaactcagacatcattcgggcatcagtcagattattcattcgtgccgaaatgatgaaccgtccgttcataaagctgtgttctattccgatattggccgagaaggtgcgtggaattctccgttcctgaaaccggctttgttcaaaatcgtagaaatattcttcaacaaaagaaccgtctgtaaagatacgggtgttctgtcccttgcctccgaacagattctctttatgatattctagtccggcatttgccagaaggtagggaatgttaggcatccgactacctttggtcgggttggttatatgggtattcggttcaaatttccgcacatcccgtaagtcctggtaggtcatgttgcagtagccgtaaagccaatgagtcaagtccgccttgacctctacttcaactccaagggtacgcatttttccgaagttttgatattgagactgaagatatcctcctgtaaaccggatcatattctcaagatagccatagaaggtatttacttctacctgtaagttgctggcatcctttccggtgcggtctaaaagaaaacccaggtttacgcttgtattgcgttcaggaagcaggtttccggaaggggcgactgtatatccgtcacccaaaagttcgctttcggccggcaggcgtacgtcatatcctatcgagagtttacccatgaaatccggagtaaatctatagcgtagagcgttgctgatgccaaaatcccgtttcaacatatccactttctcggcttccgaagacatgatactgctcatgtgagtattcataccatacatataatatttcacgttgagcgaattcaggaagatatcattgtcggtgcggaaatcgtatcccagtccggcaatccagcttgccatcgtacttctgaaattggttttataaccaacaactttatttttcaggtcatctttcgggtgtccggatgcgaaactgaacagtgagttcaagttgatagaatgattattattgatcacatagttcagatgcaacttgtgggtgatggtgtgtttctcgtttctggcattcgaggcccatttgcctatctctcctccatattcggatacagcaggataagtcgtaccgtcccagttgtatcggtaagcagcggtatccaccatgtggaatactgtgtaggcataggccagattcgattccatatcgagcccttctgtcaggaagttttctttttccagtttgttggcgaaaatgaaggcgtctgagtaagtgtgggctttctcaatattatattcaataccttgtatctctttgaaagtgtgtataaagacaggttcgaattctaccaaatcaaaccaccatttacgagccttcaggctacctgcaacagccagtttcttgaatttgtcatggttgcgcttaatgataagcccttcttcaaaaggagattccatcttatagttattgtcagagtaagtatagaatcctccgcctccgaattctaatcctttggtagcgatgttgcgtttggttactaacgaaagtttgtgtgtgttaaaactttcgatactgtaactggcatcgaggtatttaggcggatactctctgatgacaatatttacggctccccccacagaagagccgccaaacctggccggtaccactcctttgtagatttcgattcggtcgatcatgtctacaggtatgtcattgatatcgatgaagtctgaattgtcattcatcgggctaccgtctatgaaaaagccgatgcgttttccctctaacccacgtacggaaacacgggacgaactgcctacccctcctgtgttgcggatagttacacctaccgttttcgacagaacatcctgaacattactgactgttccctgcaactgttgcatacttatcactgacatgggcatagcctgttcgcgcagttggcgggcttcgcttttggctgtgacgacaacttcgcccaacgactgagtttccggttctagacgaatcactaacttcttggttttcaattcggagattctgacctcttcttgtcgggtacgatatcccatataggagataacaatccgatagtgtcccgcagggacttctattgaaaattcaccgttcttatcggtggaagtcccttttttcagtgactctacgtatatattggcccccaccagtgtttcttcattattggcatctatgatgactccgcttaattttcctgtctgcacttgtgcatgaagcaagttgcatgcggtaaacaggatggcggttaaaacaactatcctatattccatggctttctctccttatttcgataaatgtcggtcgaacttcaatggtataaggggccctggtgctactgttaggcttggcggtttcggcagcctgtacccgtaaggtgataaacagagtttcgggaactccggataaatttactttcatatttagtttttatgttttgggttgatgtttatgatttactgtaatttacctattaatggggattgtaccgatgtatgggttatcgtaattttgtatcagttctccaattggggacaaaagtagagccttatcggcttttactgcttacgcgaaaaggaacttgactttaacttaaaggaataatgatggttactcggttaatgaaacatgatttgtgtgaaatggtgttggaatggcccatgccgaacatcgtaaaaggaaaacggacggaaaaaaataactaccggattgacaatacgtatttgaaagcgacatttgaagagatatctactccgttgttttcgattatggatcaacatatatccagtgaagaacctattaaaatatatactcgggctgacgactatcatgccgtttggttttgtgccacttttgcaggacatgctacctgttgttataactctgtaatccgaagtgaggagtggaataaaggagatgccaatttgttaaaatgtgacggggtagactcttgtgttcactttcctaaaaacacgccattccatatgatggaaatcatgctgtcacatgattatctccgtgaacttgccatacactatcccgatttgctgggcggtaaagattttgaaaccgtcctttgtgatggtcagtacagggcgtaccggaaaaatcgtccgtttggtccgggtgtttataaagcgttacacgatatcagattttcacagctcaatggcaatatggcatctatgtatgcagatgctaagatacgagagatcctttcactttttctggctgggcaggaagaagaaaattatcttcattgctcatgtactatcgggataacatgtgataaaattcatcatgctagggccattattgagcaggaatatctaaatcctccgtcacttcaccagctggcattgcgggtgggtaccaatgaatgtacgcttaagcgaggatttaagacagtatttggtacaaccgtatttggtcacatctttgagtatcgcatgaagatggcttgtcgctatctattggacagtagtaagacgatacaggagattggggcgtgtgtcggttatgaatatcatgctcatttctctactgctttcaagcgaaagttcggacttactcctttggaatacagatgtagccgattgttcggttcttgaataggctgtctcaactcctccttcacatttgttattctttgcggtattttctccgtaggctgaggtctatcacataagttgtggtaaagctcgtctataagaactgctatttgtccggactgaaaagaggatattccactactgtttccttttcggagatcagtttctctatttcctttatggatactgaaatctttttgttgattttcgtgcaatttgtttagagttccggtgagattggaaaatacctaaaaggtactgttgttgttttttgtaatattttgaaaatcagattgctgcaagttttaattttgattttatccaccgataatatgcttgaaacggctattttctgctacctgtctgaaaaaagaaatccccgataatgcttgattatcagggatttgcttgatttttcttttgttttcagtgatccgcctaggattctctttgtagagttaccacgctgatatttaaaattttatatttttagcttcaagcatatcccatgaattatcccactaatttgccacgtgcttttgcggtagtttgctcatgaagaatactaagagcaaagatagcaataatttgaaattcgacc

SEQ ID NO: 5048 - DNA, 692 bp, Unknown
  gut microbiota DNA sequence
attttgattataaccaaacgataagcctataccacgacattcctcccatggcttattgtaagaactattggtattactatattctcgcgtgtaataatcaccgtgttttttaccggtattgttagcccaacgatcattgacaacgatgctgtcctttaccggagattctgaatataaccaagctaatgttctttcggcctgccactgtttatcatttatctgatcgggaccgtcagcccatatcagatccggtttataacgatttaccagatcttgtaattgcggaaaccaatggcgttcataaaacaaatccattgtttctttattatatagtgggttatcccactctctcaaagagaaataacatccaacttttatatcagttttacgtaatgcatttacatattccccaactaaatcacgatgtgctccaatttccatactattccatggtctgccataactgattgatgcctctctactgggccacaaggcaaatccatcgtgatgcttcgttgtcagcactacatatttcgcacctgagtgctcaaataaatcagcccattcttcgggatcataactaagagctttgaacatgggggcaaaatctgcataagtgaaatcttctccatacatttttcgatggtaatcatatatttcggttcctgtaaaatttccattacccatcaatg

SEQ ID NO: 5049 - DNA, 68216 bp, Unknown
  gut microbiota DNA sequence
atcgaggtgacataatcaggaaatgtataatacatttgtgataccgatcccgagtataccgaactcccataaatatacgtattggtagctacatatcccattccttctacataaccaccgttccagttgtcattgctaagcatgttatcgaattccgcttgggtataaggattagctgatgttccatttcctccccccacatagctcatttgcaaggactcttcaattaccggcattgttttcgccagttcatttaaactttttcttgtcagttttttcattgttgttgaattttaaagttattattaaatttattataggttcaacttcttttcattctttgaaaataaagtttgaaataaagttaatacttcacacttagtaagtaattgtttttcatacaacttacataaatcaccataagctgccactaattccggatattcatttttattgagttctatcagatattccaaaacctcattaattatagactctgttgttgctctttgctcactacttttttggctactgacctgactatctgatattcggtaatagagtaatggttgactgtcaatataaaatctccctcctgactttgctatctccacccaaaatttaaaatcttcggcataagggcagttctcatattttaatgcattctttttcaaaaaatccatccttatcatagtagtgggatgaaacaagaaatttccctttgtaaattttaacagtggttgttcaaccaacccactcaaggtactcaataaaccattcgtttgtgaatatgttccaatactgttcatccaagttccacaaacagttacatccggatattcttgcataatcgcatattgaatttttagtctatcgatatgcattatatcatctccatccatacgagccatatactttcctaaagaattctctattccaaggttcaatgactctataaaattatgactgttctgaataagacgtactcttttatcattatatgactgaataatagaagacgtgcggtcagtagaaccatcgtctatgaggataaactcaaaatccacaaaagattgctctaagacgctttctatcgcatcttttatatgcatttcggcattatagacaggcattacaacagatatctcacacattgttatcaagttattaaagtaaaggaaattttttattcgcgcaaaagccaagataacgggccaatccatattgatatccaacatgtatacaattgggacgaaccattctttttatcctttctaaactttcttcaaacaaatccatttctatacgctgaatttttacacgattttcatcagcgttttctatgattcccgttaaatttatcttttggtccaaaaagagaatagccggattaatattcttttgtccatatctgatatgatctcttattacatcattaaacccgaccatattatttttagtaatgatactacgtaaataataccccctaacgagtgaactcgcaattcttccctcactatataatgtaacgtaactatccatcaatgattttgaaaaatatttataattgcaaaaatcgaccaactttaaataagcctcatacatttgtaatacataatctttactatttatgtaataaatatttttccaatcgaaaaactgaagtgataaataaagttccagtccttgaaatattttctcaataattgaatatattctctcatcttgcttttgtaatttatccaagacaaataaaaaataaataattttatatgaaactaacagcttatccggctgcttgtcaatgttttcaaaatgtttgattattgcttcgcgttggtctccaaacaaatcttcaaaatcggcatcaattaatttatttgttattagataaataaggacatatcctattccggacataccattttcaaagccataatcatttgtttttcttattaaagattcttggaataggctgaaagctttatcttcaatttcagtatcttgcaaacatttagcagtttcaaataacgctaaagagattcctgactttccgttgtaaagaccggaagagttgacagagcaggcattcagtgagatataatcaacaagttttcgtatggttgtatcactaatcattgaagagtattttttctaattcgacattttttttaaaatcatataaagccaaattacgtaatgtaaagaagctttcgtaagaatctttgatggcagagtagtaacgctgcatagcatcattccgctctttttgtgcggtggcaagttcatataccgacacttttcccaatgaaaactttttcgtcaacatcttatactgttctttcgataacgcataggctcttgatgctgtcagccaaagctttacactatgatcataagcatttatcttttcttttacttcgttctcaaattcaaaattttttttttctattcgcaaccgacttgcatcataattattctttgcgatccggatattatttttgttgatgccccactgaaaaataggtatttgaaattcaatgatcacggactgtcttgtatttccatgccggtaagcatctgccaatgtttcagcatactgatttattccatagtttaaacttatatttccattgaacctattcttcaatttgatagagaacaggtttttctcctcttccaactgttgaatctcttgctgatttgaaattggattattttttttcacatagtagattgcaagccgagcatcgatggttaagggtaagtcaaaatccggtattgtaatttcggcattattttctattcctaaaaaagtaaaaagtttttgtattgattccgcatagtgtttgaccgcattttcatacatgtattgcaagtttaaggactgtaattccatctgcttgtaatcatattcagtgatacttccattcctcaattttatctctgcaatatgtaacagagtgtcgttgctttgtttgatatctatggcaagttcactatccatcttactcagtatggcggataaataaagcgtcaatgcttgttgctgtatctgggcaatgtttgaacaatattgtttcacggccacttcgtttttggcacgtttaattttgttttccaacctttgtaattttcctcctccccacaactgctgcgaatagcttataaaaaacggatttgtactaaaactgttttgtttacgtgaaaactcattcaaataatttatattacttccaatactcagttcccctcctgttatgcttattttctgtcgtacagtagtaccaaaattagtattatttgaattgtcctctacataagaataacttccatcgatcggttgttgcaataatcgcagtgacctgttaaaattgataggattaaaattcagcacaaatgcagggagaaagcttttcttataattctcgtattgcaataagtcattttggaagttaagtaattctattttagccgatgatgattccagagatagtctgtttatcacttcatctaatgtcacttcccttggtatactttgacaatatgcattcgtatagcacaaagaaaataccaatatatagactaataatgttttcaatgttttagaatatctttaggtttaggtttattttgcaatatcataaaaaccatataaatagaataatattactatttctatttatttatttttaataattatacagtaatttattctaaaaccataagatatttaacaaagatcatctacaagactatttcaactttttaaataaatcccagatcacaattcctgctgttaccgatacattcaatgaatgttttgtgccatattggggaatctcaatacaaccatccgaatggtcaataacctcctgctgcactccttttacttcatttcccataactacagcatatttcttcgaacggtccagtgttaactcatccaacatgatactcccttccgcctgttcgacagagtataccacatatccttcactccggaggttatcaaccgtttcaactgcgttattaacatacttccaatccactgtaaactcggctcccaaagctgtcttatgcatctcgggatggggaggagtagccgtaattccacacagataaatacattcaatccggaaagcatctgccgtacgaaacacagaaccgatattatgcaaactccgtatatcgtccaacactacaactaaaggcaatttatcagcttctttaaactcttctatacttatccggttcagctcggttattttcaattttcgcatgatgatgtcgtttctgttagtatgttgcaaaagtaattcttttcttgttaacataggtgttgataacggtttaaaacctgtcaaaagaatcagcatatattttgaaaactaattcttgcattattcaaatgaaggtataagagcaacaggatatgaacaatacaaaaaagttagcttcaactttccaagcatacttcaacagatttttcagtactaattagcctgtttatatccataaagtttttaactttgcactttatcaacaaggtgttaatgaagttagcaatatagcttattatcaataaatagacacgttcataaactgattataaacttagataagtaactaataacttatccggcaagaaaaagccggtttatttgctaacactattaacaggctataatcactaacaaaggatttctttttaaaagaagagaaaaaataagaatataatgaatcgagaagaatgggtgaataagggattcgttgacgagtccgtagacaaaagcattgatctgaaagcagccatcaatgaactgaaaaaagaaaagaatgcagtaatcttgggacactattaccagaaaggcgaaatacaggatattgccgactacattggggacagtctggctttggctcaaattgcagccaaaaccgatgcggatattcttgtgatgtgtggcgttcattttatgggagaaaccgcaaaggtgctttgtccggacaagaaggtgctggtgcccgacttgaatgcaggatgttcgttggcagacagctgtccggcagataagtttgctgagtttgtgaaagcacatccgggatatacggtgatttcgtatgtgaatacaacggcagctgtgaaagcggtgacagatgtagtagtgacttcgaccaatgcaaaacagatcgttgaaagtttcccgaaagatgaaaagattattttcggcccggatcgtaacctgggaaattatatcaattcgattacaggacgtgaaatgctgttgtgggacggagcttgccatgtgcatgaacagttttcggtggagaagattgtagaactgaaagcacaatatcccgatgcggtagtattggcgcatcccgaatgtaagagtgtggtattaaagttggccgatatggtgggatctacagcggctttattaaaatatgcagtgaacagtgacaagcaacggttcattgtggccacggaggctggtatcttacacgagatgcagaaaaagtgccctcaaaaaacattcattccggctcctcctaacgatagtacctgtggatgcaatgaatgtaacttcatgcggctgaacacgctggaaaagctctataattgccttaaatacgaattcccggaagtaactgttgacccggaagttgccagagaggcggtaaagccgattaaacggatgctggagatttcagctaagttaggcttataaacaggttgtgaataataagttaactttccggttaatattgaatgtatttatcatataaaagaatcgtattatacttatatataaaggtataatacgattttttgttattaacaagaccggttgaaatacctgttaataataagtgtatagtgtttaaacaggaaagatccattgaatggcggttactctttaggaaaaagagggataaattggataaaggaccagagaaaaaggatagagtccggaagaataaagtaaagagtatagagtaataacatggggatgttttgctgaataagatccccatgttatgatataaaacatccggatgttctaatgcagaacatccggatgtttttgtaatgtaagcttagtgtttcaggatgaatgaagtattgaaatgaattttattcagcttcgttatgtatttcgcatgtacccattcatctcctgatgtttgatgtcatacttggtcacattagtagcgggtggggaagtgccgtctgccgacatcggtaagtataaaaaaatccttcggtttgaaattatattcagccgaaggattcattttatttatttcgttttatcgatcagattgaacgaagaaattcacatagtttgttcacagccaaagcacgatgactgatttgatttttaatttcattacctaattcggcaaaggtccggtcgtatccttcaggaacgaataccggatcgtatccgaatccggaatcacctcttttttctttgattatttcgccttttatgattccttcgaagagatactccttttcatccagaatgagcgaaatagccgtacggaactgtgctctacggttgtcttttccttccagttcgtggaggagtttcaacatgttggcttccgcattgtgtccttctccaccggcataacgggccgaatagacacccggagcacctcccagtgattcaacctccagtcccgtgtcatcggcaaagcagtttaatccgtagttccggtaaataaaagatgatttgaggtatgcattgccttcaagagtctctgctgtctccggaatatctgtatgacaattgatgtcattcaggctgagtagctcgactttatcccctaagatagcagatacttcttccagcttatgtgcattattggttgcgaaaacaagtttacgtttcattgtatgcagtttattttattttcaggcggtcgaatccttcaccatatacaccgattaccgaactctgcgagataaaagcattcggatcgatatctttcactaaacggaaaatatcgagtgactgacgtttgtaggcaagtacaactaatacctttacattattctggctgtaccagcccaatccgtcaagtacggtcactccccgatgggtttctttcgtaatgcggtcggcaatctttgcataatctttcgaaaagataaagaactgtaccgattgacgggcgctgttgactacatagtccagaacgaaaccgatgataaacaaggtaacgaaaccgaatatcactctgcgccagtcgttaaagatgaaatagcatgaactgatgataatgatatcacagaacatgatcattcgtccgagagtaacgtccttatatttattaacaatggctgcaatgatatcggtaccacctgtgctgccgttattattaaataccacccctaatccgagaccacacatgatggctccgatgatgcaagccataaagtcctgcccttctcctaccaactgaagcggagctcctttatcgtccacaatgatcagttggaagaaccataggaagaaagtgagcataaagatggcgtatgtcgtctttatactgaatttcggaccgagtatcttaatagcaaatgtcatcaggacagcgttgatgatgaagtaggaccattgaatggggaaacctgttgcataatagatgatggcaccgataccggttgttccacctgtagtgatctgataaggaatcagaaaagctgtccagcctaatgcataacttatcagtccgagagtgatgaaaatataatctctcaactctcgcattacatcggattttgtgggtttactaatcattttgtgtgtaggtattaaataacaatgttaacaatcttcttcgggactacgataactttcttcggtgttttgccttctgtccattttaacgagcgttcgtcggcaagtacagtggcttgaatcgcatcgctggcggcatcagccggaaattccatattgaaacgtgctttaccattgaaagaaatggtgtaattaaccgtatcttctaccaggtattgttcgttgaaagccggccattgtgcatcacatacagaggtggtgtttcccagtgtatcccataactcttcgcatacatgcggagcaaaaggtgcaagaactacgatgagttgctccaatacctcttttttattgcatttcagacttgaaagttcattgacacagatcatgaaagcacttactgaagtgttgtaagagaactgttcgatatcaccggttactttcttaatcaacttatggagtgcttttagttcttctttggtagccggttcgtcttttaccagatattcgccgtttctgtcatagaacaatgaccagaattttttgatgaaacgatgtacgccatctattccgttcgtatcccaaggtttggactgttcaaccggtccgaggaacatttcgtacatacggagtgtatcggcaccgtatttttcaacaatcatatccggatttaccacattgaacatagatttactcatcttttcaacagcccatccacagatatacttgccgtcttccagaataaattcggcagtttcgtattcgggtctccaagccttgaaagcttccaggtcgaggatatcgttggatacgatgttgacatctacgtggataggagtaacttcatattgatctttcagattgagagatacgaaagtattggtatccttgatacggtagacaaagttacttcgtccttgtatcattccctgatttacaagtttctggaaaggctcttcggctacggagataccccaatcgtgcaggaacttattccagaaacgtgaataaatcaagtgtccggtagcatgttccgtacctcctacatataagtctacatttttccagtactgatccacggcgggagaaacgagagcttcgtgattgcgcggatccatatagcgcagataataggcggatgaaccggcaaatcccggcatcgtattcagttccagtgggaaaatggttatattatcaatgttttcattgtctgtcacgcatttgttgacagtgtcccatgcccatttagtggcatgtcccaatggtggttcaccggtttcggtaggaaggaatttggctacttccggcaattccagcgggaggcaactttcatcaatcatgtaaggcattccgtctttgtagtaaaccgggaatggttcgccccaatagcgctgacgtgagaaaattgcatcacgcagacggaaattgactttcacacggcctaatccggttgccttgatatattctttagttttggcgattgcttcttttacggtcaatccgttcaatacgagtccaccttcgggagctcccggacggggagaattcatcatgatgccttctttggcgtcgaagctttcttcactgacgtcgcaaccttcgatcagcggacggatttccagattgaaatgtttggcaaaagcatagtcacggctatcgtgtgcaggaacagccatgatggcacctgtaccgtaacctgctaatacataatcgctaatccataccggtatgggttcgttggtcaatgggttaatggcatagcttccggagaatacgccgcttacgctacggtcggcaatacgttcgcgttcggtacgttttttggtacggtccagataagcatctacttcggctttttgttccggagtggtcaacttggctaccaattcactttccggggcaagcaccatgaaagtaactccaaataccgtgtcggcacgggttgtaaagatagtaaattcaatatccgaatctttcactttaaagttcatttcagcaccttcgctgcgtcctatccagttgcgttgagtctctttcagcgagtcggtccattctacggtttcaagtccgtcgagcaaacgctgtgcataagcggatacgcgcaggcaccactgacgcatcactttttgaataacgggataaccgcctctttcggaaacaccgtcaactacttcatcattggcaagtacggtacccaaagccggacaccagtttaccattgtattgcccaaataggctatacggtagttcatgaggatttcctgttgttctttttcgcttttagcattccattcgtcggcagtgaagtccatttcttcgccacaggctacgttcataccttgtgttccgttggtactaaaagcttctattaactcttcgatgggacgtgcctgtttttcatcattgcaataatagctgttgaacattttgataaatgcccattgggtccaatgataatattccggatcgcaagtgcgaatttcacgattccagtcgaaagagaaaccaatcttatctaattgttcacgatagcggttgatgttattaacagtggtaattgcagggtgctgtccggtttgaatagcatattgttcggccggcagtccgtaagcatcatatcccatcgggtttaatacgttaaatccttgcaggcgtttatagcgcgcataaatgtctgaggcaatatatcccaggggatgacctacgtgcagtccggcacccgaaggataggggaacatattgagtacatagaatttttgtttggatgcatcttcatttacctggtaggtatggttgtctacccaaattttctgccatttcttttcgatctccctgaaattatattccatagcgataaccttttgtttatagtgatttataatatatgctttatatgagggagcaaatttacatgattattttcagataaccacgaagatagctaaaaaacaaaataggtatgaaaaggaagaatcagaaaataaaaatcttatatttgttgataatttaaattttagtatttatatttgtaatcatcgattaggtatatgattactcaaaagataaaaatgatgacattcattcaataggtttgagcacgaagatgtgctgaaaggataacgaatcgggatatagtctttgtaaactatatcccgatttctttattatttttccgctaatatgatcaccggattttcatcattctcttgtatttcatacgaaatcagatattttccgtcgtcagacatacacttaggtatgaatgaatgttcttccggtatggcgaatgaattttccgggtaagaaatttgaatgctattggatttcttttctttcaggtcatagtaaaaaagataattctgtttattggcccttgcagaaaagaaaagtttattatcccattttccgatgggagttaaagtcgctgcattgtcaaagacactttttctgggatcggttaatgtgtagcgggcatcttctgctattttgtattttcctaattcaatgtaccaacgtggaatgggttgatattgattatcgatggaaaaaatggtatcgttgaacatctctttaaagaaagtccggccatctgcatggaatggatagcattcattgtagaataccattgtcatctctcctttttgaaaggatttgccatagggtattttagccaggatggtgctgtctttgaataggtaaattttgtgaggttcatttccggtaatattctgtatataaccggcttttatattattacctgatgcaaggggaaatacttctttgatattgctttccgggatcggttcggtctttatccattttccgttccagttatatgttttaattttgttgtctatgtcgaaaatgtgaatgccttcatcatctgtccaagcattattaatgccgctatattcggtgggacctcctcctttgctacctatgttacaaataaatttgcccgacagatcgaaaagggataaattattgtgatgtaccagtattttgtctttatgtaggattgttgcgcggatattacctatcagtatggaatcattggtttctaattggacaaagtgtatggattttgcccattctttcaaagggatcttttccggttggccgtcaaaaagggtagagaagtcgatagtctgacattcggtagtagattctttgttacatgaagtaaacatggagcagacaaacagggagagtacaaagaaacaggcggatttgtttttcataattgtattgtgtaacggattaattaagggatctaatataggtatttaaattatcgggaaatcattaaccgaccaaacgttaaggttttaaaagcttttttagagaagccttatggagggggatagataagtacgggcataaaaaaaggagcaacgccttgctccaacctttgttaaccttaaatctaatactatgaaaaacacagttgcaaaggtacggctttctgcgaaaatagcaaataaaccaagtaaattagtatgttttataacacgttttaagaaaataatgtgatttgttaagtgttgaaagctctgaaattctatatttggggtggatcggagactgttgtgattcatacttcttccggttgagaggatgttgggatatgggcataaaaaaaggagcaacgccttgctccaacctttgttaaccttaaatctaatactatgaaaaacacattgcaaaggtacgacttcctgcgaaaatagcaagtaattcggataaaaatcggtgttttataatatattttaaaggatataataaagttattaataaaacagactctttttgaaaggtttatttagaaatgatgatagccaaacttattatcggaataaggggcagaccgatcaatatacattattttaggtatggtaaaactgtctgttaggataggtagatttgagggaaaccgctatctttgccttgttatttatgaacttaaaaagaagactatccgtgagcaatgatattgaattaaccccgatgatgaaacagtttcttgacctgaaggctaagcatccggatgcagtgatgctgttccggtgcggagacttctatgaaacttattctaccgatgcgattattgcagctgaaatattaggaattactctcacaaaacgtgccaatggaaagggtaaaaccgttgagatggcgggatttccgcatcatgcgttagatacatacctgccgaaattgatccgtgcaggtaagcgggtggccatatgtgaccagcttgaagatcctaagacaacgaagaaattggtgaagcgtggcattacggagttagttactccgggtgtttcgatcaatgataatgtcttaaattataaggaaaataactttctggcagctgttcattttggaaaatcggcttgtggtattgcatttctggatatttctaccggagagttcctgacggctgaaggaccttttgactatgtagataagctgctgaataattttgctccgaaagagattcttttcgaacgtgggaaacgcggaatgtttgagggaaatttcggaagtaagttctttacttttgaactggatgattgggtatttaccgaatccagttcccgggagaagttgctgaagcattttgaaacaaagaatctgaaaggattcggggttgagcatctcaagaatggtattatagcttccggagctatcctgcaatatctggatatgacggaacatacacaggtaggacatatcacttcgctggcacgtatcgaggaagacaaatatgtgcgtcttgataaatttacagtgcgtagcctggagttgatcggtagcatgaacgatggtggcagcagtttgcttcatgttattgacaagactatcagtcctatgggagcccgtctgttgaagcgttggatggtatttcctttaaaagatgagaaacccattaatgaccggctgaatgtagtagaatacttctttcgtaaaccggatttcagggagttgattgaagacgaactgcatcggatcggagatttggaacgtatcatttcaaaagtagccgtcgggcgtgtttctcctcgtgaggtagtacagttaaaagttgctttacaagcaattgaacctattaaagaggcttgtcaacaggccgataatccgagtttgaaccgaatcggtgagcagttgaatctttgtatttctattcgtgaccggattgaaaaagagattaataatgatcctcctctgttgataaataaggggggagtcataaaagatggtgtagatacggaattggatgagcttcggcagattgcttattctggcaaagattatctgcttaagatacagcaacgtgaaagtgaactgacaggaatacctagtttgaagattgcttataacagtgttttcggatactatattgaagtgcggaatgtgcataaagataaagtgccgcaagagtggatacgtaagcagacgttggtaaatgcggagcgttatatcactcaggaactgaaagaatatgaagagaaaattctgggtgccgaagacaagatcctggtattggagactcgcctgtatacagaacttgtacaggcattgagtgaatttatacctgccatccagatcaatgctaaccagatagcccgcattgactgcctgctttcatttgccaatgtagccaaagagaacaattatatccgcccggtgattgaagataatgatgtattggatattcgtcaggggcggcatccggtaattgaaaagcaactgcctatcggagaaaaatatatagctaacgatgtgttgttggataacgctacccagcaggttatcattattaccggtccgaatatggccggtaagtcggccctgttaaggcagactgcattgatcaccctgcttgcccagattggttcgttcgttccggccgaaagcgctcatatcggattggtagataagatttttactcgggtcggtgccagtgacaatatctctgtaggagaatctacttttatggtcgagatgaatgaagcgtctgatattctgaataatatttcttcccgaagccttgtcctgttcgatgaattgggacgcggaacttctacttacgacggaatatccatagcttgggctattgtagagtatatccacgagcatccgaaggcaaaggcacgtacactttttgctactcactaccatgaactgaacgaaatggagaaatcctttaagcgtattaagaattataacgtatcggttaaggaggtggataataaagttattttcctccggaaacttgaaaggggcggaagtgagcactcgttcggtatccatgtggccaagatggcaggcatgcctaaaagtattgtgaaacgtgccaatgaaattctgaagcaactcgaatctgacaaccgccagcagggaatttcgggtaagccgctggcagaagtcagtgagaatcgcggaggtatgcagttgagtttctttcagcttgatgacccgatcttgtgtcagatccgggatgaaatacttcatctggatgtgaataatcttactccgattgaggcattaaacaaactgaatgatatcaaaaagatagtcaggggaaaataattatttaagaaactcttccacctttttataaaacagagataagtgatgtccgtctataaatccatgatgaatggtcatagcgatgggcatcactaatacaccacctcttgtaacggctttacccgcattcattaacgggtaattaccaccgtgacgatgttcctgcgtacaagtcagtgaggtgaaatataaatcgggagtagcgctgaggagcactacatccagtaaatcactacctcctgtcttttctgcttcataaggatctttatccggatctattccgctaatgatggctttggcttctgcgtagaaagtcttaaaatcaggataccagggaagtcgtacagtaaaaaaacgtccgttatctgtcactttaatgggagtcagcatatccactgtatcgaaataaactacccgtccttcagaatcaatgcggaatcggaactctttgatttcattgacagcacgcaacacggcataaaggtagtgcaggaagaaggattctccggcggttttggcacgtgttctagcacccgaacattctacttctgaagtaatggagatagtgggattctggaaaccaaggaaaaattcataattttcttttctttcccaggttttaatatcaattatatgtttcattttacactctttttctttccgtagaaaaacataaagtaaatgccgataattacgaacgggatgcttaaccattgacccatgttcagtgccatgctattttcgaaatccacctgattttctttcaggaattctacaaagaagcggaaagtgaagatagctgtcaggcaaagtccgaagaagaacccccgatgtagttttttgctatagttcttatagaggaacatcattaccaggaagaggataaaataggcgattgcttcataaagttgtgccggatgccgtggttgcatgtctacccgttcgaaaacgaatgcccaggatacatcggttaccttacctatgatttcggaattcatcagattggcaaggcgaatgaaacatgccgtaataggagtggctacggcaatcatatctaccacatccatataattcattttcgttttgcggcaatagagccagagagaaatgatcagcccgagggtacctccatgactggccagtccttcataacccgtgaacttccatccacctcccggaagaaatttaaccggaagtatcatttcccaaaaatgattcaggtaatatcccggatcatagaacaggcaatgtcccagtcgtgccccgatcaggatgccgaaaaaacagtaaaagaaaagcggttcgaacttcttttcgtctatcttcttatcacgatattgatagtgtaccactatgtaagcaaagaatattccgatagcccacaatagtccgtaataacggattgagatgccgaaaagattaaataattccggatttgggttccagttgatagataaaagaaggttgttcatattgatttctttattgtttgatgaattttttagcaacttcccgataagtaggcacatcgataccttgctcttcggctgctgttatcatgtcaaagagcagaccttgtacctctgattcgtgtccgcgtgctatatctttttgcatggatgctgtgctttcgggagccagtttatcaattactttcagattgtatgtgactatgtcttctttaaattcaattccgagtttctttcccagagcagcgctctcggtagagagtccgataaaagtatcgcgcactttgccgggtttctgaacttctcccatcgggacatcgaaataagctccggtgactgccatggctgaaataaacgaccatttaatgaaggtatcccgattgatgtcgggagagatttctactttgatgccgctttcctgcaagtccctctgtacggcctccatcagccctgccggaacaaggattccccggtgtgcaccatataccagacgaaagatggttcccatctgagtgatttcgcccggtccggaaacaaagcctacaatgtagatacatccgtccagtacggtgactcccggtacgagacgttggatgcgcggtcctgtgccgtatacattcaatatgggaattacaatcgttcggtcgtgggctgcccgcttgataagctctgtgatagagtctacggaataccctttgacacatacaaatatcacatcagcttttccgttatattcttctgccgtgcaggcatttatccgtagagcatgttcacctttcaaatctgatttcaatttgagcccgtcttgttgtattgcttgcagatgtgctccacgggcaatgcaagtgacgtcttttccggcaagtgacagaaagccggctatacttccgcctacgcctccggttcctgcgataagataacgaagtctgttggtactttccatatttattgatattttatgtgttgcttgttaggcatgatatccggtcgcaaagataatgatttgcttgaagatagtagtagaaaaccgggagttttcgttggaagagaggagggataacaacaggaggaggtgtcgatactcaccacagaggacgctgagtaacacggaggagatttaaagttgttgattattggtttttaaaaaaactctgtgatactccgtgttactcagtggtgaaaagggttatgacccttcctcttcggtttatgaatgaaaatagatgattccggatgagttatacattgaaacggaaatgcatgatatctccatcctgtactacgtattcttttccttcaacacccaattttccggcttctttgacagcagcctccgagccatattgaaggaagtcttcgtatttgataacttcggcacggataaaacctttctcaaagtcggtatggatcactccggcacattgtggagctttccatcctttttcgtaggtccaggcacgtacttcctgtacaccggcagtgaaataagtctccaggttcaacagtttgtaggccgatttaatgagacgtgccacacccgattcttccaggccgatttcggcaagaaacatctgacggtcttcgtaggtttccagttcggcgatgtcagcttctgtttttccggctactaccaggatttcggcgtcttcgtcctttactgcctcacgtaccatgtctacgtatttgtttccatttaccgcacttgcttcgtccacattgcaaacatacattacgggtttactggtgagtaagaacaattctttcgctattttctgttcgtcttttgtttcgaacgttaccgtacgcgccgatttgccctgttccaacgcatccttgaattgaacaagtacgtcataagcttgtttggcggctttatctcctccggtctgagcttgtttttgtactttctggatacggctctcgatggtttccaggtcttttaactgtaattcgtaatcgatgatttccttgtcacgaaccggatttacacttccgtccacatgggttacattgtcatcgtcgaagcaacggagtacgtgaatgatggcatcggtttcccgaatattggccaggaacttgtttcccagtccttcacctttgctggcacctttcacaagtccggcgatatctacgatttctactgttgtggggacgatgcggttggggtgtaccagttcagccagtttatttaaacgttcgtcgggcacggtaattacgcctacgttcggttcgattgtacagaaagggaagtttgccgcctgtgctttcgcattggacagacaattaaaaagtgttgacttacctacatttggaagtccgacaataccacattgcaatgccataatattatagtcttttttatattatcaatcagttgtgtatttctatcaaatggaagagtaatcctgtaaagttgaaaaagagcaattactctgatattattccgttttggggtgcaaagataatcaattttaggctaatgcagtcatctgctttctctttttgtccaaaacggggttgccttttactacctggatcacagacaatgagagagaatttgtgtcactctgctgtcttgaaagaaatttcgtagggttttatggcatctccttccggagtgcggaaagagagtcctaaaagagtgattccatactctttcccgggtaacaattctactccgataatcacggtacggttgtcattggcgtagttgacatttataattttaggcattgcttccattccgaggtgaccataattgaaagagtgtccgcggcccaccaaaggacggtcgaagtggacagtaatagttttgatgtcgctccgaacggttgtatcgccgttggtaaattcgtcgatcgaaactactttgggacggatagaatcatagtttgcggtatattgggcaaagcctgtataagcttctgccagccgcggcatatagctgttgagggtcgggtatgtcgtgcggtcagaggaatacttctcgagttcatcgaccagcttgcttatccagacaaagccacgtgttttttgtatgacggtttctttggtgatttcgacagccgggaagttatggtctttcatgtattttatgactgccgcacgtaccattgcttcggtgaggacaatagaccattgtccataggcttggcgcgccatctgttcgccaaccgcagcataaatctgttctccgcttgtgcggaacatttccgggtcgaagtttatgaatgaatggttgaattcgtggattaagaccggcaagattaattcaggcggataaacaaccattcctacggaatcggtaacccatgctcccatgactgaaaagacattgtgtacgttttccttgtcggtgacactcggtccgtaatttcccgggccattggacattgaaagtataatgtgaaaccggtcgttggacttctgcccgtagaaatcattataccattgggtatctatgcttttgtaaataggcataaaacgacttacagcctcttgatataagttctcgttcgagtgataaaaggcatcgaaacgactgtctttgacaaacttctttagcagttttatgaatgggcctacttgattccgattccagcgagagtccagtgaaccataatctgcgagcagattgaactggttatcgagattgatggccatactcatcactgcatcgtatgaaacaccgtcagtcttgaccaacgagcgtgcgaatgatataagttcgtggtttttatagggagaaaaatgcgattcgatgcggtctgtgtagagtttgaaatcgtttctgttatactccgggttacccgttaaacggaaaataatgctaagtagttcgactcttttatctactgtcggccggatgagcatactgtcagtttgtgcctttacttgttgcgctgcacagattagcagcgtaaacatgatgagggtgatctttctcatattaaaataagtgtttggaggttatgatattgacaaaggtaattaaattgggattaatacagttatttctctatacttttttgatattgagtatataaaggaacgcattatttttcaaacagtgtcgttattgtagtatatttgcccaagtaattcacaaacacttaatagcatgagaaagtatttatcattcattctcctgttgattggcttgaccttacaggcacaggagacgtacaaaacagtaaaagacatttcgtatattcctgcgggggaaacggacggttaccgtaaagagcgttgcaaactcgatgtttactatccggtcgggaagaaaggctttccgacgatcgtctggtttcatggcggtggattggagggaggaggaaagcatgttcccgagatgtttatgaatcagggatttgcagtcgtcgctgtcaattaccgcctgagtcctaaagctcagaatccggcttatacagaggatgctgccgctgccgtggcctgggcttataaacatatagaagagtatggaggctcaccgagacgtgttttcgttaccggtcattcggcaggaggctatttgactttaatggtgggactggataagtcttatcttcaggaatacggggtagatgccgatagcatagctgcttatcttcctatcagcggacagactgtgacacacttcacgatacgtaaggaacgctcgttgcccgagggtattccggtgatcgaccaatatgctccttgcaacaaggcccgtaaagatacaccgccttttgtactgattaccggcgaccggaatcttgagatggccgaccgctatgaagagaatgccttattggcttcggtactgaagaatattggtaataagaaggtatcgctatacgaattgcaggggttcgatcatgggcaggtatacgtccccggctgttgcctggtagcgaattatattcgtaattttattgcggacggaaggtaacctgacggtccggttgatgtttttaagggggaggcttctccctcattcgtagtatgaatttaccatacttatggtattgagaatgaactaaatctgcactacctttgtcatattattaataaacagatatatactaaatagacagatatgggaaagatagcaaagaaactgacagatttagtgggtaacaccccgttactggaactgagtaattacaatgcaagtaatgggctgaaggctcgtgtagtggcaaaactggaatatttcaacccggcggggagcgtgaaagaccgtatctctctggctatggttgaagatgccgaagcgaaagggacgttgaagtccggcgctactattattgagccgaccagtggaaatacaggtgtcggcctggcatttgtggcagctgccaaaggttacaaactgatattgaccatgcccgatacgatgagcatggaacgcaggaatctgctgaaagcactgggagcggagcttgtgcttactccgggagcgaacggaatgaaaggagccatcgccaaggccgaggaactgagggctgccactcccggatctgttatcctgcaacagttcgaaaatccggctaaccctgcagtccatgtccgtactacgggtcaggagatctggagagataccgatggaaaggtggatatctttgtagccggagtgggaacgggaggtactgtaagtggggtaggagctgctttaaaggagcataatcctgccgtacgaatcgttgccgtagagcctgtcgattcgccggtgctgtccggtggagctcccggtccgcacaagatacaggggattggtgccgggtttattcctaaaacttatcatgcagccgtagtagacgagatcaggcaggtgggaaatgacgatgccatccgcaccagtcgtgagttggctgctaaagaaggacttttggtcggcatttcttcgggagcggcagtatatgcggctacagagctggcaaaactgccggaaaatgaaggaaagctgatcgttgtattgctgccggatacgggagaacgctatctgtcgactatcttgtatgcgtttgaagagtatccgctttgattattctcattacagattacgctgattgacacagactgaccgactgcttatctgtcggctgaaaattctgtgtaaatcggtgtaatctgtggtgaattcattttgtatgcggcactgcgtactcctttgccgtaacgctgtcaatcggaatctcccagatttttacgttcttgactgccggatcggaatacacaaattcccggctactgtaatggcgcatcagtatattgagtgcctcgcgcttctcttccggatcttcaatgaagttcacacgtcctctgcaaatcacactcttggcccgcatccggtaactgcatgccactttgggatgctgaaataccaattcgtggtctacactgaaggtaatgcaaacacggttgtttcttgccagcatatcgatgctgctgcccgtgggaccggaatgcagatagatcaccccgtcctgataaccgaagttcatgggaattacgtacggatttccttccaggtcagtgatacctacaaagcaaatgtcacagcgggagataatttcttctacttgctctttgttttcaatgattactgtcttcataactatattctcttgatagaactacaaagatggaaatttattttagatatccgtgcagcaacagggcatttacaggcattgtttttttgtttgttctgattttcgggatgaatgcgaatctcccggtgcctgttgtgattggtgacgacagaatggtaaccccccgtttcatctcccttcctgatcttcaatctcaaattgtctgtacagttctttcagctcttgcagggttttccggtaattccgtttcagagagcgtttgatgatcagaaggtaaatgcacatgccgagcggaataacaatgacgttcagtatgccggggacgacgttcgttgccatcaggtaaaacacgtagaagccgattgccgaaaggaaggaacatgtgtatacaatccagtcatatttggtattgaacctgatgcttttctcaatctctttgatacggtattccaaccattcctttacgggcattccatgggtatacttccgcatcttgtatgcggagcgttcccagaggaaataagagacggacaacacggccaaagcgcccatatccaaatacattcttgttgcgttttgctcttttacgaactgtgatacgatgaggaaaacggccacggcaatgataacgagccggaaaacagttccgggatacactgtcttgattgattttctggcagagttgacgaccatttcattcagtctctcttccggatacggtttgatggttctttctattcccgctttccaggtttctttaatgtcatttgtttccattacgtttactttttaaattgtttttgtagctgacctttcagtctgtgaatctttacgccgacggcggaactgcttatccccactattccggctatctcttcgtaactatagtcttccatataaagcagcatgatggatttgtctatttcattcagcttttgcagggcattgacaagtctttgccagttttcgtcctgttcctgttgttcccaggggtcaacaggctctccatccggcggcgagtcacgaaattcgatgcggctgtcctttcttactttcgagatggaggtgttgattgccaccgtataaatccacgaagcaggtttctctttattctgcaacgccgggaaagaccgccagagctggtagactgtttcctgaaaattgtcctccctgtcggcttccgacctgaaatatatccggtttactttgtggataattccctggtaggccgtcagtagttttagaaattcattcttgttcgacttcatttggtttaatctttactttatagtcggctgaaagatgcttttattacaaggactatgaaaaaaggaagtgttctacagaattaaggtatgtatcggtaaaaggtgtttgaccgggcagagctgttgcgtcagactaattgatgtgttttgtcttcgtttcatttcaaaaaggtgctgaatggctgtttctgcttacatgtactttcttttttagggagcagataggaagccaaagagcccggaggcggactttttggattcgataagcgctcttttcggatcggaaagccgggcttttcgggtcggagccccttgtttccggcaaaaagaaggaggtgttttccggaaacgcttacttctttcgggtgaaatgcttacttctttttcgaaaagacaaggagctttggtttcatgttctttctttatcccggttctgaagtaggataaggctatatgctcctcccgttgctcttgaatgaagaaggcttccggaaagataaaatgccttcatatactctttcttccttccattttgttcttgtttttcctgtttctgctttcggttaggttgcttctttttcgattgggataataaaaagaaaatcgctaacccgtagggaaagcgatttttctttgtgcccatactcttggccgtaaataagccgatctgagcaaatacgattatcattttgacagaatgttactctaccagtgcgaagtccagttgtttcttttccaggttggcgcgtgccactttgacggtgattgcgtctcccaggctgtagatacggtttttacgacgaccgcgcaggcagtagttcttttcgtcgaattcgtagtaatcatcgtccaggtcacggataggtatcattccctcacacttgttttcgttcagttccacgtacagtccccattctgttacgccggagattactccgtcgtaggtctgtcccagccgttcgctcatgaactccacctgtttgtatttgatggaagcgcgttcggcattggctgcaatctgctccatgttcgagctgtggtcgcacaggtcttcgtattttgtttccgacacgctgcgtccgccatccatatatctggtcaccaaccggtgcaccatcatgtccggaaaacgccggataggagaggtgaagtgggtataatagtcgaaagccagtccgtagtgtccgatgttgtgtgtagaatagcgcgctttctgcatggcccggatagatacggtttcaatcaggttctcttccttctttccttgtatgtcgtccagcagatgattgatcgatttagatacatccgtcttggttccgcttgtgcggagtctgtaaccaaagcgtgcgatgaactgagccagattgtccagtttctccggatccggaagatcgtggatacggtaaggcagcactttgggctttttacctttgggagcttttcctatcttttccgctacggtacggttggcaagcaacataaactcttctaccagcttattggcgtctttggattccttaaagtagacgctgatgggtttccctttttcgtcgatctcgaatttcacttcgtagcggtcgaagttgatggctcctgccgtaaagcgcttttcacgcagagccttggctatggtgtcgagcatcagtatttcgtctttgaagtcgccttctttggtttcgatgatttgttgcgcctcttcgtaagtgaagcggcggtccgattcgatgaccgtgtgtacaatgcgtgagtctctcacttcccctttttccgtaatatcgaatatggcagaaaaagcaagtttctcttcattggggcggagcgaacagatgaagttgcacaggcgttcgggcagcatcggtatggtgcggtctaccagatagacggaagttgcacgcttttcggcttccttgtcgatgatgcttccctctttcacatagtgagtcacatcggcaatgtgtacgccgacttcccaaagcccatctttcagcgggcggatggaaagggcatcgtcaaagtctttggcatctttcgggtcgatggtgaaagtggttactttccggaaatcttcgcggcgggctatttcttcggcggaaatttccgccggaatcttatccgcggctttctctaccgattgcggatagacgtatggcaatccgaattcggccaggatggcgtgcatctcggtagtgttatctccggctttgccgagaatatcgagcacctgcccgatcgggtttttggctttatccggccattctgttacttttaccactgctttgtcaccggtctttccgcccttcagcttatctttggggatgaagatgtcgttggcaagcgtgcggttctccgttacgaggaaggcatacgatttctctacttccagtgtgccgacaaaggtatcgttggcacgctgcaatatttcaatcacttccccttcggcttcgcacccgcggcgtttggcatagaaggcgatgcgcactttatcattattcatcgcatgggcggagttacgctctgcgacgaatatcggatctccgcctccttcggggatgaaggagttctttccattgcttttgcgctggaaggttccggtcatctctatgccgtgattgttaagcttatatttgtttttatctacttcggttatgtagtcatcagccaggagatcggacaggatatccatgcaaagcatttttagcggatgagtggttaacttcagttccgagaaaatatatttcaggctgatcacctcatcttgtttggcatggaagaaatcgagaaccgccttcgacagctctttcttcttcattcttttgccggcttttttttctttctttttagccataattggttcgttttatatcaatcagtacaaagtaagcgattaaatattaataattcaagattttcatgtacatttgcccctcacattatgaataatctaacaaatggaaagtgaaaagtcttccagggagaagggaatttataaagtaacgatcgtgggaagtatcgtgaacttccttttgctcgtttttaaattctttgccggaattgccgggcatagtgcggctatgctggccgatgctgtccactcactatccgatttcatcaccgatattgttgtcattgtctttgtccgcattgccgggaaaccggaggataaaggtcacgattacggccatggcaaatacgaaaccttggctacggccatcatcgggttgttacttctgtgtgtcggtttcggtatcttttggaatggggcttcgtccatttatacttttttgcggggcggacagttggagtctcccggtgtagtggcattggtggcggcactggtgtcgatcgtttcaaaggagatactttatcagtatacagtgattcagggcaagaagttgaactcccaggctgtgatagccaatgcctggcatcaccggagtgatgcattgtcgtctatcgggacggccatcggtatcggcggtgccatcctgttgggagatcattggcgggtgctcgatccggttgctgcggtggtagtcagtttctttatcatgaaggtgtctgtacggttgctgattccgtgtgtggacgaactgcttgaaaagtcgttgccggaagatgtggagaaagagattgagcagactgtactctctttcccgggagtgagccagccccaccatttgcgtacccgcagaatcggcaattattatgccatcgaattgcatgtccgtatggatgggaagataactctggaagaggcacatagtacggcaactgccattgaaaacaagctgaaagagatgtttgggaaaggaacccatgtaggcattcatgtggaaccgacgaaataattatcatttgaccagaattttatggagagtattctaattaccggagcgagcggatttatcggcagtttcattgttcaggaagcattgaagcgcagattcggcgtctgggcggggattcgtgcatccagcagtaagaaatacctgaaagaacgtaagatccactttcttgaattggactttgcacatcccaatgaactgcgggcacaactgtccgggcataaggggacatataataagttcgattatatcgtccattgtgccggcgtgaccaaatgtgcggacaaaagcgactttgaccgtgtcaactatttgcagaccaaatactttgtcgacacgttgcgtgagctcaatatgattcccaagcagttcatctacatcagtaccctgagcgtattcggtccgatacgcgaaaaggactattcacccattagtgaagaagatactccggctccgaatacggcttacggattaagcaagctgaaagcagagctctacattcagagcatacccggttttccgtatgtcatctatcgtccgacgggggtatacggtccccgggaagcagactatttcctgatggcaaaatccatccggcagcatacggacttctccgtagggtataagcggcaagatctgacatttgtatatgtgaaagatattgtacaggccattttcctgggaatcgagaaggaggtttcccgccgcgcttactttctgtctgacgggaaggtatataaaagtcgggctttctccgacctgattcaaaaagaattgggtgatccgtttgttattcacatcaaatgtccgttaattgtgctaaaagtcgtatctttgctcgccgaatttatagcgacccgttcgggaaagagcagcacgttgaattcggacaaatataaaataatgaaacaaaggaattggcaatgcgacataactccggctgtgaaagaactgggatatgctcctgagtacgacttggaaaaaggagtgaaagaaacaattgcctggtataagaatgaaggatggctttagatttatttaaacgtgtagaaagccgtaagggcttgtttgctgttgagaagataacattgatatacaatctgttaacttctatcttgattttattcatgtttcaacgaatggatcatccgctccacatgttgtgggacagggcggtgattgcggcaatgacttttttgctgatgtatctctatcggctggctccgtgtaagttttctgcttttgtacgtatcgccatccagatgagccttttatcctactggtatccggatactttcgagttcaaccgcgtcttccccaatctggatcatttgtttgctacggccgagcagtggatgttcggcggacagcctgccgtatggttctgtcatgcgtttccgcagatgtgggtgagcgagccgttcaacatgggctatttcgcttattatcctatgattctggttgtgacgttgttctatttcatctatcggttcgacctgtttgagaagatgtcttttgtactggtcacctgctttttcatctactaccttatttatatattcgttccggttgccggccctcagttctatttccctgccatcggcatggattcggtttcgcagggtgtctttccttccattggcgattatttcaatcacaatcaggagttgcttcccggtcccggttatcagcatggattcttttacagcctggtggagggttcacagcaagtaggagaacgtccgactgccgcttttcccagttcgcatgtgggcgtgtcgaccattctgatgattatggcatggcgtgccagcaagaaactgtttgcctgcctgatgccgttctatctgttgctttgtggagctactgtttacattcaggcacactatctgattgatgcgatcgcaggatttgtttctgctttcgtgttgtatgtattggtgacgaagatgttcaagaagtggttcgcagtgccgatgttcaagtgatggggtggacttaccacagagtaacacagagtctcacagagaataaataaactttattaaaataaagttcgtacacatatactaaaataaatctacattaactctcatattaactatcgatttgtccactctactctgtggaactccgtgttactctgtggtgagtccgtcgaatatccggaagagttcttctaccgattcggtgcgtagcatggcaatgcgtgtctcacggaaattggggattcctttaaataggggagttgctgccagatgacggcggatatggatgatccccctgcgttcgtccagtcgggctacactgttcagcacctcttcgcgcaacacatcgaggtaccactcgaatgattcccgcggaagttcttctccggtttccagataatgcttcacttcgcggaatatccagggacggccgatactgccgcgtcctatcataatcgcatctacaccatatcgctcaaagcactctttggcaccagcggccgtagtcacatcaccgtttcctataataggtatgtgcatacgtgggttattcttgacttctcctatcagggtccagtctgcctcgcctgtatacatctgcgcgcgggtacgtccgtgaatggccagtgccgcaatgccgcaatcctgcagttgctctgccaggtccactattattttatgatcggcatcccatcccagtcgggttttcacggtgacaggtattttgactgcatctaccacggcacgggttatttccagcatcttggggatattctgcaacatgccggctccggcccctttccctgctactttctttaccgggcaaccgaagttgatgtccaatatatccggttgtgcttcttctacaatccgggcggcacccaccatggcttccgtgtctttaccgtatatttgaatggcgacggggcgttcttcatcgcagatggtcagtttttgagtggttttattgacggaacgtatcaaagcatcactcgagacgaactcggtgtataccatatcggctccaaactttttgcacatcaggcgaaaagcggggtcagtgacatcctccatcggagccagaaatacagggcgttcgcccaggtctatgtggcctattttcatctttttacgattttctattcattatttggctgcaaaagtacggaaaaaacccctacctttgcacctcattcatttatttaactggatagaaattatgaaaaaaagactattttccattgctctgtgcctgacttttatcttgtctgccacttccgtctcggcccaggatgctgcctacagagaggcattaagcaagatgcttgaggcttcgggtgccatgactacagtgaagtcgatggttccgcaaatgatcgggatgatgaaacatacttattcgaatgttccggatgaattctggaagaacttcgaggagcaattatcggagaaagcaaacacccagtttctggatatatacgtgtctatctatcacagatacctgacgataagcgacctgaagaagatcactgcattttatgaatcgccggtaggcaagaagctggccgagtccactcctgtgatgactgcggaagccatggaagcgggccaacagatcggtatgggaattgccaaggagataatggcaaacctcaaagaaaaaggatatgttcagtaagtagttacgactccgtaacttataatttgtgactatgtataagataaacgattttgaaataatggctccggttggctcacgcgaatcgctcgcggcagctatccaggcaggagccgattctatttattttggtattgagaacctgaacatgcgtgcacgttcggccaatacatttaccatcgaagatttacgcgagatagcccggacctgtgatgaacatggaatgaagagttatctgacagtgaataccatcatttacgataaggatatcgaattgatgcgtaccattgtcgatgcggccaaggaagcgggcatttcggccgtaattgcggctgacgtggcagtgatgagctatgccaacaagattgggcaggaagtacatctgtctactcaattgaatatttcgaatgcggaagccctgaagttctatgcgcaatttgccgatgtagtggtgttggctcgtgaactgaatctggagcaggtggcggagatctaccggcagattcaggaagagcatatctgcggtccgagtggtgagctcattcgtatcgagatgttctgccacggtgcgctttgcatggctgtttcgggtaaatgctatctgtcattgcacgagatgaatcattcggccaaccggggagcttgcatgcaaatctgtcgccgtgcttacaccgtccgtgacaaagataccgatgtagagcttgaggttgacaatcagtatatcatgtcgccgaaagacttgaagaccattcacttcatgaacaaaatgatagatgccggggtacgtgtgttcaagattgagggtcgagcccgcggtcccgaatacgtacgtactgtcgtcgaatgttataagcaggccatccgggcatatctggatgattcgtttaccgacgagaagattgcggcatgggatgaacgtctgaagactgtattcaaccggggattctgggatggctattatttgggacagcgtttgggcgaatggaccaagaactacgggtcggcagccactgagcgtaagatatatgtgggtaaaggcatcaaatacttctctaacattggtgtggccgaattcttggttgaagcggcagaggtaagtgtgggtgataaactgttgattaccggacctactaccggagctgtgtttgctacgcttgacgaagctcgtgtagatctgaaaccggtggagactgtgaaaaagggagaacacttctcaatgaaactggataagatacgtccgagtgataagttatataaattggtttcgaccgaagaactgaaaaaatttaaagggcttgaataaaatggaaaagtatatctatgaacttactttaaaggtacgcgactatgagtgcgacctgcaaggcattgtgaataatgcgaattaccaacattatctggagcatacccgtcacgagtttctttcatcggtaggcgtaagctttgcaaaactgcatgaagagggagtcgatccggtggtagcccgcatcaatatggctttcaaaaccccgttgaagagtggcgatgaattcgtttccaaattgtatatgaagaaagaaggcatcaaatatgtattctatcaggatatctttcggaaaagcgatgataaagtagtcgttaagtcgaccgtagagaccgtatgtgtcgttaatggacgcttgagcgacagtgagttattcgatcagatcttcgcaccctatctgcaatgagtacggacgaagagcggatatacagcattgctctgacacaaataccgggtgtggggcacataggtgccaagcgcctggtagacggtatgggaagtgctaccgatgtatttcgctaccgtaccgagctgcccgaccgtttgcccggagtgaaccgggcggtagtcgcggcattagactccccgcaggccttgaaacgtgccgagcaagaatatgagtttgcccggaataaccgcatctcttgttttacactggcagatgaagattatccttcccgcttacgggagtgtgacgatgctcctgtcgtgctgttctttaaagggaaggccaatctcaatgccttacacattattaatatggtggggacccgtaatgcgacagactacgggaagcacatttgtgtcagcttcctgcaagagttgcagatgcagtgtccggatgtgcttgtagtcagtggattggcttatggaatcgatatcaatgcccaccgctcagcactgtctgtcgaacttcctactgtgggggtattggctcacgggctggatcgcatctatccgtcccttcaccgtaagacagctatcgacatgcttcggcaaggcggattgctgacagaatttctttccggaacgaatccggataaacacaacttcataagccggaatcgcattgttgccggtataagtgatgctactattgtggtggagtctgccgctaaaggcggttcgctgattacagcggatattgccggaagctatcatcgagattgttttgcttttcccgggcgggtcacggacgaatattcaaagggatgcaaccagttgatacaagataacaaagctgttttgctggagtctgcatcggactttgtgaaagcaatgggctgggacagcgatttgaaaagtgtcaagccggaaaccgtacagcgaaacctctttccggatctgtctgccgaggaactgagaattgtcgatattcttggaaagctgggcgatctgcaaataaacgcattgatggttcaggccgatattcccattaataagatcagtgctattctgtttgaacttgaaatgaaaggcgttattcgggttctggcaggaggagtttaccagttactcagataaaaaaggcaaaaaaaaggagtcacgcctgactccaaccttttgttaaccttaaatctaatactatgaaaaaaatcactgtacaaatgtaggtttctcttatctattatccaaatattcttcttaatattggctctctttgagtttcttttactgttttttactgttctcttttacaagtgggctaaacatcggcaataactcttttgcttttaacctcccttcactttcctcgaaaagctttcttcattaggttcccactcttcatagtctgacatggggatgtcgggaggtttaacatgggggtgtcggacggtctgacacccccatgtcggacaacgtatgtcgtagagacagatctattttcttgccgggataagtaagtcaggtggtaagtaagaagatttaagcaacggcagtacccacttttagaggccgacattggccggaaagctacccaagtgcggaggtgcttcaccgccaaacttgcaaattcctttcaatcgtttcacagaagcattcagagcttgtatttagctttgattaaattattatgtatcgatttgaacttctatatttgtattgcacaaacagacaaattatggaaaaccgtatctgcatactgaccctttttgtttttctctttctgctttcgggagaaagccgggccatggtagcaatgccggatgcctggaccagaatgatgattggtgtaaaccagaaggattggtcgctgttacgtgaaagagtgcaggctgacctccacgttccggatcgtgaggatgtgctgatgttgatcgattatcaccgcgatgaccggatgaaatgtgagaatttattacgcaggttgaacggtggagaagcataccgctatattatgaataaaatcttaccgcttttatatgtatacagagaacattcacctgtacccataccggatgataaagctgccggtgtgtttttgagtacggcgaatgtattgccccgagtgaaattcgtacatcctcagccggtggtcccggaagagggaaaaatagaaacaccagtaataatagaacagagaacagtgcttgcactgaaaaacaacctgctatacgacctggcattggcaccgaatatagaggtggaaataccattgaacagacgctggtcggtcaatgccgagtataaatgtccgtggtggctcaatagtagccgggagttttgctatcaattgctttcgggaggcgttgaaggtcgttgctggttgggcaaccggaagcggaggaaccgcttgacgggacatttcattggagcttatgccgaagggggaatttatgatttccagtttaaaggagacggctatcaaggaagatattatgcagcttcagggctgacttatggatatgcaaagcagattgcacggcatctctcgtttgaattcagcctgggcataggttatctgactacggagtacaagaagtacactccttatgagggagacttggtttggaaaagtagtgcacgctataacttcataggccccaccaaggcaaaagtatctttggtgtggcttataacagcaaggagatgataatgaatgaaagatataacaaggttgctttgcatggttctcctctcgtttctggtggtgacgggatgcagccggcgggatattctggacgattatccggtgagtggtgtggaagtgcggctggattggagcggagtgacggagaagttgccggaaggagttcggattattttctatccgaaagatgaaaaaggtagaaagatagatacgtatttgtcggtaacaggtggggaagtaaaagttccttcgggacactacgctgttgttatttacaattacgatactgaaacggtcttaattcgtggagaggaatcttatgaaaccattcaggcttataccaatttttgtaagttgggtattgcaggtacagaaaagatggtttggggaccggatccgctttatgtggtaaatatagatgatttggatatacagaatagtgaagagacattgattctgaagctgaaaccaaaattggtgataagaacttactcctttagtatcaaagtgcagggattaagtaatgtttcaaacgtgatagggagtattggtgggatggcagatcattattttttaggaaaagcttatgctatgtgcgatgactatccgattaatattgacctgaatgtgaaagccgggaagatagaaggggtatttaccacttttggattaccggaagctattattacccgtttagaaataaaacttccggtgatgatgaacctgatgattattaaggtggacaattcggtacaggaggttaagattaatataacggaagctgtacaagaacctaccggcggtggtgaaggaggagaaggagaggaaacaaaaccgccggcattggttgaagttgaaatagaagatgaaataaaagtagatgatgtggaaactcctccaagtggaggtggtggcattggtggtgatgtaggagattgggacgacgaaacgaatgtagagttgcctgttggataagaaaaaagaaatacatacaaataaaaatattaataacttaaaaaaacatactattatgaagaagattttattcgcagcagtcgctgcaatggcaattacgggttgctcacagaatgaagagattgaaaaggctgtacagccggtggaaattagtttcaatacggcagtgagtaagacaacaagagctacgactttagtgaactcagcttttacaaagtttacggcatatgcctattctactactgaggcatttgctaatgctacaaaagttaatgcgctgatatctggcgctgagtttactaaaggagaaaactccgcatggggcagtggtaactctgtattctattggccggcaacagatcaagtaagtttctttgctttttcacctaacactacgaaacagctttcttggggagcagctgttgctaacacagcgcctacactgacctatactgtggaagggaccgtggaaaagcaggaagatttggtggtagcagaagcgatgaataagcaaaaagctacgagtggttccacagaagcggttgctttaaattttaaacacgcgttgacgaaggttggttttaaaataaaaggagaaggaagtggtgttacttacactttaaataaaatagttattaatgccaagaacaaaggtgtgtatgcttatggagctacttctactactaatgagacaacattaggtacatggactattcctagcgatgctacagcaacagcatatactgtcgaacctactgaggcactttctattacaggagcagataacggtggcactgcgaacgagactttggttgaagcagattacacagccatgcttattcctcaaaatttaactggcgttacattcgaaatttactacaaagctgaggctggtggtgcgatattgtgtgataaaacaactactccggaagaaattacatttaccgatggaacttggactgccggacaaagcgttgcttacgtattgacgttaaaaggcgttgagaagatgtctattaccggttcagttgctgatagctgggatttcactgagactcctaagtagtattcgatactgtccatcattttgtgtaaatagaaaacttcaggattcaagtataaaacttgaatcctgttttcaaatatgggactatccataatattataataaatgatgcatttgatagccctgctcaagtagggctatttttttattccttcttttattgtctttctaaataattctcttacatttgtcgtaaacatacaaacaaacacacccgtatatatgcccagctccgtttgtggagatcccatgatgtgtcagaactgcaaaaagtcagttcctaatgccattttccatgtttaccatagacgtggtttccattatcctgcacaaaaatgtgaggagaatttcattttgtttcttatcaagggagaaatgctggtgaatagccgggagtatgccggaacaatgcttaaagccggagaatttatgcttcagcccatcagttcgaaaatagaaatgctggccatgaccgatgtggaatgtatctattatcagtttaatcaacctgaattgttttgtgatatccggtataatcgtatcatgaaggagactgatcctccgttaattccctcacccttacccattattcccgaacttcaacattttcttgagtctgcacgtacttatctgagcgaaaagaagatttgtcgggatctcttatcattaaagcggaaagagcttgctttcatactcggttatttttattcggattatgacctggcttccttggtacatcctctctcaaaatatgcttcttcgtttgagtgctttgtatatcagaactataagaaggtgaagactgttgaagagtttgctaaacttggaggatatagccagactacattcaggaggattttcgataatgtttttcatgagccggtgtatgagtggatgcttagccgccgcaaagaggagatcatttacgaacttcagaatacagaggctaccatctctgaaatctgttataaattcgggttcgaatctttaccgcatttctcaaacttctgtaaaaagtcatttggtacctcgccacgcagcattcgattgaagcgttcatccgaatgagacaggcctctggaagagagatttttttatcattgtatttaggtatcggagtttcggtgaatacctaaatatggtgattgtcgtccggtgtcgatatacgtacctttgcggactaattaaacagagtgattaatgaaccacaaagtgttgtacagagtagctttattctgtcttttttctatgctgtcagccgttcttatgcatgccggcgaacagcaacaacaaagtaaaggtatagtgacaggtcgaatcgtcgaccaacagaagcaaccttactatccggttgcagttgccattgaaggtgtttatattggcggatataccaacgagaatggagtttatcatatcaatgatgtgccggcgggcagtcagacgatagttgtatcgggcataggagtgaaaactaaaaaggtgccgatacatgtgactgccggaaaagtgaaccggattccggacatagagatcgatacccaggcggaagagctggaagaagtacaggtgattggaaaatctgaagctcgccggcagcaggagcaggcgtatgccatatcggtactcgacatcaagaaagcgtataatagcgctgcacctctcaacaaattattgaacaatgtgtcgagtgtccgtatccgtgaggaaggtggtatggggtctaactataatttcagcctgaacggattttcgggcaatcaggtgaaattctttttggacggaataccgatggataatttcggatcgtcttttaacctcgctaatatctcggctaacatggctgagcgtgtagaggtatataaaggggtattacctgtaaatctgggtgccgatgccttgggaggagcggtgaatatcgtcagccgtagagatgccaattatctggatgcgacctattcttttggctctttcaatactcataaagtctcggtgaatggagcctatacccatctgaaaacaggtttcacggtgcgtgccaatgctttctataactattccgacaatgattataaagtgtttgtgcccatcatcgatctggctaccaataagaagatagacgagcggtgggtaaagcgctttaatgatgcctaccggtcaggaggtatccgcctggagacgggaataaccaataagccttatgccgactatctgcttgcaggcattattctttcgaagaatgataaagatgtacagactggtgctacgatggatgccgtttacggtggcgtaaaaatgaagagtgaatctgtgatcccttctattcgttataagaaagacgatctgtttcttgacggactttcgctgtcactttacggaacgtataattctgtaaatactttcaatgtggataccatcgcccgccgttacaactggttgggagaatccgttccgtctacttctgcaggagaagggtattatacggattccaagataaagaaccgcgaatggttaggaaacggaaacatcagttacgtgatcgacggtcaccaatcattgatactgaaccatgtggtttctgctatgcggagaaccatgaatgataaagtacggccggatgatgaaaacaacaatgtacctcagcaactgactaagaatatcacaggcttgggatggcagatccgctatgatcgttggaatgccaatgtattcggaaagatgtataagttgtacagttctacctataagcggttggatgaatatacagagaatgcccgttgggaaaaagtgcgggatcataaaaccaatttcggatacggtgcggcggctacttattatatcttaccctctttgcaggctaagttctcttacgagcatgcctatcgtttgccggaaagtatcgaaatgtttggagacgggttgattcagcagcggaatccggatttaaaaccggaaagcagccggaatttgaatctggggttgagcttcattcaaactttcggagcccatcaactttcggctgatggaaacttcatttatcgttatacgacagactttatcctgaaaggggtcagcctgaccagtaacccgactaccggttacgagaatctgggtaaggtgttgacaaagggtgttgaggctgctgtcagatataactataaagatctgttccatacgggagccggttttacttatcaggacattaccgaccggcagcgatatgagaagacgaaggacagctttgtcggcgaaggtatcacagagaatattacctataaagagcgtttgccgaacatcccttatttgtttgctaatgccgatgcaggggttcgttttcacgatttgatttggagaaactctgtgctgacgtttgactataatcttaattatattcattcgtattatctttcgttcccgggcttgggtgcaaaaagctctaaaaaagtaatccccgaacagttctcacacgatctggcattggggtattcaatggacaacggaaagtatagtgtggttgtggagtgtaccaatctgaccaatcaaaagctgtatgataactaccgcttgcagaaacccgggcgtgcctttaatgtgaaactgagatatttctttagtaaataaaaaagtctgatgattacaatgtatcgaatttatatgtatctccttgctgcctgccttttattgggtgtcacggcatgtgaagaagaaggattgggaaatgaggaaactccttttgctccctatgtactcagcctgggtatcaattccaatgggactaccacttattatgtggttactgcacccgaattgatgtccggaacaatcaatgcggtggccaaaggtatcgagcaaaacggatatcgtgattatgaacaggccggacaaacggtgttcagtattggcggactgggactgaccagtgcaaccggaattgtacgtgatgcaaacggctatctgacggagcgtggagactttgtctttaacagttcgctgaatgcgtttacacaaatggacgggcagaacatgatcggccttgaacttccggctaataaggagagtggggatcaaatgaccttatataccgtaaatatcagtgatgtttctatcacttctcaggtcaaagctccggtatttccgctgaatcaactcgaatggccgagtatcacgggtatgtgttatagtgaaggtaatgtgtacgttacttattttccgatgaacccttccacttttgagactttatataccgatactacttttgttgcggtatactcttatccggatatgcagtttaagacattgatgaaagatacgcgtaccggtcctgccggttcgtggaatgcatttaacggtatttttaaggtagagtccggcgatatgtacatcatgtctaattctgccattgccaacgggttctcacaaagtaccaagaatgctgctttccttcgtatccctaaaggtgagacgcattttgatgactactattttgactttgagacggtttcgggaggattgaaacctgcccatatcaaatatatcggtaatggtctggtatttgccgaggtcagcaccatcagtccgcagacatccgccgaccgttggggagataagagtttgaaatgctgcattatcgatcttaataataaaacggtacgtgacattaaagagattccggtgcataacggagatggcggacggcgttttgccgctctggtagacggaggttatgtttatcgtccggtcactacttcagagggtacttacatttatcaggtagatcctcaggcggctactgcggtcaggggagctaaagtttcaaccacgtttgtcggcggtttcttccgtctggattgataagagatgaataagacttttcggaaggcttgtgcgaaacttcatttatggcttggattgctttcgggtattgtggtattcatagtctgcatcaccggctgcatgtatgcatttaaagacgaaattaccgatgccacacaaccttggcgctttgtagctccattggagaaagagtttttgccgccttcccgcttacttgcgatagcggattctgtcatgggaggagcttcggccacagccatcacttacggtgaaagatcggatgcggcctgggtggactactatcagccggaagcagggatgagtactgtttttatcaatccgtatagcggacaggtattgaagtcggtagtgaatcataacggtgatttcgatttcttccggttggtgcttagcgggcatcgcactttatggctccccagggagatcgggagtccgattgttggttacagtgtattgattttcctcatcaccctgataacgggagtgatactttggtggcccagaagctggacacgcaaggcacttgtgcaacggttgactctgaaacgcccctttaccttttcaaggcttaacttcgacctgcataatgttgcgggtttttatgctgcattggtgctggccgtattatgttttaccggattgatatttagcctgaattggtttagcagaggcgtgtacagcatcacttcgggtggtgaagagttgaagccctacgttttaccggtatccgatacattgcaggttgtcaatcgtgtgacaaaccctttggacagactttatactcagctacggcttgaagaacctgctgccaagaccttttattttgctttacccggacaagccgatggtgtttaccgggtcagtgttgtacataaaagagggtcttactaccgtaccgataatttgttttttgaccggtatacactggtttctttgaaaggagccggtccttatgccggtaaatataccgaggcctctcccgccgataagttccgtcgtatgaatctggagattcatgacgggcgcatctgggggcttcctggtaaaattataatgttccttgcgagcctgacgggtgcttcacttcctgtgaccggctttatcatttggtatcgtaagcgctgtaagagataacactgctctccatatacaaaaattccccaccgataccggtggggaattttcctacttattaatcaaatgctaagttgtgcttagtctttcagttttgcgatgatgaaatcgcggttcaaacgagcgatgttgctgattgaaatgttcttcggacactctgcttcacaagcacgtgtgtttgtacagttaccgaatcccagttcgtccatcttagaaagcatagcttttgcacggcgtgctgcttctacttttccttgtggaaggaggttcagctggctgaccttagctgatacgaacaacatggcagaaccattcttacaagcagctacacaagcaccgcaaccgatacatgcagcggcatccatagcctcgtcggcgatatccttagagataaggatagcgttggcatcctgaggagcacctgtgtttacgcttacgtaaccaccggcctgcatgatcttgtcataagccgaacggtcaaccatcaagtcacggattaccgggaaaccggcagaacgccaaggttcaactgtgatggtgtctccatctttgaagcgacgcatatacatctggcaggtagtagcacctgtcgcaggtccgtgcgggtgtccgttgatgtaaagagaacacataccgcagataccttcgcggcagtcatggtcgaatacgataggttcgccaccgtcattaataatctgttcgttcaggatatccagcatttcgaggaacgacgtatcgcccgggatatctttcatttgatatgtttcaaaagcaccttttgctttcgggcctttctggcgccataccttcagtgtgaatgatatatttttatccatttttgttttcctttaattgattagccgaattatgacttgtagttacgagtctgaacttttacgaactggtagttcaaatcttctttgatcaactccggttctgaattttcaccggtgtatttccagcaagctacgtatgagaagttcttatcgtcacgtaacgcttcaccttccggggtctggtattcggtacggaagtgtccaccgcaagattcttcacggttcaaaccgtcgcgagccatcagcatacctacttcaatgaagtcgatcagacggagtgctttttccagttctacgttcagttcgtttacatcacccgggatgcgaacgttggtccagaaatctttcttcacctcttcaatgcctgtcagggctttctgcagagattcttttgtacgggccatacctacgaagtcccacatgatgtgacccagtttcttgtggatagagtcaacagagtgttttccgtttacggctttgatcttctggatcttatctttcacttccttttcggctgcagcaaattccggcaggtcggtagagaagcgcggaacctgaatctgatcggccaggtagttctggatagtgtaaggcaatacgaagtatccgtcagccagaccctgcatcaatgcagatgcacccaagcggttagcaccgtggtcggagaagttggcttcaccgatagcgaacagacccgggatagaagtcatcaattcataatcaacccagataccacccatggtgtagtggatagcggggaatatcatcatcggagtcttgtacgggttctcgtcagtgatttcttcgtacatgtcgaagaggttaccataacgggcacgaaccacgtcctcacccagacgatcgatagcatatttgaaatcgaggaagacggccaaaccggtattgttcacaccgaaaccggcatcacaacgttctttggctgcacgtgaagcaacgtcacgcggaacaaggttaccgaatgccgggtaacggcgttccagatagaagtcacggtcttcatcaggaatttcggtcggctttttagtgcctgcctgcaatgctttggcatcttcaatcttcttcggaacccagatgcgaccgtcgttacgaagtgattcagacatcaatgtcagcttagactgcttgtcaccgtgtacggggatacaagtcgggtgaatctgagcgaaacaaggattggcaaaataagcacctttcttatagcactggatggcaactgaaccgttggaacccatagcgttggtagaaaggaagaatgcgtttccgtaaccacctgtaccgataactacagcgtgagcagcgaaacgttcgatttcaccagttacgaggttacgggcaatgataccgcgcgcacgtccttcaattacaacgaggtcgagcatttcgtaacgagtgtaaagtttaacagtacctttttgtacctgacggctcaatgctgaataagcgcccagcaacagctgctgtccggtctggccgcgggcatagaacgtacgggatacctgtgcaccaccgaatgaacggttgtcaagtgtgccaccgtaatcgcgtgcgaaaggtacaccctgtgctacgcattggtcgatgatagcgtttgatacctcagccagacggtaaacgttggcttcgcgtgcacggtagtcaccgcctttgattgtatcgtagaaaagacggtaaaccgagtcaccatcattttgatagtttttagctgcgttgataccaccctgtgctgcaatagagtgagcacggcggggtgaatcctgaatacagaaattgaatactctgaaacccatttcgcccagagaagcggcagcagatgctccggcaagtccggtacctacaacgataatgtcaaggcgacgtttgttggcagggttaacaagtttttgatgagccttatagttactccatttttcggcgagctggccttcaggaatttttgaatctatcttagtcataatgctatttacaatttaatcatttacaatttacaatttagcaagcaccgcatgccaacgatttaacgaagaatacgactactaccagagcaaagcatacaacaacgatggttgaatagatgttggagatgcatttccagcggttgatccaaatcttgttgttccagcccaaagattgcatagagctccagaaaccatgagtcaggtggaaccaaagggcgcccagccaaacgaggtacagcactacatatacagggttagagaaagtgttcatgatgtgataaacaccatcagcagcataagttgtgtctgctactcctcccatgttgtgcaccaattcaggtaactgcattttagcccagaagttaaagaggtgaaggcccaaacctaagataacgatgatacccagcaccagcatgttttgtgatgcccattccacggttttaggtttgtcaactacggcgtaacgttcgctaccacgtgctgcgcgattctgtattgtcagccagaaagcgtagataatgtgaatcacgaagagggcagccaggcccagcgtagctaccaacgcataccagtttgctcccaggaactcacaaaccaagttgtaaccctcagccgagatgatcgcaacaaggttcatcgccatgtgaaacgttagaaacaggacaagggcgataccggtaacgctcatcaccactttccttcctacagatgaattacttaaccacataaatgattgattttaaattatttaattgttagaactataatttctgttttacgagccttctttctcattgtgcaaaagtacacgaaatacattgattaaccaaagaattaaagaaataattctttaatcctgaatgtccggagaggatggggtaaacgggacgatcggttgggggtataaaggatttgtcgtgaatctgttagaatagtaaaatctttgtctttaagaagttagcttttggagtcgttatcatgcttatatttaattggtcgttttccgaggtttcctctaattctcttttctgtgcatgaattaagaagaaaacaagtcaaatggacatcatttataatactttgtaaataagagtattaccgtaccttctgatatgtttatgtgagccttgctatctgggctcatgggcacagatatgcaggaggagataaagaaaagaccattttcactaaagatagcaagaaaaataaaatactctaagtgatataaatagatagagatatagttatatacatttggatatcagcatgatgtgttgtatcccagctcttgttcggagggtggaagatggaagattgaaatccatttacgtgggagaagtatccgactgatccgaagaatgagaaggggattcggatgaagctttgtccgttatcgggtaaaaagagcggtttctattctgtttttaaagcagtaattttttcacctctggctgcacgtgtacgaagggcacgtggagagtctccaaaggaagctttgcagaaatgtgcaaaatgtgataaagagtcgaatccgtaacgattactgatctcggtgatccgttgtttggtatgctggaggtcttccaggatgccttctcttttcttgctcagaatccattcgtatacaggtacgccatacatgttcttgaataaacggcgaaaagtggtagtggtatagcctcccaggtgtgcaaattcctctacgtttttcaccttttcgtaattctgcatgacgaaatattggaaactttccgtatagctgctgatgggatagaaaaacttgctcaactggggtatcgggtaataacagatgatcagatacatcagttcctgacatttcagatcgatgaatgcgccgcaaggcatctgttcatcgaggtaatcacaaatatctttcatgaagttggttatgcgttgtgtcataaccaatggtgtataagttagcggagcttctgattgttgcaggatctcatgatagcgctgttcacagatcaggggtggttcgttgaaccagtacactacataatttacgtctgttagtgccagtaattctaatttggagccgatggactggagaataaattgtccttcacgtaatgtggtgccgggatactcttcactgttgaccagtaattctccttgtagtataaacaggatacaattttgtgtgcatttgtcgggcggaaaatgttgtcctttgggaaacttccggtgaacaagtatgccttctgtagctttgggacattgtgcacaatctgtctgtctattacattgagtttctctggccatgaattaaagttaggtgtcagggtaaataatacttagggaacaaagataggttttttttgcgaaaactctgtctttttaatctatctttgctgcaaaatagtaaattagtagaaaaatgaagaaatttgtgcttatttgtttttgtgtgctttcttcggtagggggatatgctcagaactgggatatcaatacgttacataaaataaacagtcttgatagtaagtttgcgaggaattatagcaaagccttttctaaatcggcaccttatattgcggtaggtgtaccggtggcgatggctgtatatgcaggtatcgataaagataaagagctgctgaaagatgccatttacatcggtacgagtgtggccgaggcagtcgtgattacgtatggtatgaaatatgcttttgaccgtgagcgtccctacgaccgttatccggatcgggtagatgcacgtagtcatgaatcgagtccttcgtttccttccggtcatacggcagcagccttttcactggctacttctttgagtatccgttatcctaaatggtatgtgatagctccatctgctttctgggcatgttctgtgggattctcaagaatgaatgaaggggtacattacccgtcggatgtagcagcaggagctgtgataggggccggttgtgcagtagccaatatttatgtgaatcgctggcttaacaagtggttgttcggtgagaagaagaaggttacaataagttattgacgacatacggtgaatgacaaacagactatgcttcctgcagcctgttcgtcattcatcgtatatcgttttccgttatagaaacgttatttcaatatcttttcgtactctttgtcatttaagatttccagtgcccgctccacactcttattggtggcattcattacttggaaatattcattcatatcccataagtcacgggctatcaaagctttcagctgagctttaatcagtggcagggctttgttgtactgctcttcgttgaattcaatcttttctttgtcggcagcttctctcaggtagttcaatagctggtcgtcgatttcaaatttttcattgaatttctcgaatgtcttatatttatccaataaagcttttcggttcttttcaatgaagttcattgtggttttaatgactacccctttggctaccaggttacggtgatagtcggtatatagcgttgtgtctaccggaacgaagtagtccggcatgatacctcctccaccataaaccgtacgtcccagttttttagtctggcatttcagtgagtctgggaagtggatgctgtctgcactgaccatttcgccatgattataccggtcgatcagatcctggttgtatttttcgatgctgctttcactgctttttccttttcccggtttttcgttgatgctgctgtcataaggcttttgtatgcaacgtcctgcaggtgtatagtagcgggcaatggtcaggcggatcatagaaccgtccggaaggtcgatcgggcgttgaaccagtcctttaccgaaagaacggcgtcctaccaccactcctctgtcccaatcctgaatggcacctgtcacaatctcacttgccgaagccgaatattcgtctaccaataccaccagacgtccgttacggaagtttccgttgcctttggcaaaaaactcactgcgttgtgcagaacgtccttctgtgtagacaatcagttctttttgtcccaggaactcgtttgccagatcgatggcggcattcagataacctcctccgttgccttgcaggtccagaatcaggtctttcatcccttttttctgcaactctttcagggcttttagaaactcttcggcggtagttgctccaaaacggttgatacggatgtatcctattttaggctgaatcatataagcggcatccaggctgaggattggaattttatctcgttttacattaaataaaagcggttctttcacacctctgcggataatggtcaggtttactttcgaatctttggggccccgcaggcgtcccatgatttcttctgttcccatttttacgcctgctatggctgtgtcattcaccgcgatgatacggtctcctgccaggatacctactttttcggacgggccattactcaccggttgtacgatgagcagcgtatcttcgatcatctgaaactgtacacctatcccttcgaaattgccttggagcggttcattcattttcttcacctcttcggcatccgaataggtggaatgagggtcgagttgtgccagcatttctatgatggccgattcaacgagtttgttttcattgaccgtatctacatataaattagagatggcgaactctgccagttgtaattttcgcatggcgggtgagccaaagttctgtgcctgtagtcccaaaacggaacacaaaccgataagcaggtatattatttttttcatgatcacatgggtttattacatttccatccctttgggaatgaacatactgatatccttattatagccaagcagttcgcggacgatggtagagctgacacaggtcaattccggttcggtaaataacagaatggtttcaatgccggccagtttccggttgatatcggcaattgtttcttcgtattcgaagtctttcacggtacggataccgcgaacgatgaattgggcatctacctgacgggcaaagtcgatcgtcaggcaatcgtaagattcgaccttgatccggggttcgtctttatagaacttacgaatcatttccacacgtttctcgatcggaaagtatgtattcttgttttcgttgataccgataccgatgaccacttcgtccatgaatgtcagggtgcgttgaactacggagtagtgtccgatggtaaacgggtcgaacgttcccggaaagatagctcttctcatgtttatgcgatgtcttcttctataaccagattatcaataataaagttttgccgttccattgtattcttacccatgtaaaattcgagtagttcttttaccgtgtctgttttgcgcagcgatacttgttcgagacgcatatctttgccgataaagtgtctgaattcgtcgggcgagatttcccccaaacctttaaaacgggtgatttccggattcgggctaagctctttaatagcatttacacgctcttcttcggtataacaataaagcgttttctttttattgcgtacgcggaagagaggagtttggagtatatatacatgtcctttctttatcagatcggggaagaactgaaggaagaaagtaatcagcaacaagcggatgtgcataccatccacatcggcatcggtagccacaatcactttgttgtagcgtaagccttcgataccgtcttctatattcaatgcagcttgcagcagattgaattcttcgttctcgtaaactacttttttggtcaggccgaaagagttgagaggcttaccgcggaggctgaatacggcttgtgtgttcacatcccggcttttggtgatagagccgcttgccgagtcaccctcggtgatgaaaatgcacgattcctcttccagccctttgcctttcacatcgttcaggtggacgcggcaatcacgcagcttccggttgtgcaggttggctttcttggcgcgttcacgtgccagtttggttactccggcaatggctttgcgttctttttccgaatcctgtatcttttgcaacatgatttcggctacatcggcatgcttgtggaggaaattgtctacctcctgttttatgaagtcacccacgaacttatttactgtgatgcctcccggcgacatattggtagagccgagtttgattttggtctggctttcaaacataggttcttccacgttgacagcaatggcggctaccagtccgttacggatgtcagtatagtcttgattcttgttatagaactctttgatggtgcgggcgatgtgttctttgaaagcactttgatgggtacctccctgagtggtatgctgaccgtttacaaatgagtagtactcctctccgtactgtccggtatgggtaaaggctatctcgatatcttcgcccttcagatgtacgatggggtagaggccggtagctgtcatgttatcattcagcaaatctaccaggccattgcgcgaaaggatccgttggccattatagataattgccagcccggtgttcaggtatgtgtaattgcgcagcatcgtctcgataaattcgggacggaaactataattcaggaataaagtttcatccggttcgaagaagatgtaagtaccgttttcttcttccgtatcttctgtgtggtctgtcaccaactctcctttggtaaaggtggcgcaacgcactttaccatcccggtaactacgtacttcaaagtttgagctcaaagcattgacagctttcacgccgacaccgttcagtccgacacttttcttgaaagccttgctgtcatacttaccaccggtgttcagcacactgactgcctctattagttttccctgtgggataccgcggccgtagtcgcgtacactgacacgaagattctcttccactctgatttcgatcttcttgccggattgcattttgaactcgtcgatactgttgtcaataacttctttcagaaggacatatattccgtcttcgggatgcgaaccgtcgcccagcttaccgatgtacatacccggacgggtgcgcacatgttccatgtcgctcaggtggcggatgttgtcgtctgtatattctacagggttgttgtctacaggtatcagttcgttctcttccattgtttttagtctatcttcttagtaaacgcacgacgacgtttatgttgttcggttttaaagtattcccattgtgcctgaacctttccgttcatttccagttcggggttgctttctgcaaagataaaacctaatttttgataaaccggaattaaatcggaaaataacaaagcgttaacacctttgttttggtactccggtttcacggctacaagcagcaggtcaagcattttggcgcgtcgtttcatgaacaatgcctttagcagataataccatccgaggggcaaaaggcgtccatgcgatttctgtaacgcttccgaaagtgaaggcattgaaatgcctacggcaattaacttgtcttccgcatctgtgatcagggttaccattcgcaagtcgacaatcggaaggtacattttaacatattggtcaatttgccgttgcgaaagcggagagtatccgtacagcggactataagcttcgttcatcaactcaaagatagcttgtccgtaatcggctgcaatctttctggatgaggtatatttctttatcttgaggttatatttacgctgaataagatcggatatgcgctggtgcttctcagggatggcgtcaggaatataaattttgtattccacccagtcggcatctttctcaaatcccagtttctccatgtgttgcggatagtagggatgattgtagatggttgccatggtgctgagttggtcgaatccttcgatcagcataccttctgcgtcgaagtcggtaaatccaagaggtccctgaatgttctccatccctttggatttaccccattcttctacggtttgcagaagtctggaagatacttcaaggtcgtcgatgaagtcgatccaaccgaaacggacatcttttttgttccaggtggcattggcacggtgattgataatacctgcgatgcgccctacgatttttccgtctttataagccagaaagtactcggcctcacagaactcgaatgccgcatttttcttcttattgaatgtattcagcatgtcgtcgtagaggtcaggtacggaataaggattctctttgtataattcgtaattaaaacgaatgaattttttaagttctctttttgtcgatacctttttaattgtaatggccatagcttgtatttatgatgagggggcaaagatacgtgataatctttaaattaccacgtacgaaaactaaaaactatgtgtctcgatgttatcaaatctgatagatcagataggtggtgtaggctatatagcataacaccagaatacttccttcgatccgtgtgatggtgcgtttggcaaaaaataatccgaaaaaccagagcagaatgcccgaaccgaccaaggtgaaaaggtcgaagttattgatgcctgtcagccgcaagggagtgatggaagcactgcatcccaatacaaagaagatgttgaacagattactgccgatcacattaccgatggctatttccggattctttttcaaggcagccactatcgatgtagcaagttccggtagggaggtacctccggctaccagtgtgagtccgataacagattcgctgacgccaaggtgccgtgcgatgttgcttgctccctctacaaaccattgtcccccgaaaataagtccggccaatccgcccagaatgaaaagtacggatttccacatcgggaggcttttgatttcctcttccggttgagtattgtttgtgggtgaggctatggcaaatgtgtagcccaggaagatggtgaagaaacagagcagaatcagtccgtccgagatgcttagtatgttgctggaagctttattcagaaaaacgtcattggcgcatatcagcaggacgatggaggagagaatgcatagcggaatctctttccgcaaagtattccgggtaattacgataggagcaaatagagcggtgcacccgacgatcatcaatgtattgaagatattacttcccactacgttacctacggcgatgtccgcgctacctttcagggcggacgatacgctaacggtcagttccggggcggaagttccgaaagctacgatagtcaggccgattacgatggaaggaatacggaatcgcttggctacggacgcagcaccatctgtcaggcagttggcacctatcaaaatgaggagtaatcctccaataagcagtaatatatccatgtctatacctttaaattacggattcgggtgcaaatataatgatttcgatctatgctatgtcaaaaacaatctgtatgtttggcacgtttatccattccggtgacaattactttatgagtttttgatatgaaaaagaacagattattcggccttttgttgtttctgttggtgaccaacaatatgtgcgcacagttgggaaaggcggttcgtgagatattgacgggtgatagtgtggctacccggaccgcagttcggaacgattcggattccgtacggatggcagatatgaagaaagagctggaggaggcgcgtctgagcgaagccaatatgcgtatggaaatggagcagatgaggctgaaagcttttgctgccgactctgtgaaattagctcagcaaagggcacgtatcgactcacttcgccagtttacgccgggagtaccggtagtggtcgaaggcgatacattgttttatttgtataccaagcgtgggggatatacccctttgcagcgggccgaaatgatcgatgcggccatcatgcagttgggtaaacggtttaccctgcatcccgattctgtctatatcgagagcagcgatatcgtaaccgatctgatgtacggcaataaagtcattgcttcgtttaccgaccaggacggactatgggaaggacgttcgcgcgagcagttggcaacggataagcggaagattgtagtacagaaactgaaagagttgaaggaggagcatagcttgtggcaactgggtaagcgtattctgtattttgtcctggtattggcagggcagtatctgttgttttggcttacaggctggctgttccgtaaactgaaagtacgtatccaaaagctgaaggataccaggctgaagccgatctccattcagaattacgagttattggatacgcagcggcaggtcaacctgttgatcttcctttccaatttgctgcgctatgtaatcatgcttctccaattgttgattaccatcccccttttgttcgctatcttcccacagaccaaggggctggcctatcagatattttcgtatatctggaacccgatcaagaacatactggtaggtatagtcgattatattcccaatttgtttgccattcttatcatctgttttgccgttaagtatctggtgcgcttggttcactacttgtcccgtgaggtagaggcggggcggctcaagttcggtggcttctatcccgactgggcaatgcctacttatcatatcatccgttttctgctttatgcttttatgattgcgatgatctatccctatttgccgggggctaaaagtggggtatttcaaggaatctcggttttcatcggattgatcgtttctttaggatccagcacggtaatcggtaatgtgattgcggggctggtcattacttatatgcgtccttttaaactgggcgaccggatccagctgaatgatactaccgggaatgtaatcgagaaaacgcctttggtgacccggatcaagacaccgaagaatgaggtggtaaccattccgaactcgtttatcatgtcatcccatacagtgaactatagcgcttcggcccgcgaatacggtctgattattcactcggaagtgaccatcggatatgatgttccctggcgtcaggttcatcagctattgatagaggctgccttgaatactcccggggtgattgacgatccgcgtccttttgtgcttgaaacttcgttgagtgactggtatccggtttatcaaatcaatgcttatatccgtgaggcggataaattggctcagatatattcggacctgcatcagaatattcaggatcgctttaatgaagcgggcatcgaaatcatgtcgcctcactatatggctatgcgtgacggcaatgagtctacgattcccaaagatgatttgaggcccaagactgataaataataaacagagccggctctttcgtcacgaagaagccggctctttcaaaattgtgcatttttcaagagagtgatttattttttccgggttaccgtataaagtatattcccttttttatcgatcatccgcaggttcagttcctttttatcaatggagcagactgagaagccgggttcggggctgcagaactgagttccctcaatcggtttcaccttgcgtgccagtgatccggcagagtttacgatatagtcgatgtcgcttcccggtacgcggatgtgttggaagttgtggatatgtccgcaaatgtacatatctactttatgctttctcagaataggatcgaggcggctctgtaagtcgttgcgttcgctctggtctttcggggtttcggcatagatcggatgatgcccggcaacgatcacccagtcttctttggcaacagtcagcaccgagtccagccaggccaactgtccgttcatatcctgatgacatgcatcgggataggttgcgctttcgttacggtatttatcgatcagaggagcagtatctatccagacgatgcggacggtggctcctttttcttcgaatgtcttggtgtagtaacgggcaggcatggtccagcggcggctcactccgctgtagtccagtacagcttgtgtgttgccccggtattcgtggtttcccagtacgggataccagtcgatcatgagttccgggtgactgtaaatcagttcaaagttggtcatccagagcgggtcgttcacgctgcgtactccttcgaaatgatggacatctccggcagccagcacaaattccggtcctatttcctcacccatagttcccattaattcggcaatcggcttttgatcgtagtagccgttacgtcccaggtcgttagcaatgtagaagttaaacttcttgtcaaacatagagtaatccttgagctgggccgaagcggttgcgacaatggagataaacagtagtatcagtaagttttttaatttcataaatatgagtttttatattgattattaatgaattgaatacgttttttcgtcagtgatgcgagaagacggttttgatctcagacccacggtgcaccgttcctttagaaacggtgcaccgttttctgatcaacggtgcagcgttttctgatcggcggtgcaccgtgggttcaacctcctctgatagccggttaaaagttgatcttaaatccggcattaatctttacaccgtagtattcagcctgcatggtgcggtcctgagtcccctgataatagcggaggggttggttcagcaggttgtttgcttcggcatagagggtgtagtgtttcgcaaaagtgtaactggcgtttacgtccagatagttcacgcggtcgtaatagcggtcgtgaaaggtgtcttcacccatttcatcgatgaaggccgatgcaaagttgtagctcaggcggaggttcagtccatttttctcaaaatagagcgatgcattggctgtatgcttcggagaacccggcaggctcagatccttttcattttcgcgtccttcgaagttgaagtcttccacacgggagtgagtgaaggtgtaagtgccataaaaaccgatacatttcagggcaggagcgataaatccgaaatcacgctggtaagagagttccatacctatcagattggcattacccgcattcttgggctggataaagcggttgtataggttgccgttgtattcgtagtttgtagacacttggttgacaatgaaatcgtctattttcttatagaatactcctgcgctgaccagaccgatacttttgaaataataatccgcactcaggtcgaagttataagaaagagtaggtttcaggccgggattacccactgtcacttcgttatccgaacgtttgatgttgacactgggtaccagggcagaatacttcggacgtgacaatgtctgagtaaacgaaccgcgtactttgaaatcctcgtttacgttccatttcatgaggagtgacgggaggaagttgatgtaactgttcgtttctcgggcagtcttcgaggtttggtctgtttcgtcgtcatacgtgcgtccggtatagctgaggctggtgttttcgatgcggagcccggtcatcagttctacgttgtccgtgagcttctggtcgaaacggatgtagcccgaacttacggtttcacgtgcttcgaagttaccggctaactcttcctgcacctgttctttgtcaaagagggagggattgttcaggtccagtgaacctacatattgtttgtcggcgtaaatgcctgcctgatatttatggtccggcatgaagtttttgttggtttgatctaccgtgttctgcaggctgttggccatgaatgcctcttcatctttcggagtatattcataaaagtctacctctttatctttggttttgcgtaccaccttggcaccgaatttcaatttgtttccgttccggaaggggagtttgaagttcatggagaatttcaggtctttttccttgatgtcttcctgttgttcggtgagttccttcaggccgaaatctttgttcagtgtcattgtagaaccggactttggtgtagccagcggttcgcgttcgttgctcagatccatgtcgaattgctgtttcttcagttggaaatcaatgtaacgttcgttcggacgctcctctgttgctttggcgtaactggcattccaatccatagacaccggtccgaacagatgctcgcctcccaatgtgaagtccatcgtgcgttggcgttccaggcgggcgttgcgattgtccggcgtaccggctttagtctgtacgcgtacagttgcttttccctcttcatccatatctttcagagtagtgcggtatcggttctcccagtcgttccggttattgaaaattcctttaaacatcaatttgtggttttcgctgatatcccagtccaaggctgccgaatagctttggcgttcacgggttacatagtaccggcgtatttggtagtcgttgatatatacgtttcctttgtcgtctttctcccaaagaaactcggtatcgtaggaacccgatggggcattctgataggaagccgataacatgacccccagtttgtcgttaaagaaacggtcgccataagtcagtcccagattcaactgtgctttctcgctgatccagttgtagcccgaaccggcagtagctgtcagcgtccgtttatagggtgaattcttggtgaccagattgatagatccgccgatggcatcggcatccatatccgaagttaccactttactgacttcgatggtctgaatcatatcggccggaatcaggtcaagttgtacgttgcgtgtatccccttcggccgaaggaatgcggttgccgttgatggtgaccgaactgaggtccgccgatgtaccgcgtacctgtccgaaacgggcttcaccctgatcatactgtacgttgatacccgaaatacgtttcagtgcatctccgatgtttgaatccggaaacttgcctacctggtcggcagaaactacatttttgatgcccagactgctcttttgtgagttgatggcacggcgctgtccctgaaaagcaccgcctattacaatttcctgcaattcgactccttcgttcagtatgacatctctttcgagtgtcttgccttcgggaatggttattttcatttctacgggggcatatcccacataagttacttttaccgtataagtccccgggttgaggttggcgaaggtatagaaaccgtttacgtcactgataactcctgtcttcaggttctcgatgtagatcgaggcacccggtagtgtttgtttggaagtgtcgatgatacgtccccggatcgtaccttgttttactacgtttgctttttcgtcggcgtagagatgaccgcccatgactgataataaaagaatggatgatactagcttcagaactcgtttcatgttttttagtatgcgttaataatttgatgcaaaagtagaggagtaagatttcgtgccctttacgatcgtttgaacgctgagtgacaaactcgttacatccatgttaccgtaaagtccccccttgaagtaacttgcgtgatacgttttgtacgctgagtgatagcatatccctgaaaaaatccgtaaacttgcactcaggttttccattattaactaacaaaataaaactatgcatttgactacaaaattattttttaccgcaacgctgcttgccggtaacctgtttgcttcatttgccggcgacgttacgctgaagataacgaagaagtatatcaaccttcctgtttcccaccaagtggaccggaagaaaatgacattcgaggtaaaaggtactccggaacgtaacttcgtaatccgtctggctgacgagaaacccgactactgggtattctgcgatgtctcttcctggaaaggaaagacacttcgcatcagctatgaaggggagtctgccggattggagaaaatctatcaggacgatgtgattgcggggcaagatagcttgtatgcagaaaaaaaccgtccgcaatttcatttcaccactcgccggggatggatcaacgaccctaacggactggttttttacgaaggtgaataccatcttttctatcagcacaacccttatgaacgggaatgggaaaatatgcattggggacatgccgtgagccgtgatctggtacattgggaggaactgccggatgctctgcatcccgatgagctgggaactattttttccggttcggccgtgatcgattatgataataccgccggattcaataagaaaaacgaaccggcattggtagctgcctatacagtggataatccggagaaacagcggcagtgtatcgcttacagtctcgataaaggacgtacgtttaccaagtatgaaggtaacccggtgatagactcgaaagcgaaatggaacagtaaggatacacgcgacccgaaggtcttctggtatgctcccggcaaacattgggtgatggtacttaatgaacgggacggacactcgatttataattctgccgacctgaagaattgggaatataagagtcatgtaaccggattctgggaatgcccggaattgtttgaattaccggtagatggcgataagaatcacactaaatgggtgatgtacggagcttccggtacctatatgctgggctcattcgatggacagacgtttaccccggaagccggcaaatactattattataccggaagcatgtatgctgcccagacttatagtaacatacctgccagtgacggacgtcgcatacaaataggatggggacgaatctcacatgacggtatgccgttcaatggaatgatgttgctgcccaacgaactgacactccgcactacctcaaagggagttcgtctgtttagtgtgcctgtcagagagaccgagcaactgttccagcctgtaggaaactggacttcacttagctctgatgcggctaatcaacgcttacaggcgttctccggtaaggattgtttgcggatcagaacaactatcaaactgtcacatgctaccagtgccggactgaatctttacggtcagcctctggtggactatgacatgaactccaacctgatcaatggagtgttctactcacctgacgaccgcaccagcatggaattgacagccgacatctacattgatcgcacttccatcgaagtctttattgatgggggagcctattcgtattcgatgaagcgcagtccgcgtgagggcaatcgtgaagggctccatttctggggtaacaacatagaagttaagaacctggaagtgttctcggtaaagtctatctggtaaagtcgacggatagaaaggggaagatgtaggcagaggcgtgtcatcgttcaccacagagtggcacagagtcccgatacaccttgtcgttcattttttccggaaaaggcgtcctgtttctttgcttcaggacgtcttatatatgtattattaaggaaaacgcaacatgaaaaacacaaatctattccgactggcctttctgctttttgcaggtttatctatattcttgtcctcttgccaacccaaagaggaaggagacaaaaagtacgtcattggtttttctcagtgtacctccgattcctggcgcgaagccgtattgctcgaaatgcagattgaggcctccaattaccgcaacgtagagttggtggtatataatgctatggacaacagcagcagacaggtatctcagattcggaaattgatttcccagaacgtggatgtactcatcatttcgcctaacgaggctgttcccattaccgatgtggctgtagaagcttatcggaaaggtattcctaccattattcacgaccgtaagatacaatcggatgaatatacggtctctatcggtgccaataattacaacattggttctgccattggtgaatacattaacggacaattgccccccaactccaaaatactcgagatatggggactggaaggttcgtcgcctgctatggagcgtcatgatggatttatcgatcatcttcgtagtgataagaattttcaggtgactcaggtttttggaaaatggcattataacagtgcttatgacgctgtcaacaggttagctacttttgccgacatcgatctggtctatgcccacaacgacgtgatggcgcttgctgcccgggacgtcatcatgaagcgtgattccgtgtccggcaaacgtatccggtttataggtatcgacggggtatatggtgacggtgccggattgcaagccgtagctgatgagaagttggaagcctcgttccagtaccctaccggaggtgctatttccattcaggtggccatgcagattattaatggagaaaaggtgaagaaaaactatgtattgaacactgccattatcaatcgggggaatgcgaagaccattttggtacagtccgaacaactcaaccactaccagaaaagaatcaaccggcagaagcaggaagaagataatttattgtctcgtttcaagttcctgcgcaactctactatcctgattttggcattgatgttgctcattatccctttgctgggatatgtaatgtacatgaacctccgggttaaaaataagaataaagaactgcatgataaaaatcagcttgtagaagctcaaaaagaagaactggctgtcaagaatagccagattgagaatatctccaaccagaaactacaatttttcaccaatatctcccatgaaatccgtactcctcttacactgatacttggaccggtcaataaattgataaagaactccaggctcgatccttctattcaagaagacgtggctttgatgaaacggaatgtagaccggctctacaggattgtcaaccagatactcgatttccgaagaatcgataacgataagatgaaattgattttgcgtcaggtagatttgatcggtatggtaagggaagttttcgactactttaccggtattgccgaagagaagcagattcattaccggttctctaccaatattgacgaactgaacatttacatagatgtcaataagatagagcaggtgttggtaaatatcatttcgaatgcctttaaatattcggatagtgggggagatatttctgtccggattaccggtgaagcggaaactgtcctgctggaagtggaggatcacgggcggggaatttcaaaagagagtatggaacacctgtttgaacgcttctataccggtaataagactttcggtacagtaggctttggcattggactcaatctttcaaaagagtatgtcgacctgcatgacggtgaaatccgtgcagagagtcaacccggagagtatactttattcagcgtccggctttataaagatatcacccactatacacacgagtatatactggaagagaccgatcgcttcaatctcagttatcacgatatggaggtggatacgacggtggtcaacgaaatgctttctaaaacctatgattaccatgtcctggtcgtggaagacgatcccgatgtacgatatagcttacggaaagagctgtccgccaattttcaggtagaagtggcaggtaatggtaatgaagcattggacttgttgggacagggtgatgcttttcacttgattctgagcgatgtattaatgcccggtatgaatgggttccagttggttaaccgggtgaagaatgatcttgctttcagccatatccccatcatactgctgacagccttgtccgaagacagccagcgcatctacggcattgccgagggggcagacgagtatattcccaaacctttcaacatcgacttcctgaaaatacgtatcatcaacatgatttcggaacggcagaagatgaaggaagcttatatgaagaatctccaagccggtacgatggacaatgtggaggtatgcaaactgatgaaggtagacgagttgttcagggacaagctgctgagcattgtcgacacgcaatatgaaaactccgatttcagcatcgaagacctgagtgaacatttgggattgtcgagggtgcacctttaccggaagatgaaaacactgttcggggtttcccccaccgattacctgaggaattaccggctcaataaagcaatgcttttgcttaaagcccggcagtacaatatcagtgagatagcttatatgaccggttttacttcgcccgcctatttcactaaatgtttccgtacactttatggggtcactccgacagaggcaatggtggctaactgaatatgggaaacagatcgttctgtttacgcaccgcatgcaactctgtatacggtacgtatatagagtagtatacgatccgtagataatgctgtatacgcattatacaaaattgtcccgcattgaattttctcaatgcgggacgatatgaaatgtgccggtatgtttactatcaggccgttggatcatctacaatatcgtcatcaccactcccctgggatgcgccgatattgataaatcgactgacggttctcggcgtttttagcattgtctgcgaactgtggcagtattgtgtagtcagtcgcagctcataggttccgtctttcaagtcggcaggaagtagcaccaatacttccgaagggttgtttactgctatcatatccatcggtagcttcgtttccgtgcctttttcatcaatcaagacgatacctacggcaggatctgtaccagttactttaatattctttccttgcagacgatagttacgtcccgcagttgcactaccgtccgtagcacgggtggcggcgtcttcaccaccgataaaataggctgaatcgcctttggctcctaggatttttacgccggtccgtgcgatagcttcacgtaaatccttatcctgattgaaggaaacatagatagaatttttctcgggattccatactccgccgtctattaccccgcgaaactggggtacggcacggaatagccccgtattgacagagtatccgttcagtaccaattccgataccgtacgctgaaagagatcgacggcatgctttaa

SEQ ID NO: 5050 - DNA, 12862 bp, Unknown
  gut microbiota DNA sequence
cgtcaggttcccggcactttctaataccaggattttgtcttctttgttgtcggtggtcacggtattgtccgcaagccagcctttgagttcggttttcatgatttgttaagtttaaaagtgaatattattgtttggtgccttttacgcaacggacagaatgtccgtcacctttcggaccattagcttgtatttctatgctgagtgtagatcgagcatcaagaacaagcctacgcccacaattattactactattattatcactactccaataaaagccgacttctccgacaaacaatgtccctactgtaccacatcctccttctcctcttgctcctgctatagtgagaaagattcctttgctgttattcataaaccatacgcccttattagtcactattttatttgtacatcgagaaagtttagttaattcgtttatcgatggcgttcgccatcctgaaccatatgtcgtagggttaagtcttgcgcatggatctatattgtttctattataatcttgattccaagtataataatatccataatcagttgaagttgtccacacataattattactcgctcctgtacttttcagattcccgtccgcccatattaatttagccagatccttcttatcctgagccgtacacccgttacttgtaaggtttatatcactctccaacacattgattccgggaccttttttaaactgtatttttagtgtatagcttttcccttccttcaactgtacgctttgggtggaggtgatttcggtgttgttgttcacaatccgtccgcctaccgtcagtgtattgaaatgcactgttatcgttctggttcctgcaaacggaaccatgcgtatggttgtactcagagtcgtgttcggactgaatgccgccgtattattcgtgttggcggctaccacattggtcgaaggaccgatcttccatgatgtggaatttccaccttgctttacatatacacccgtgcaattggtgatcgtattactcggaaatccggtaggactgatggtaattgtcagtttgcacaacttctgattgaaactcaccggaagattgtggctgagactgtttacattcgttatatctccggaatcgaaggtcatgaagtccttgctcatgtcagggatagacactgtactgctgttgtaggcatacgtgggaggcatatctcccaagtcggcagtggtattaaaggagtagcccaccacacgtatcgttccggagcgtgtcagcaatttcccttgtttgagtacaggagtgcccgtaccattggaggtgtaatcggcagccgactggaagacatagttatttccggacttccagaaagcaatcagccggaaacgaactcccacaggcactgttgcacgggtacttacacggggcagggtatcttccgtcagttccatcgaggctatccggggaccttcgtagtccggttgctctcctatgcgtgtaggtgagaaagcttttacccccacccattcggcgatcaggggagagtggctacgggtcgaagcgtcgttaaaagaggaagaatgatagtcgttgtcacctgtcagactgatatggataggaattaactcgtcggcagtatccccgctgtcagcagacgggggagtcattctgtcatcttccgcacatcctgttatcgaaaggcaaaaacacagccataaggctttaccgagatactcttgcataataaaagttctattcatatactatgatattaaagtgaataatcgtatcaaagacgcattgcggacctatacatcttcgtataagtccggaaaggctgtttgataccacttttattatgcgtaagtttgtgtattacaatcagatatgacggtcttgaatacacaattgtgtttcaaaagacgtacgtcttttgaaacacaatttttactctccgcactaaatgcaaggaggatagataaatgactgataattaaaacgatgtagaaaaatttgcacagatggaaaaagcgccttatctttgttgcatcagacgtacgtcttttgaaacatcgtttgaaaaactaaatctgtattttataagtctaatttcctgtttaacaaattccatacctccactacattacagaacttatctatagcacgaaacaaactggaaccggtcaaatattcattcaatgtcagattctttgctatagacaaaacgctttctgtccatagcaaagaatcttgtttctcatttcgttcaacatgtatggaagtgccaagttatcatgccttttataatcttgttatcatgccttttataattgcatgtgacacaatattgccctcatgctaatgaatcaagtttgtttaataggttagtttaaaagtgaatattattgtttggtaccttttacacaacggacagaataaccattaatttggagagcattccaagcaccagtatcagtgaccactatatatgttgttccaaaatccagagcataacaagtatttttacggttccctagtgttgaagttagataaacaccactagttcctgatcccgttccctctaagcccggtccagtttccggtcgcattcctgctgcttttaaaaatagccctaaacggttattcataaaccacatacctccgttataaactctatctgtacatcgtaccagtttttccagttcatttttagttggtgttcgccagcttgtaccataatatgcagtgtttagtttagaacatggatctccggtgcttccatcataaagtttattgaaggaataaaaatgtccgccttctgtttgcgaagatgcccacacgtaattaacatttcctgtactcttcaaatttcctgtagcccatctcagctttgccaaatcattcttatcactcgccgtacatccgttttgtgtcaggttaatgttacttgccgccaattgtatccccaactcaaacttcagtgtaatggtataactctttcccggcagcaactgtacattctggcttgaggtgatattccggttattcgcattgaaataattactaagtttcaacgtaccgatatgcaccgtgattgcccgggaacccgaaaaaggaactaaccgtacagtggcagtcgaattattggctatattgaatgtaggtgtatttccggtattggcacttacattatttgtagagggacctatcgtccaggcagacacattgccgccctgagaaacgtatacccccgtacagttggtaaacgtgttgctcccaaactgcgacaaggagagtttaaccgtcagcttacagagcttttgcgtgaaactaaccgacaggttgtggctgattgtactcacattcgctatgtcccccgagtcatagaccataaagtcactgttcatattcgggatagtgacggaagtactgttataagtataggatgaagggatcgctcccatcgctgccgtactattgaacgagtatccgatcacacggacagttcctgctctggtgagcagatttccttgcctgagtgtgggagcggaagccccgtttgtcgtaaaatccgcagccgactggaatacgtaattgctgcctactttacggaaagcgatcaaccggaaataaatgccgttgcccaatgtagcggcacgggtagtgacctgtggctcttcgcggagcgtcatccgtaccgctgaaggcccctcgtaaggcacggcagcgggtatggccctgctggcgggtggctctttcaccggcacccattcgtctacaagcgttcttcccccggttgtgtcgggagtatcaacatggctttccatatagctgccatcctcaacccggctgaccgtaacaggaatcatatcctccccgtccggttccgggctgtcggggttcacaacattgtcgccacacgatgttatcattaaaaaagccgcgtacagacagcatgtgtttaacgcacgaaagcctacatacagaagttttgtcttcgtattcataactcaaatgtttaaaaatgaataaaatagatcatactcagcaagaccttcccattaagaatgggcaggccggctatggcaggctgtgaatacagcttttattttgcggtaagtttgtgtaaattagacagatagaacgactgttgtgtttcaaaagacgttccttttttgaaacactgttttggctctgtgcactgaatataagaagaagagataaataactgattattagaataatgtataaatatttgcacagatgaaaaaagcgtcttatctttgttgcatcagacgaacgtcttttgaaacattatcttccttttgataaaagacaatctacttcttacaagaatcatttttttccaaatgcttcattattagttttatcctttcgttacatcagcgggtaaccggattgatagtctgccggtatttttgccggatgttaccattcttatattatttgtttcctgcgttatatcgcctctgtactattctggctaaccttgcatcaacaatcacacatcgtataactactataaatttagaatcaaaatgaacagagagaacaaacctttattcctatatacctttatcaccgtctttggtggattgattgtgggattaaatatggcaggtatttccggagccgttccttttttacaggaacaattcatgttggatgatatggctttgggattggtggtaagtattctgaccgtaggttgcctttgcggtgctttgctgggaggaggttttagcgaccgttatggcagacagaaagtcatgttctcgtcagctgtcttttttattgtttcttctttgggctgcgcattatccggtaatttggtttcactgctggtttttcgcctgatatgcgggctgggtatcggagtgatctctgccgtagcacctatttatatatctgaaatatctcctgcccggctgagggggacactggtttcctacaatcagttggctattgtgataggaattctaattgcttacattgtagattatatattgctggactatgagcggaactggcgcctgatgttgggattcccgttcttctttagtgtggcctatctgttgttattgggtatattgcctgagagcccacgttggctttcggctcgtggaaaagcaggtagagccaggcaggtggccagtaaactgaacctggaagccggtgagatgaccgtgtccgacacaaacacacaagaaggtagagataggataaaggtaactgaattgtttaagggtaacttggctaaagtggttttcataggttctatactggccgccttacagcaaatcacgggtattaacgtcatcatcaattatgcaccttccatcttcgagatgacaggtgttgccggggatattgcccttgtgcaatctatcctggtgggagtggtgaatctgctgtttaccctgattgctgtgtggctggtcgataaagtagggcgtaagattctgcttctttgcggaagtctggggatgggcatctcattgctgtacctggtttacacttttgtagttccggcagccaatggtatcggtgccttaatagccgtgttatgctatatcggattctttgccgcttcactggcacctttgatgtgggtggtgacttccgagatttacccttctcgtattcgtggaacagctatgtcactctccaccggaatcagctggttatgtacttttctcaccgttcagtttttcccctggatactgaataacctgggcggatcggttgctttcggaatctttgccgttttcagcattgcagcattcgcattcattttgttttgtgtgcccgagaccaagggcaagtcattggaggcaatagaaaaagagctgggagtggataaagaggctgaggagaatgtgaaagaagaacatgctttctcgaaaatataataaacacaaaattggatataagtatgaaacaaagtaaaagaaatctatggtggtccgtctgtgcaggactcttgttctgctcgtggggatgtagttcccgggtgtcggataagccggtaacgctggaaacgttgttggacgaaatggtatcggtggaggaacaggcgctgtatccggttccctcttatacctgtcgtcaggaaagtagctacgaccgtgcatcagtatcacccgattctgccggttggtttgccaatagtgacgggtttggaatcaaacgggtagatacggtggcaggccgcattgagaaagtgatgttcgacgaagtcggacctggagcgatcactcgtatctggattactaccattgacaagcggggtacgtggcggttttattttgatggttctgatcaaccgggctggatcattccggcttatgacctgatgcggatcaatgtacccggattgggaaagggaatgttacaggcacacaccagctatacgcccgaaggtaaaggaggaaataccttgttcctgcctatcccttatgcccgtggatgtaaagtgacattcgaagacgagccgggggtgaatccgactcccaagtattatcacatcaacttccgtaaatatcccgaaggcacacaggtagagactttttctaaggaggtagtggagagagcggcacagaagattgccgaagtagacaaccgtcttcttcagccggtagccggccgtaaaggtgagatcctccgggaggagaagagtattctaccttccgattcattggtcatccctctgcctgcaggcgaaaatgcggtatacgaagtgaagttcaatattcgtaccgataatcctgaacaatatgcccagttgatgcgggaattggtgttcagtgccgggtttgacggaaagcagaccgtatgggtaccgttgagtgacttctccggaggtggtatgggtgcccccaaggtagatagctggtatctgacatccgatggaaaaggaaatatctccagtcgttggttgatgccttaccaaaaagatggtgtgctgaaagtgcttaacctctcttcccggtcggttgctgctacaatggaggtgaatgtagctccattaaagtggaataaagatcgttcgttgtatttctatgcttcatggagacaggaaaatggtatctatatccacgataaacctgaagaggccgaccaatgtgtagaatggaactttgctaccctgaaaggtagaggtgtctacaaaggcgatttactttcactttataatcatgccccgttgtggtatggtgaaggtgatgaaaagatttgggtggacgacgatactttcccatcacatttcggtacaggcacagaagattactacaatagttcatgggcaccggtagtgcctttctatactccatttggaggagccccgagagccgatttggaaagctctcacggttataatgctttctatcgcacccgccatctggatggtattcctttcaataagagctttaagttcgatattgaaatgctgggatggaaacgaggtgaggccgattatgccactactatttattggtatggcgatccggaggcacaggtatttggaacttcaggtattgaagaagcccgccggcagttgctgcctgctgttgaggcttcggcagactgaaaaacatatgatagtattatttaaatttttaattaaatctaattggtgaatatgaaacatgaaagaccttgccttgtggcctccggaagtgactggctgcaagaagtgttgagaaggcttttggtctgggtggttgtcttgtcctcggggacattgatggcatacgcgggcaatctggatatcagccagacgaaagtcattacgggtacggtgaccgaaaaggaaacaggtgatccgttaattggagtaaacgtttcggtaaaaggtacttcgaagggtacaattacaaatttgaatggccagtattcggtcgatgtgaattccgataaagatattctggtattctcgtttatcggaaaggctacacaggagaaagcagtgaaaggattgagtcagattgatgtggtgatggccgatgatgccacgatgttgggcgaagtagtgatccagaccggttatatgacacagcgtaaagctgatcttaccggttcggttgctatggccaacacttcggatttggctcagaatccttcgactaatgcattgaagtctttacagggaaaattgccgggtgtatttattactacagatggtagccctgggggaaatgcttcgatacagattcgcggacttacgtcactgaatgcgcagcctaacccgctgatcgtacttgacggattggcaggagactataacctgcgtgatatcaacccggcgaatattgaatcgattcaggtgctgaaagatgcggcttcggccagtatttatggttcgagagctgccggtggtgtgattatcatcgaaacaaagaagggtaaaaagggtgaatcgaagattagttacgaaggtcgtgtacagttctctaaatgggttaataaacccgacctgttgaataccgatgagtatggacgtgccatctggcaagcgtatgcaaacgacgataaacttggtgaaatcaagcaaagcgtccgtttcttcgattatgactggagttatgacagcaacggttatccggtacttaattccgtgaaaccggtggaatggctgaatacagctcagactatgcgctcggccgatactaactggatcgatgaaatatctcgtaccggagtatcgcagaaccatcagatttcagtatcgagtggtactgataaatcacgtactttcttcaacctgggttatgaaaacacagaaggtattcagattgaaactttctggaaaaaatattcggctcgtttgaactcggagtatgacttattgaatggtcgtttgaaagtaggtgaaaacctggagttgaactatatgaattatcgtgaagccaaccatacacagcttgctgcaaatgaaccccctatcattcctgtatataccgaaaccggtggttggggtggtgcttctctcgatgtgggtatggatgactatcgtaatccggtgaaagaccttatcctggggaaagacaatgtcaataagttcctgaaggtaattggtaatacgtatgccgatttgatgattatcaaaggcttgaacctgagaacatcattcggtgtagattatcgtggttcatattatcgtgcagtcgataaaaaatggagtgaagcagacggttcgggccgtgatgaaaagttcaactatgtccgcaacgatcagactcatttcctggaataccagtggaccaaccagatcaactataacgggcaattcggaaaacactcgataggagctgtagtcggaatggaatttacgaaagctgaaagtgaagcattctatgcacgtaaagacggtttgactctggaagacagagactatgcttttttaagttcggctactggtgacaagattacagaggctaccggttcgggtgatgcttatgctctgttgtcatacttcggtaagttcaactattcgtatgcttccaaatatctggcatcggcaacattacgttatgatggttcttccaagttcggtgctgataaccgttgggcagtcttcccggcattttctttgggatggagaattaagaatgaaccgttccttgagaatgtagattttctttcggacctgaagctgagattcagttggggacgtaatggtaactcggccattcctagcggatacctgcaaagtagttatgtagccgattataacggaacttcttatgctatgaacggacaggaaagcggttctctacagtctggtttccgtaaatatctcaccggtaattcgacattgaaatgggaaactgtaacacagaccaactacggtatcgattttggtttcttcaaccagagcctggtcggaacaatcgattacttttataagaagacaaccgatatgctttatttgcccccttatatcggtgcattcggtgaaggtggagatacttatgtgaatggtccgagtatggaaaaccgtggagttgaaatcttgctgacataccggaacagtcttccatcgggatttaattatagcattacgggaaacatcgcgactttcaagaataagcacatgtatttacaaccgattattactcaatattttatagataataagtcagaaatatggttgttatttttaattgcacattctaaaaggtgaagatttaacgcttttattgattattaactcaaaaaggacatcaacttgggtcgtttcttctcttttccttgctattcgtttccgatattccacttttgttttggtctatctcatatgtactgcaaaggtattgatttttgtttgatattgctccttgcttgctccttgtcgtagattaattttcacacaggaatttttgttctctttctataggggcttgaaacaatccatttattggaaacaattaaagacggagctggtttgccccagtgctttttaagaaacagggcaattattttatctccacaaaggctcttgttcccaattatgaggaaagcctaataaacgagttcttactgatgggtatttcgataaaagctgcttgaaatctgcaacaaaagtgttgcccatagaaatggagttaagccaatacaccacatagcagagttgcggataaagtgtttgttcacggaacgagaaatccgtaatccatgtgtttggcatacgcataggcatcattggcttgacaggaaagacccgatttgacagtcttgaatgatgggcgcagcaattacgaagtacgggtctgggtacggattaaaaggctaagtgattatttccagtcatttagcctttttaattatctaatttttccccacattttccccacagctgtctatttatatattttagaaacatatttttccgtaaagttatgtacctttgtcggcaaataaagatattctcgtcaaacaaatataaataatataaacatggaaaaaaacagaaaaaaacaaatcgtagttttgagtatagctttagtttgcattttcatcttggtattttcattgttccataaatcagcgacaaaagatagcgcaaatcctcctttaacaaatgttttgactgatagcatttctcaaattgtctcagcttgtcctggcgaaattggtgtggcggttattgttaataacagagatacggttaaggtcaataataagagtgtttatcctatgatgagtgtgtttaaggttcatcaggcattagctctttgtaatgactttgacaataaaggaatttcacttgataccttagtaaatataaatagggataaacttgacccaaagacttggagtcctatgctgaaagattattcagggccagtcatatcattgacagtgagagatttgctgcgttatactcttactcagagtgacaacaatgcaagcaaccttatgtttaaggatatggttaatgtcgctcaaacagatagttttatagccacactcattcctcgttcaagttttcagatagcttatacggaagaggaaatgtcggctgaccataacaaggcttactctaactatacatctcctcttggtgctgcaatgttgatgaatcgtttgtttactgaaggtcttatcgatgatgagaaacaaagtttcattaagaatacgttaaaagaatgcaaaacaggtgtagataggatagcagctccacttcttgataaagaaggggttgttatagcgcataagacaggttcaggttatgttaatgaaaatggtgttcttgcagctcacaatgatgttgcctatatatgtctgcctaataatatcagttataccttagcggtatttgttaaggatttcaagggaaatgaatcacaagcgtcacaatatgttgcgcatatatcagctgtagtatattctttattaatgcaaacttcagtaaaatcttaaactgcacttgctttgataattaatgataaacaatctaaaagcactctaatcgttatcggagtgcttttagattactaatcaaattgcttctattataatttgaatcctctactttttctttcttcctgttgcggcactcttgctccatatctaagcctgtgccattgctccctgaaccagtcggcaatcggcttcctgtttattgtcaggttcagcctgctttcatcgtcagggtcattttccacccttaaaatatcatcctttatatcaaagttccgcctgtgttgctcggaatagattttaccgctacatttcagggcttcttttttgactataagactttcagtcatttctttagagaatcccagcatggcacaaaacttttccatgcgcagcatttccctgaacatcggaaaccacctgaaagccttgtctatgattctggcgagccgtgacagttctttttctttcatgtcaagttcctgcctgtgcatttctctgagattgtggatttgcgtatcatgctgtttctgcatctgctgtacttggctctgcaatttttcaatattggtgttccgttttgaaacctcgtcttgcagtttttcgttggcacgttccagttctttcagttttccactcccgaaaagagaagcaactccactagttatggctgtcgctgccgtggtggctgtcttctttaacttgtcagtgcgtatttctgatttcacctgtttcagttcctgctcggcaagatttatctgttcttctttgtgccgtttggctgcatccatgcgttgcagttcagctttctgcttctcaatgataaagtcgttccgttccagatgctccttaccagtgacagcctttgactgcccgcgttccatcagcaggatgtcggatgcaagggtctgcatctgcatcatgtcatcgtcattgagctttcg

SEQ ID NO: 5051 - DNA, 2489 bp, Unknown
  gut microbiota DNA sequence
gacacttttggcagtacgagtcattccacctcactccaaggatacggattctcttgcacatccttcaggcgttccatcacctcacgctcctcttccgacaactctctgtcctgccacgtatcgatgatagtctgagcttcccgggccaattcctcatcgaaaacctctccgtaacaataaaccagcagttggactttcaacagagaggcaggcagatgttccagtacatcccagcaacgatccagaatatgttggatacgctcctccttgtcaccgttattatagagagtcgcattatatcccatcaggagcgacagacacaaccgggcctcttcttcatcactatcaccatgcttgtcgtacaaagcattagcctgagaaaaaacatcacgattcagacgggtgaattgatcactgtagatcggccgaccgtccatgcccagatagcaaagttcatgagcagaagcataaagagcggagatttctgattctaaataattcatatcttgttatgttatttttcggtgacaggttcgaccaatgaaggatggacaaaggtagtagcaacagccataactccttcgatggtgactacaacacgacggtcattgcggacacggacaaactcgccctccaccccctcgaaaagccccccggtgatacgcacacgggtacccttgcggatgttcaactcagaaggttcgaaataaagcagggattcatcataattcgcagagacagccatgaaattacgcatttgggaatcaggaacgatgatgggacgatgatattcacgatccataatgtaacggataggaagcgtggcgctcctgctctctttgatggcatcgatacaactacgcgaggaacggacaaaaaccagattatgaactgcgggaacaagcttacgaacccgacgctcgtttttaatggtatattcgtagtgcatggggatgaaattctcgatcccctccgaattgaggtactcctgcaaagccaattcacgcccgtaagtgatacgcaaggcataccagttcaaagcggaagaagataggatagattgagagcgctccatcgaagactcgatagatgcggatgttgtcatgtcgttcacgtcaggatgttctttggggacaccggagtagcgaagcatacctcccggtcaagttatgtaatgcggattttaatgaaaaattcagtgcatccatgttatttaatgaccctccactatcacagaaggagaggcagaaaatagttatttattataatagcctttaaacgagggcattgaaaacaaaaagtgtttcaatagacgttcgtttaaaaacacatgttttttgtatataaatcagaagagaacagaaaacaaaatcagacagataataaactgttttttattaattcataaacacctatggtttaatatattaaaacaatatccaaaggcaaaaaaacattttttttattaaacattttgtagttctaaaaataccctctatctttgcgttcaattaaacgaacgtttattgaaacactcacttttttcattaatacaacattatatatcagataattagcctatcaagagcgttcattccctcttaaattccacttttatttgcctaccgataaattcctttctacctttgcaacatattaacaacatttaattattgattaaataaaaaaatcatgaataaagaaaatgaattattacaggctgtgaacaaaagtgtaaaaaaacgccaacactaaagcacaacctcctatcacagaatctattaaagaaacaagaggcagaaaaacaggagcgcagataccgggaattatctccaacaatgaaggagttataaaagcgctgatagaatcctacatattggacgcgaaagaacaaaatatcaagacatgcaaagattcgttggcacgctacatagaggaaaaagaactttttggaaaaatgagaaatggagtattcaaaccattagttttcagcacaatcaggaattacgtcaacgaaatctggaataagatggaaagaaagaaaaagaaccaagaagaaaagcgctgaaatacgtacaatgaattttatcaaaccggaatacattcgatccgacttacctttggggcgataatttatctattaaccctttaaatcatatacgtatgaaacagaagaaaagaccggcatcacaaactgaagccatgaaactaagatggaaaaaacggattgtctttgagaaaggatacactgaaatgtgtgccgaatggatggcggagcgcctggaagcgttgaccgaccatctgcaatacgggcacgcagccatcgcttatcagaagcagaacggagacttcaggttggtgaaagcgacactgatctactatgaagcggaattccacaagaagtatgatcccacaaaaatagaaggcgcagtagtctactggaatgtggacgaacagcgatggacgacattccaggtggagaacttcat

SEQ ID NO: 5052 - DNA, 107925 bp, Unknown
  gut microbiota DNA sequence
ccaccacagattacacggattttcaccgatgaatgatttctattttgaggaatcaagtgaaaacgtctttgggaatccggggtaatttgtggtaaatgtattattgaaagtacaaacaactaatctaaaaaaacaaatatggcaacaatatatgacggaatcaactatttcccagtgggcgtgaacttcatggaagagaacgcaatggaagtgatagaagctaaatacggaataaagggctcggcaattgtactgaaactgctgtgtaagatatacaaggagggatacttcatccgttgggatgaagagcagtgcctgatctttgccaacaaggcgggaagggaagtgcaggccgctgaggtgcagggcatcattgagatcctcttcatcaaagggataatggacaaaaacagctatctggaaaacggaatactgacctcggaaaacatacagaaggtatggatggaggcgacaaagcggagaaagagagagttgtcggaactcccctacctgatggtgaaaacggaaaaggaaaacgataaacccgaaaaggaaagcggcaaaccggacaatgcatccacacaacaggaaattgaacaacccaagccgcttaaagaaggaaaagcagctgtcggcacaggagatgtagccgttagcccgggaaatgtagtacacgatgtagccgttaacgcaaaaaatgcatgcaattccggacaaagtaaagtaaagaaaagtagagcaaaggaaaataaagaattacccccctcagctccccccgaggggaaggaggaagaaaggaaggaggattctgtttctctcccgataccgggatacgctttcaatacaatgacacacaattatccgggactgacggatacgctccaaagattggggatcaacgaggtaagcgaggtaaatgccattctcaggctatcggactatggaagaaagggaacgacggtgtggcggctgattgccaacacttgctggagtgacataggggcaaaaggaaggtatctgatagcggcactgaacagggcaaaaaggaaataaacggatagtgcaaatcccctgtgtatagttgacaaaaaagcaagtatatcggttccagcctgcggagaccttcagtgaggcaaagaagtaaaaatcaaacttaataagctgaaatacaaaccattcaaagttcaaaacatctgtcagtaaaagctttgttttaacacagagttaaagtttattctttggatgcaaataacaagtcttttaaatgcaaaaggcttgttatttgcacacaagaataaaaatggctgagaaagggagttaacaatgttaattgttacgatattattctcacctaaggatatacccttgttgcaaaaacattttccacacctccaacaaatacctacaattaggtatttgttatcttgcccaacattttctgtaaggttaagaacttaaattaagttgcattataatatatttgcggcaaatacattagatcatttataacctaacctaaacattatgaagtattttgtaccactctttctcagtctattttttttagtttttatatcctgtggcaatgaagacaatgcttgggataataatatccctattattactcctaatgaacaatctgattcctcaagactattaaagagccaaataactgacatcattaattattccaaaatcaattttgatgaaaactttaataatacagaactttataagaacttgattttaagccctaaatgggaaaatgtttctatggttcttcagaaacaagacacactccatttatgtgttcctctgctagcacaggccaatcctgaacacaattcctattatctatttatttcaaatatcaaatcagcaaatattataagatttaccatcattgggctaccagaaaatttttgggatattataaatgctcctattaccagagccggtattatagatgccgggtggattcccgaagttacaattcttggagatttatgtcgacaaatgagtcatatctgttcagatccatatgatgaagcttttcttgagttcctacacagcaaatggcttaaagaacatggcaatgaaagttcctcagatagttcttcatctggtggcgattatagtcggctgactgaagcagaaaagcgcttccttatgcgacatccacaagtaattaaaaaatttcatgataacgcaagaaaagctagtgaagcagctaaaaaatttccaggacagcacaatggagagggcgatgcggtaagacatgtttattggagtgctctcaacacgctttcagaaaatgcaaatctggcaaaagagttcggtgatgcacatgaacaaaatccgggacaagatattgcagagaagaatatggatctatttaataactccattggttatcaactgggagatctagcaaaacaaaataaatggtcagaagaacgtttatttaaggaaataataaaatataaaaatgatggaaaattacaaacaaaattacatccataagccatatctgtttttagcaatcttattttctttgcttagttgccaaaaagaggtggtatcaaaggtaactttcgaaagaaagttatcaggaataaaaccagaaaccgaatttagactcgattctctgagaaatgataaatggcaaaaatgctatattattccaccgtatcaacagtacaattctgcattaaataggataaagttgagaaagcatgatttaaataaaataaaggaaaatgcaatctctgatggaataaatacatttgtgtttataaataacgatggatcaatatcaatagaaacagtttcaagatctatcattgatattcaagacacattgttagactccatattccttttttatcccacaacaataatgaaaatggatagtaaaagaaaaattatagacataaaataattttttaagggtagttttacaaaaggactagctatttttcacacttagagcctgtctgaaaatggttgaaatctttttttaacgaagtttccatatcagtcggataatttctttctttgaaaacagatacctacatggcaggcccatactcggagcatggcaggatcgagtcaaggacacgccgcatattccgtggggaggaacttattgccgacaaggataaatggggtggaaacttgactgtcacagaaatacttacatctactgaaaagaagtatgacggtaagattacatcatattttcgttttcttgcttgcaggttcaacacttttattagatattgccaccctatttctgttaaataagtctgatacatatttgttttgtgttcagtcacttctaataaagtaaatattaggctgatacgaaaacattcataaaattatatttcaaatattttaaaacaacctcttaattatgagaatgaaaagtatttctatttatttttttactatcgtctgccctgcactttggggatcatgtaaagatgaaacttatccttttattgagcaaggatcgcaacaaacagtctttaaagaattgaatcgttttgagagattagcttttaaatcatcgcaagatttactttctgcaatacaaatgggggaaaagagtacgagtaaaataggtcaaacacgaagtattacttttgagagtttattatcaccatgcaacaaacttacccgtgcgactggtgagaattattatgaagctcttggctacgatacgctagtacctaacaaagctttcgctgcacttttgaatcccttgggagaactacaagtcaatgatactatttataagataaatcataatggtacctacttttttcctaaagaaaaagaaacccaatttcgtaatgtatacaagatggattctttgggaattctggtcggtgataaattatataagttatctgatggaatttaccgttacaaaacatttcctgatagtatcttagaggaagaaatagatttgcctgatgatagttggaatactgaggatatttcgactagagcgtccgtttctgagcctaattataatagttttcccaaatttaatgcagataggcatacatggttaggagggattagacaaggactctttggcaacgataaatactacaacgtaaaattcaataagaaaagacgagtacggggaagattatatgcatatcattatgttgtatattctgagtcaggtgttaccggaatgatgcagaagaagaattttattggatggaccaaaactaaggctgatgaattacgtatcggatggaaaaatatcatattggtcactaagattgatgatccttcacttaagggaattcccaaacaatctatcccgatcgttggtggcattacaccggctcaaataccttcaatcggaaaaggtaatcttcttgacctgtatgttgctgaggtagagatgaaagatattcttaatgtcgtgggagaaggcctcaaaattttcctaaaaaggggtaattctgccataggttcagggcgtaaacccaccgttcatgccgtatccttagccactagatcacaagtatatttgattattttagatgacgtaagaaaaacttatgatgaaaaatcgataactcatgtgttctctagtaaatttaatatctatgtgacaataaatccagaaaaacttccatcaaatattatcagttgggctaaagcagtttctaaaacattaagtcagaatagttttaaaatgagaggaggggaagccattatttgtggacgtttaggtaatgactggagaggcatgaaaattgtgaaagaagcaaaatgactatgagtgtaagaagactgattatattttgtatatttgtcacatgtagtcatattatcgtccattccagagattttattaagggagctttttctattggattggatggtttgtttggagattttgattctaatcagaagttaggcggtggagtattacatggaggatatgatttcttttttcatcgaatatcttttttgagtgtagaacctaagataggagttggatattttggcggtaataaaacaagtacacttagtactgctgtcgttgcaaattacggtataacttgttttacaactagtatatcacccaaagtatactgttcgctcaatccagataataatataattctttctttagagaatgaattctcattattaaatgggtttgcaaacattaaagatcaaaactctattcacgtaaggagaaatagtaaactttttcaattttattatacaataaaaataggcttaactttaaaaacgccaaaagggtgtaaatttaccgtgtgggttggtggaagtacacttagattagataatattctaaacggcaatattccatcgggagaaaaatattattcaaaagaaacacttccctatgctgcaggtataaacttttatatataaatttaaacaatacaagaaatgaaaaaaagatttttaacattaagtgtaattctattcctattaggtatactccctatatcttcttttgctcaatctaaaataaaaatattcttagattatcattaccagtttgggttatttgagaaagcaggatatagcatttcgaggaaagatagtaagatgtatggtaactctttacatttatctgcattgtataattttactcagcagttgtccgcgggtgtaggagtaggagctgacagatatgaaaatccaggctataatacgtttcctttgttcgctagtttacattatgcgcctttaaaaaaacatactgatttatatgcctttactaatataggatatgcggtaataggtaaacaagagacttatacaggtatgatgtgggatttaggaataggttataaaaagatgtttcgttcacattttggacttaatttccagtttggatataatctaaaacaattccgaaatattaattcagatgtaaccagtgacataatgcagcgtgagaatagtactagaagctccttgtctttaggcattggagtgattttctaaaaatgatttcaaaagtctttatggtaataaaagatacatgaggtattttactcttattatcatagggaaattgtctaaaatctgagatagctttgatagctccaactggatctatcaaaactatcccggattaagtataataacaattattctcttccaataaaaatttagacaggctcttatttatatccaaaatgatttcttatatttgaatttgatgtcggtaataaacacaatccgaagattcacactagcaaccatgaaactttgcggagcaacacgccacataaatccagccttttcatttacatgtatcataaccctcaatttaaaaacccaacattgcagcgggaggaatattcaatacccgacaaagcaaacgggctattttttaagtcagtagattagttgataccaaatcgcctaatctactgatttcaatttaccaagtgataaccttgtcaatgatagcctgttgttcggaactgctccttcgcagatagatacgggtggtttctatactttcatgtcccatcaggtcagcaagcagagaaatatcgttgaacttctccaaaaagtttttggcaaaccgatgcctgaacgagtggggataaatgactttttcattcataccgtacttgttagcatagtttttaagttgttgcgatataccacgagtagtgattctttcgccatatctattcagaaagagataaccggaggttcgtttgtgctcttccaaccaaacaatggtttcttctttaagtaacttagggatataaattcgtctaattttacctcctttcgcataaatatcgtagtagcctaaataaatgtgttctacttttagctggataagttcacttactctcgctccagtagcagctaagaagcggacaacgaaataccacgtcaggttatcttcctttttcaactttttctttagaaagatataatccgcattggtgattacattttccaagtaagaacgctgttgcaccttaacggatttaaggcgaagtttctgcttacccatatattcaaggtacttgttgattgcctgaatcctgagattaacagtcttgggcttgtaagtctcaattagatacgttttataaatcaagaggttgcgtttgttcaattctttatgcctcttgttgtactcctttacggcatacagatatgctgcaaccgtatttttcgccatattcgcttggacgagtagcgtttcaaatgtttcttctgtcatatagtaattatatttagagggaacgacattgttccattaataacttactataaattcattgaattcctattatgagaagattattgctacaggtgaggttaagtgcattgatgaggagattccgtttgagattccgaatggatgggaatgggaacgggtgggtaatattttttttgttacgaagctggctggatttgagtacacaaagttttttactaaagaagccatatctgcatttaaccccattccaatagtgcgtgctcaaaatgttcgtatgggattttttgaggaaaataagaatgaagctatttctgaaatgttatcaaatcagttaaaaagaagtgctttgaacaaaaaatgtttgttaatgacatttattggtgcaggtataggtgatacttgcatttttcctgctgaaagaaaaaatcacttagctccaaatgttgcaaaaatagaaccacttgatgatagcatttttttagattatgcagtttttgcgctaatgagtccttgcggtcaaagaggagtaaatgcaatcaagaaatccacagctcaaccaagcctatcaatggagactattagaaaattgctgatacctattccacctttcaaggaacaaaaatgtatctcgttaaagttgtctgaagtattaccattggtagaaaagtattcaaaagtacaaaaagtacaaaatcaaataaatgacgaaatcaatatattgttatctaaatctattcttcaagaagctatcagaggtaaattagtaccacaaattgcagaggaaggaactgctgacaaactgcttgccgagattcacaaagagaaagaacgtctcgtaaaagagggcaaactaaagaaggcaatcttgaccgattccgttatctataaaggtgacgataacaagtattatgagaggataggcggcaaagatatttgtattgacgatgaaatcctctttgagattccagattcttgggtatggtgcaggcttggctttttattcaatcataatacaggtaaagccctaaatgcctctaacaaggaaggtagcatgcttccatatataacaacttcgaatctctattgggggcaatttgatttatctagcgtaagacagatgtatttcaaagattctgaaatagaaaagtgctcggtgagcaatggtgacctgttggtatgtgaaggtggagatatcggtcgagctgctatatggccttatgatacgccaatgtgtattcaaaaccatattcataaactacgctcatacaatcagctagataccctcttctattactacatatttcaggcatataagtataatggttatataggaggtaagggcattggcatacaagggctttcatccaaagccctgcataatatgttggtgccgctacctcctataaatgaacaaattcggattacttcaaaaattagttctctatttcagttcatctaataaacgcactattttattattaatcctcttctgctcaagtttgggtggaagaggtaataatgttttcaataatgtatcccttgagatgccaggaatcatactgttagcttgcctttctatagatgatacattggcataaaggaaccatctaatataatccaagtcaccaacaatgccagttaatgccattatttggcgagctatgtgaatactaccgattctattaaaagccatttcaccaatagtacctttacaagttattagtagatcattaaaatgagatactgtcataggtgattcagtccatctattgattaataaattgccattatagaagttactagcacctgttatgtatgggattccattttcttctgaattatacctgtcaggagtcaaatccctaccagacaatagagttataacacttgaaagtctacaccagctccacgattgtggaatttcaaaaggaatctcatctgatatatcaatctcagatttgcccaccctctcataatacttgttatcatcacctttgaagataatggaatcagtgagcgcagatttctttagcttaccttcttttacaaggcgttctttctccttgtgaatttcggcaagcaactcttcggcagttccttcttctgctatttggggcacaagtttgccctgaatagcatcctgaagaatactctttttaagaatcgaatatatgttattattaagttctctcaaacacgtttcttgtttttgatactgtttaacctttgtgtcgagtatcgtcattctatcaacaattctattctgttcacaaagtggaggcagtggaattagcaagttgttcattgccattaaagatacattttttatggtggttccagttgctgctttaagtgtatactccataaagaatggcgattgaagtaatatatagacgtattcctttagatcctctactattaaattgaaataacaagcactctttccaagcataatgggttcatcattataaaaaccgatattacctaaagttccatttatagagacgagtactgtatgcttattcagatttttcttgtatttgagatattcttccctacttactttttttgtatctggttttataactattttcttatcttgaagattattaccattaacaaagtagtattcgccatttgggtcatattcaggtgttccatgaataccgtctcctaataacgaagtaatctgacgtaatctacaccattcccatccctttggaatctcaaacggaatctcctcatcaatgcacttaacctcacctgtagcaataatcttctcataataggaattatcgtcaccacggtaaatgattgattcgttcttatctttcttgatttttttctccttaaccagcttagctttctcttctctaatatgttccaaaagcaccgatgccggttcgtcattagggtcctgctgtacaagttttccctgtatcgcccattggagtatgctgttctttaattgctttccgttcattgttcgtaatcctcttcttgtattccttattcacccttgctcatggcattggctatatctatttttaattcctcgtcatagtctttactcatcataaagctattaacgatgcgtagcagcaaatcttggtcaatattggatgctgccacatgataaatgatagactccaatgtacgcatacaaatgcaagcttgccagtagtagttattcttatgtaagaaatatgcacccaaagtcagtgcaatacgcttattcccatcgttgaagaagtgccccgaacagaatctatacatcagataggttagcttgtcggcaaaggttggatagtataaatcattctgcacaaaatcaagcgcagcacgtatcccaccttcatcacgcactccttcaaagccaccatcgctggcatcaatcattttgccatagatgtttaaagcttcatcgtagtctatgtaaataatctccttactcatcttccgcctgcttcaagcgtttaagcacatctttgttgtcagctaagatatggtcaaaatcaatagactgatcaccaatgaaccgttcaaactcttcgggtgtgacagcttgcaggtattccgctatattgccgtgatatgcttctcgaaaactgaaatctcttgatgtcatttttgttctggcatcattcagataaggcttttgcatgggatgctcggcaagctcttctacaatatgctcaacttcatatatggtaagcattctaccgccattctccttaaagcgttcactgatggctgcacccacgccattctcgaatgaagagataaccaatagtacctctgcatataaagtgtgccggacattgtcttttaaatcgagcttcaatatctccctgtattcctttgcattttctttaaaaacagctttgtagataaaatctgtaatctgagaatacttgtatgtggggtgtccatccacatattgattgatggcggaagtgaggtttttacgataattctcttctgttattgcagcaggaagatagtttatatccctacggttaatgtattttgttccaccacccgttttttcattgatagtgacaattacaaaatccaaaataaggctgcggactttcttggcttgctcactttctgtaagcagcatacccatatttaagaatgagcggaaattaaataatccgagctgagtcgttttgctcccgacatttatgacgggagcaaattgtaatttcaactctttcaaatgtttacccttacataaaacataaccattagccgataattcatctgaatatttttctaaatagcgttctattgtccgctcttctacttcataaaaatctgcaaccattttttttgtaaagcggtattccccctcaaagagtattccttcaatatcaagatgcttctgcactttactaaccgcaaaacggttgttaagcacattctgtctttcaatattcgaaattgttaaatctttcatatcactctacaattatcagttacacaattttatatctatgccgagaatcttttgaatctcagaaagtgttttgtctatttcatagtcaagtgcggcacgtttctcaaaatattgtttgagcaattctgccggaggcaatatctcttcttcttccttcggaaatttgcattggtcaaaattgcaattcaaatcaagcaactgttgagcagtaaacacacggctcttttctcctgtttcactactgacaatctctttcctgtcattccaccattcctgaatgggcagagtgtgctcaaccttcatcggcttgttttttgagaagtgcttgtacccctccggcatatcaagacgataaaaccatgtttctttggtcttgaatccttcttcacaaccctctgcttcttcattgttaaagaagaggatattggtagcaatagatgtatatggagagaatatagaacccggcaaacgaatgatggtatgcaaattgaacttgcgtagaagattctctttaagcgcaagttttgctccgtccgtaccaaacaaaaaaccgtcaggaataatcacaccacatctgccacctgctttaagacggtacatgataagtgcgataaacaaatcagcagtttcacttgaacggtagcgcaatggaaagttgttctttacgctatcttccgtactgcctccgtatggaggattcataccgataacatcaaccttatcggtttccttgaaatccgttacgtttgttccaagcgaatcacagttagctatgtttggtgcctcaatatcgtgaagcagcaagtttgtgatgctcaaaagatagggtaacggcttccattcttgaccaacaactgcattttgcagtttttctccatcttcggctgaacgtacactctttcccatataattgagggcagaggtaaggaagccccctgtaccactggtaaagtcaccaaaggtctcacccaacttcgggtcaagcatcattacaataaaatcagtcaaagcacgtggggtatagaactcacctgcgttccctgccgattgcaggtctttcaatatcccttcgtaaatatctccgaatgtgtgacggtcgtcagcatcatcaaattcaatctcatttacaatattgactacttgacgcaaaagcgttccattcttcatatactggttcaaatcggcaaatgtttcctggacaatactcttagctcgtggtgtgttggcatctacgggaagatttttcaatgcaggaaatagcttttcattgacgaaggaaagtagagcttcacctgttaatgcttcgccgtctttctcatctaccgcccaattacgccaacgcaaatctttgggaataatagattgatatgttttactctctctggatgctttgtattcccatgtttcttcttgagtgtcgtaaactttcaagaagatcatccaagtcatttgctcaattctctgtgcgtcaccattgatacctgcatcctgacgcatgatattccggattcgctttataatgttatttactgccatttttatgccaatttatatatctgatactctaattctctgatagcttgctcataaccggcaatgccaccaaatagttttataattttagttggttttcctatgctattgaatggaggtatctccaagatgtttgctttttcaaagtcgagaataccattctctgcatatttttcaagaagagcctccaacacttcacgtgctttaccttcatattttccgaagtagttacacttcttcacattatttgctctctctttccttgttaatggaggctggtcaaacgcaacgtgacatatcacatcgaatatgtcggcatcctttaatgccggatttgcttcacggacagcgtctatcaggatggcatactcctttaattcatccattatagcttgcttgcgttcagcttctgtccacgtctgtatgaaatcattcagactttggtaatgacgcaataattgcgttcttgcgaatgattgaatactttctgttctcatcgtcttgccatcttcgcctaacacagatactatctcatgggcaatacggatatcctttccattgataatatatttttcatgaggctcggaaactacggttgatggaccatcaattattttatatggtttgggctttttaccacctcccttaggaggttcaggatcaccatcgaatgtagggtctttgaattttgcagtagcattgcggaaatcaaggatttccaaatgccactttcccttatcttttctgagtcgtgtaccacgccctataatttgcttaaattcagtcatagacccaatttctttgtctatgacgattaagccacaggttttacagtccacaccagtagaaagaagttcggaggtggttacaatcactggataaggctcatccacactaataaagttatccaattgtttcttaccctccttatcttcaccgacaatgcgtgttacatagtaaggtgatttcttgcacaaatcgctattcatattgataagcaaagttcgcatttctgctgcttcctcaatatcagaacagaatacaatcgtttttgtcatacgaccgatgtcatgcagcattttggtaattctgtttgctacaaccttgcgtcttaacttaatagcaaggtcacgccctatattttgtctttgatataatttctgctcaatctccttacctaacaaatctatctcaccctcttcaggagtccagccttgcaggtcaacgttgataaagtcagcagtaaccctatacggagccaaaaagccatcgttgataccttgaagtagcgagtaggtatacacaggttcaccgaaataatcaaggttattcgccccttcatcggctttaggagtagctgtcatacctatttgagtagccgtattgaaatattccaaaactttgcgccatgctgaatcgtccttggcacttcctcggtgacactcatcaactataatcaagtcaaagaagtttggccgaacttccaagaaggggtcgggcctaccttcttttccaaccaactgatgatacagagccatatacatctcatacgatgaatcaattttttcttcaccctctccaactgaagttatcttagtcataaacttcttgaatggcttgaaatcctgagtcatagtttggtctataaggatattgcgatctgcaagataaaggattttcttctttgctccactcttatggagcctatggattatctggaatgccgtaaaagtcttacccgtaccggtagccattaccacaagtacacgttgttgcccttttgctatggcttcaacagtgcggtcaacggctatacgttggtaatatcttggctcatgactatgggcatcatagtagaatggggtctctataatattaagttcatcaggagtatagtttttggatgcaagataacggttgtacagctcctcttctgtcgggaagtcttctaacttaatctcagtttctttacctgtgataaagtcatgttccaagaaagcatcaccattactggagtatgcaaatttcaagtcaaggattaaagcataatccatagcttgctgcataccacttccaacagtgtgcttgttgtcttttgcttcaaccactgcgataggtttaccgttgtggtacaatagataatcagcctttttaccctctgctactgagtgctggttgccaacaacaagtactcgaccgtccgtaaaatagtattcttcacgcatatttacgcttactgcccaccctttttgttgaagtgcaggagtaattaacagagtgcgtatctcttgttctttaagttttttcttgtttacctccatgacaataagttgtttatgatttgttactgctgacaatcaaatcttttacatcaatattaagttaagggcattgcctatgtcgttgagtgtcttaatatccggttgaactgaattactacaccatttactcacaatgcagttggatttcctaatttgtcctgcaagccattttcctattttctgttgttctgcaagtactactttcagtctattcaaattagctatagggtaaaatgttttaatcagagagcaaatttatataatttatctgatagtgaagcaacttccgataataataaattattaggaagtaaaaatctggcttaattccggctaaaacatgagattttacagatagaagaagaaaaattatggatacaaaataatttttcaagggtggttttacagaaggactacccattttttacacttactgtaatattacttatgtcaaaattgataattccagataacatatctgacatacttatagtatcattattaaaattaactaattattccgattaagttatctttgaaggattggcaagccaccttattcacagagactagactgtaatggatggtgaactacatatcgacacgttccccaacttaactccggtctgagcaaaagagagaactaacagagaaacagccgaacttcttgcacgaaaaagaacggtgttataaaacagaagcccactctttcttcacgaccttctataatctgaactggaatgcaaatggtaaaatatcggcggaagaagtagccaacagagtaaatagcacccttgaaaagcatcttgtaaatgaagaaaagttcggtgtaaacaatgtattgcaaaagaattttatagtcgaacaaaagcaaaaataatagacttggtttggttataccagcactttctttaacaatagaaggcatgtctattataaaatagggaatctaaacgaaccgctgaaaagagtattaaagttctccatgactatgtataaaagattcggacaaatccgattattggcgcattattgtaaaagcataaacaaaggaatagtcctatgataatatttataccaacgtgaatccgatatagccactcaaaacagtttccccctttacaaactcatattctctaagctacatcctaataactacgagaggcaaatttcattttctgaactaatcatcaaatcatacttcgatactatttgcctaatgccctctgatctttcatagtctggaaatacttctatctacataaactgtcatagcttacattcatagttacaacaaagaatatctctctgtatatcaaaaaacttatcaaaggtaccctttcatcattactctatctccgatttcctatcttcatcagcaccagcccaataacaatccagaccatctcccgcacccgcgtaatcagagcggcaaataccccatatgctccggacaaagacaagccggctaccgccagggcaaagcctccttccctaccccctaattgcatgggaagaaagaaaagcagattggccagtagggaagagaaagcgacgatcaggatgcaaccgacaaaactgacatccgtagtcaatacattcagaatcaaccagacttcgagacaccccactatgcgagcggtatactctaaacccaatgccaaataaaaggtactttttcgctgttgatgaagcagagctatctgactgtctatagtctccagtttttctttatgaagttccgcgaagcggactgcacgcttcttcaaaaaagggatatgactacccagacgtacgcatgccacagccataccgttccggtagcctttgataaaaagagtgacaagtaagaggcagaagagtgtggtcaaccccaagacaatgcccatcccccaaccgaccggataaaaaaagacataaatcaataccgagctgagccagaaacagaaatgcgaaaagatatgcatcatcacatacaggatgaccgaagatgtggcacgctccactccgacatagggggtaagctccataatccggtagggctcccctcccatcagtcccacgggagtgacataattcaacgcaaaaccggaaaccgtgaatttatagagccgggcgaacgacaatgaattcaccggaccgctactacgaagaatgatataccacgaaagcgtattaatcagataaataaaaagccaaaggaccagaaccagcggcagataaaatccggcacgccgcaggttgtccagcagctcatcataggacacatcgaaagtgaacagcatgatgatgacggccaagatgccaaaggccaaaaacaaattacgaaatttattcttcaaaacaatatacaatttaacgcatcaaagataacgttaataatgtatacaatgatacaagaatagatcgtttaacaaaacactttcttgcacaggctgtttttaatgagaaattaaacctaaacaaattaactatggattggattgtacatcaacttagggtacaccccgagctggctatcttcctgaccctttttgtgggcttttggattggaaaaatcaaaatcggaaagttcagcctgggagttgtaacaagcgtattgctggtaggagtccttgtcggacaactcgacatcaccgtcgacggacctatcaaatctgttttctttctgctttttcttttcgccatcggctataaggtcggtcctcagtttttccgcggactgaaaaaggacggactccctcaaatggggtttgccgccatcatgtgtgtattctgcctgatcatcccttggatactggctaagattatggggtataatgtaggtgaggctgccggattactggccggatcgcaaaccatctctgccgtaatcggcgtggccggagacacgattaacgaactgaacatctctccggaaaccaaagaagcatataataacattatcccggtgtcctatgccgtaacttacatcttcggtacggccggctctgcatgggtattgggttcactcggcccgcgactgctggggggactcgataaagtgaaagctgcctgcaaagaactggaagccaaaatgggaaataacgaagcggatcaacccggattcatggcagccgcccgccccgttactttccgtgcttataaaatagccaacgagtggtttggtgacggtaaacgggtgtcagatcttgaaagttattttcaggaaaacgataaacgcctgtttgtggaacgggtgcgccaggcgggagtcatcgtaaaagaggttagtccgacttttgtactgaagaaaggcgatgaagtggtactgagcggccgacgcgagtatgtgatcggtgaagaggactggatcggtcctgaagtattggacccgcagttgctggacttccctgccgaggtattacccgttatggtcacccgcaaaacggttgccggagaaaaagtcagcaccatccgggccctgaaatttatgcacggtgtcagcattcgccgcatcaaacgggcaggtatcgacataccggtattggcccagaccgtggtcgacgccggtgacatggtggaactggtgggtaccaaacatgaagtggatgcggcagccaagcagttgggatatgccgaccggccgaccaaccagacagacatgatctttgtcggactgggtattttgataggaggactgatcggcgcactcagcattcacatgggaggagtccccatcagcctcagcactagcggaggagccttgatcggcggattattcttcggatggctacgcagcaaacaccctactttcggacgtattcccgaacccgctctctggatactggacaacgtgggactgaacatgtttattgccgttgtgggcattgctgcaggtcccagcttcgtgcaagggttcaaggaagtgggtttaagcctgttcatcgtaggcgcactggccacttccattcctctgatagcaggcatactgatggcaaaatatatctttaaattccatccggcactggtattgggatgcacagccggcgcacgtaccactacggctgcattaggagccatccaggaagccgttgaaagcgaaactcctgctttgggatatactgtgacatatgctgtcgggaatactcttctgattatctggggagtagtgatcgtattacttatgtagaaacagatttttaatattaattaaacataactcttgatatcaatgatgaaaagtaatgaaaacaacggagcagtaactaaaagttttgctaaaaagatggagagcatcagtcctttcgaattgaagaacaaactgattgaaatggctgacgagagcatcaagaagatagcccacaccatgctgaatgccggacgtggaaatccgaactggattgctaccactccgcgcgaagcgttcttccttttaggtaaattcggactggaagagtgtaggcgtgtgatgtacctgccggaaggaatagccggtattccgcaaaaagacggaattgccgcccgctttgagactttcctcaagaccaaccacagccagccgggggcagagctgttgaaagggacgtatcaatacatgttgctggaacatgccgccgacccggatacccttgtccacgaatgggcggaaggagtggtaggcgatcagtatccggtgccggaccgcattctgcaatttaccgaaatgattgtgcaagactatctggcacaggagatgtgcgaccgtcgtccgccgaaaggcaaatacgatttgtttgccaccgaaggcggaacagcagccatgtgctacgttttcgactctctgcaagaaaacttcctgctcaataaaggggatggaatcgccttgatggtacctgtcttcactccttatattgaaattcctcaattgagacgctatgaatttaacgttacggaaatatctgcggatcagatgacgacagacggattgcacacctggcaatacaaagacgaagatatagaccgcctgaggaacccgcagatcaaggcactcttcattaccaatcccagtaacccgcccagttatacactgagtcccgagactgccgcacggattgtagatatcgtgaaaaaagacaatccgaacctgatgattattacagatgacgtatacggaacattcagtccgcatttccgctcactgatggccgaattaccacaaaacactttgtgtgtctactctttctccaaatatttcggagccacgggatggagggatgccgtgatcgctctgcacgaagagaatatcttcgaccggatgatagcccacctgccggaagagcagaagacaattctcaataagcgttactccagtctgactcttacacccgagaaactgaaattcatcgaccgcatggtggctgacagccgccaggtagctctgaaccacaccgccggattatcgctgccacaacagacgcaaatgagcctgtttgcttctttcgccattctggataaggaaaaccggtataaaaacaaaatgcaggagattatccggcgtcgcttgaaagccctgtgggataacaccggattctcactcgtagacgatccgctgcgtgtaggttactacagcgaaatagatatgctggtatgggccaagatattctatggagaagaatttgtcagttatctgaagaaaacttacagcccgctggatgttgttttccgcctggccaacgaaacctcactggtattgcttaacggaggaggttttgccggaccggaatggagcgtacgtgtatcactggctaacctgaatgaaaaggattatgtgaaaataggtcagggaatcaaacggatactggatgaatatgccgtgaaatggcaagaatcacggaaatagaatcctgaatcttgtcagtccgtcggcgtatgtacgcaatgaaaacgtgcagccatgacggctcagaacttcgcgaataaaaatcaaaccgataccttgtccgttgggtttggtagaaaagaagggactgaagagttttgcttcagtctcttttgatataccgggtccgttatccaccacttcgatagctgtaggcaatgaagtacgaatgatgatctgcccgtcctgcccgatactctcggccgcattcttaataatatttaccaatacttgttcaaacagggacgcatccagcttcacatcgtccagagattcgtcacatatcagttgcaaccggatgttccggtcattgcacatcccttccataaaacgcttgcaggtaaatgcaaggtcattcaggttggtcggagtaaaacggggctcgggaatcttcaccacatcggcaaagcgggtaatgaaatggctcatagaaaaacaacgctcggtacatacgcgcatcacatcgcaaatatcctccataccttctgactcggacaatgcctgctctaccgtatccaatgtggaagtgatgcccgctgttgtattattcacctcatgcgcaatcatacggatcactttctcgtatgccttcttttcagctttcatcacttcatcggtcaatccttccatcagatagaaaggatgctggaagccgcggtccacaaatgaagagtgggtgcatttatagatactcgagtcgttcagccggacggtgctggtttctccattcggaatggcggccaattccagggcaagcggagaatcgatttccgacaatttcctcccctcggcttcttccggacggacccccatcatcttcatcgccatggggttgagttgagatacctcttcgtccagcgtcatgataataacgcccatgggggaagcattaatcatcaggtcgagaaaatgattctgttctcgcaagcgcagccgttcgtttttcagttgttccatcatgcgattgaaaacatttaccacacggtcggcctcctgctgccccacatggcttaaccggctactgaagtcctgttctctgagaagttccataccactgccgatggtgttcatcggtttcacgattttccggtaaaacaaaataagatacagcatcaggagcagcatcaatgcttcggcaatatagagatacttcacgacaacggtttcggatatataaatcagaaaacccatgatagcgaccaagaagaaaacaagtatgaagaagaatccctttactgacatgtgattgatgattaacgattaacggaccatgataagcaacgggttacttatcaccgatatcatatttctccaaacggcgatacaatgctgcacgactgatgcccaatgcggtagccacctggctgagattccctttatagcgttccagtgcctgaagaatcgtttgcttttcaatttcatccaaggtcattcccgcaaatgaagaagaggttgccacactttcgtcatgacgttggtattggttctcgaaatcgattgcatccaacacttccttcccgctgaccagaatcgtacgttctaccaggttcttcaattcacggatattgcccggaaaaggtaaacggctcaggaagttcaacgcatccgacgagaattctgtacggggcagattgttaatctccgcctgacggtcggcaaagtgtctggcaagcaatggtatatcttctctgcgttctctcagtgcaggcagttttacggttatcagattgatacgatagaacaggtcttcacgaaaagtgtgttcgctcaccatcttactcaggtcggcattcgtagccgaaaccacccggatatccgtcttacgcgggcgactgtctcccaacacctcaaaggtctggtcctgcaatacccgcagcagctttacctggcacgacggatcgaggtccccgatttcatccaaaaaaatagttcctttgttcgccatttcaaaacgccccatacggtcggcagtggcatctgtaaacgcaccttttttatgaccgaacatttcactttcgaaaaggctctgcgaaattcctcccagattgacttttacaaaaggctggcggacacgttggctattgatatggatggcttcggctatcagttctttacccgttccgctttcacccgtgatcaatacgggagcattggtaggagcaatacgtgctaccgtattcaatacctccatcaacccacggcttttgcctatgatatggctccggttgagtgttccgctttgctcctgtggagtgtctttgggagtggcagtcagttcgagtgccgtctcgatgcgctgcaacagagcagcgttattccagggtttcgtgataaagtcgaatgcaccggcctgcatcccttgtacagccaactgtatactgccccaggcagtcatcagaatgaccgggacatcgggacgaaaaacctttacttgttttaaaagcgtcaatccttcttcaccggaagtggaaagtgtaaaattcatatccatcaggatcagagaaggagcttccgaacgaactacttccatcgcctcacgcgggccggtcactgcaattacctgataaccggcgcgtttcagcataaaactcagggaagagcggactccgctatcatcatctataattaaaagcataggcatcaatttttgagttgcaaaactactcttttttggtttaaaaccaaaggtacgttggtttaaaaggtaagacctcttggtttaaaaccaaagaggcgttggtctgaaaccaacagccctcctgtttaaaaagaacaaacacacaattatttctttacaatatcttcaaaatcagcttccaggggagtattgttttggaaatcccacaacgtcaggctacggagttgataatagtaataccaataccagtacagttcgttgatatgtttttggcgggcatcgtctttcgagttctgggcgtcgttcagatcgagtgtattgatcttaccgatcaggaatgtttcgacactcgtcttatagcgctgttgcgcaatcttatcggcctcattggctatggaaagctgctgtgcctgattgttgaaatgctcgaccagcaggaagatgtcctgatcgaaatccatctgttccttctttatcttggacagggtaacgtcccggttactcttggctaccctcacttttccacggcgtttgccccagtcgaggattggaattttaacaccgacctcaaccacctgattgtctagcaaattgtgataggcaggagataagtctttattcagtcccgtataacctacattggcaaaaagatcgacgctcctgagatttccccgggctgttgcaacttcatattcggcctctaactgacgacgacgaatattgtgggcaaacgaattgcgttccagtgctttgttcagcacttggttgtattccatctttaggttgggagccgattccggtaccacaggttccagtatcaggtcgtttcctatggccaggaaagagcgcaaacggaacatatgggcattgaggttgctttctgcatccgtcacggcagcccgggctttcagggcggcaagcttcagttgcagaagttcattttctgagatttgacccatttttcgtttagccccggccacctcgtacaaacggtcggcattcacctgattttgtcgggcagtgcccagtgtctcctttgccgacagcaaattgaagaagtaagtgatcgcattcatggtcaccgtctccgtcgcagtaataaaagcggctttcgcctcttcgtaacgcaccggttcgatacggcggttccacttcaggttgtttactccgaaaatgggctgagtcagttgaagggcgatagggacagacatgaactgccggcttcctccggaacctaactgtttcataaagtcgagtgaagaggacaatgaaactttacctcccgtaaaccagatgttctggtcgatagacaaagcaccgttcaatcctaacttattactgcggacaaacgagtaagagccgtcttcattctgataactgttatactgcttgctgtaactgggcaatgtaccgctgaagtttacttccggaagaagatcggcgcgaaacgtgcggtactcccaataagctgtcttcagctcattcagagctactgctgcatctacagactgtgttcgtgccagtgcaatggcttcattcaaggtgatttcctgcgtttcctgcgcactcagcgccaacgagcaaaatgcaaaagcagaaagtagaaagtatcgtttcatataatattcgtttatttaccggctgaaaagcaaaccccgtgccaaaagtgaataccggggaaacgggaacacgaaacaaagagcaatgagtaagggaggttgagggagtaaaagggaaaataaacgggaaaagagaaagggtatagggaaagaaacgatggatgcaaaataggaaaaacgataatggagcagcctctttcggacgggtaaccacgctgtaaatgaacagaaaagagagggatacaccctccggtgaaaggtagcggctactgatcttttagcatcaggaacatccaccgtccgttccctccgttcaccgctcttcattcatcgttcatcgcttatcgttcaccactcatcattcactgtttatcgttcaccgcttatcatccatcgttctttctgctgtccgaaaatgaacagtttgttcggagacggacgtcctccggtatcattattcgcaaatatccggaaggcggacagtgaaacgggttccgtgcccttcttctgaagtgacggtaatcgtcccgttcagacgtcctacgatagtctggcaaatactcagtccgagccccgcaccctgagtaaagctatctaccttatagaaacgttcaaagatatgcctcaatccatcttccgaaataccttttccggtgtcttcgacaaaaagagaagtgtagccgggttcttcttcggtatatccgaatgtaatcgaaccttgggtcgtaaacttaacggcattgttgatcaagttgtttaccacttgttggaggcggacattatccgtcaccagatactttttgctattctccggcaacttcagcaccagctgcactcccggaggcatattcaaacgctgtgaatcgtatacattcttcatcaataacggaagattgtgaccggcaaactgaaaatccattgtgccggattctatacgggacaaatcgagaatatcattgataagtgccagcaacagtccgcaattcttattgatagtctctataaatagcttaacctcttcttcggtaaacccgctggtatcgctcaacaaatcagagaaacctacaatcgcattcagcggcgtacgtatctcatgactcatattggcaaggaaagccgatttcaatttatccgcctgaagtgctttatcacgcgctgcggttaattcctcttcggttgtcttatagcgttgtatactctggcatactcccaaaatactgtagggcgtatctgttgtcaatcctgcaagcaccgacgtccgatattcccaccactcataattaccgtcaccactaagctgacggaaactcatacgcgtactctgactgaggcccgccagtgcccggttgaaaatctcgtatgccgattcctgatcgtccggatgaatcatccggtccatctcgccacgtgaaatggtagtcttattttccgcaaaaccaaaacgtgtcagaaagcccgcagggaaagtaaacaggccggtgcggatattatattgccaagggtagatagaactctcgtctaccgccatactgaaaaaacgcttctgcatctcttcatccgatatattacgggcagagagagccattcccgtaatttttccatgtgcacggataggaacaacctctcctgaaaccggaaaataactcccactgtgcacctcttgcataaatgaattttccggaatgactacactgctttcttcagtcaccacctgcttgagcataggacggagaatctctttaccattattgtagatcttaaaaatactgcctgccggcaagccttcgtaaggtcgagcggcttcatctttgggcaaatgcagcatcttcaataaagaacgattggtaaaatgaatacggaaatcggtgtcgtaagtgatcacaccatcacggatggaatgaaacacattatcaaattcatcacgttgggccaccaaccggttttgtatcagcaggcgggtctgggcatggatgcgacggcgggattcacgacggtttatacgatacagccacactatcaggaacaccagtaaagccaatatcgaactatacaacaagatgtacagcatacggtatttctccatgtatggctcgttaataatggttccgccgatagcactcgcctgcttgggatctaccttaaaaaacacaagctgcttgaaatcgtacataaacttcaaaggagattcaatgattcccacttccgagggagatttgccacgcagcacatcggcggccgtccgccctacttcatgcgccgaagcatacgaatcggcatcatacgcgccaaaggcaccattagtcaacgcaaggttctcgcacgaaaagaaaggcgcttttgagttacgaccgataaaggacataaaagacgaccacttaggagcgatgatcaatgtcttatgtgtattgcggggatagcaggtagaagcaataattttattggttgtatcggtctgcgaattataaaaggtcaccgtatattccggatgctcctccacaaaaccttcccattcgttcataaaatcatctttccctttcgaactcagcaggctattgtcggagatacagaccacctccgtccgggtagggaaaaggcgactcgcctgcctcagtaattctccgaaatcgggattcgccgtatatccacacacattgggtaacgaatcaatcaggctgccttccggatattttatattaaaaaagacaatgggcaactgcaaggctaacgaatctccgcatgtcagcaaagtatgaaaagcctcatcactgacggtaacaatcaagtctgttcccctttcacgggcccgttcgcaaaaacgacgcataatcagcttttcggattgataagtccagaaattggcatccagaaattcggttgtaatattcactttcaatcccgattcaccgaaaccgtctttcaacccccggaccaagtcattatgccaaggtgtttccggagcatacgactgaacgaagagaacattataaatacgttccgcagcagtggaaaatcccgggagtaataagaagacagatataagaaatatagtatataatcgtttgttcatagcaaaaatctgcgttgtatcaggattgtgaacgcaaatatacgttataatcttgaaaacaacgcagatagatgataaaatattgcgataagcttttattcttcgtgcaatgcctccgccggctggattttcatagactgacgggccgggaaccagatacctgccaagatcatcagtgccatcaacagtaacgtgatgccttcgcacaacataaagcgaccgacagaaaaagtagaaaagtaccacgaaggtgtcagttcactctttgcgatatagaaatcgacaccaatagccaacggagtaaccagaagaagcatcagccaaccttcgctcagcaaacgaaagaatacgctttgcttactccctcctactgccatcatcagcgccatctcacctttacgctgctgggtgcggaaccagaatgttcccaatagccccagaaaaatattgagcagcaaaaagcccatacctaccagatagttacgtaaagtattcacatcgtccaactggaacgtatgccgtatgtcccggaatgaacttaccttagtcagaaaaagattgcccacccgatactgggagggggcatccttcatcaattgttcggcaaaggcggcagattcgtttttgttcgtacgcaaacagatttcattgcccgaagccaaccgattctccggtaacaagatgactgcggaccggctataagcaccggaggaaaaatcatcataacggaccacttggagcgctgccaccaatttggataaatgggcagtgtcctgatccagacaaaactctttgcctacatagtctttcaaatcgatcttataacgtgactcgaacacattacgcgataccataaaagtaccttccttcaacagagcagctaattgttccggagtttctccgttggctccctgataacggaaaacacggaagaagtcgggcgtcacccaacgacggatgttgtacttgctctccatggtatccaggcgtacgtccatcccactgttacttccgttgtacgggaaagaattttgcgacatactcaccgcctcgactccgggacgacgacgaaggcgatccaataactcacgcatatctgcatgtgcttcctcatccgtacggttggctatgtagtcgggacttttctctgtcaggtaatcgaactccacccggtaggtattctcaatatcgaacccgcgaggttcaaaataggtataaagggtgacaaacatataatcgactacataccaaagcacaatgcttaccagcagcagttctatgaacagccaggagttagagcgccgttcgtttactatttgtttcaacagtttcttattcatcgtttgtgtagtgtttagttaagctttccgctaagagcatttataatagacatccgcgatgccctccaggccggccatccactactcagcagattcagtgccaaacagaaaagtaatgcataaataaaagtagaaaatttaaaaagcattttccactcgataaccggagccgtgttaaggtacatcaatctgctatcggcaaaaagcgtacctccccaacaataagatatgatcagacagaacaacagtccgaccactccggccatcaaagtcagtaccagattctcggcaacaatttgccccatcactcccccacgggtagctccgaacgaacgccgtacaccgatctcggcaacgcgttgtctcaaacggctatgggtcatcgagctcagattgatggcaggtaccagtaacagaatcaaaaatataatgacttgctgacgaaaataggctgccatatccggctgcacatttgcccacttatgctgcgacatcgtcagttggtcatccggctgcccacggtagaaaacaaaataatcacccaacccggcgttataagccaagcggcgacgttcgcactctgcacggatagcttcgaagtcggaagaactgcgggccaggatcacaacccgcatcactcccataatcccgtcacaccaggtattgtctcctcccgtaatatgggtcgatgaatatggaacccaaatctgtgcataggctgtcgaagccattgaagacacatctttcaccactccgcttatccggtagaccgcatcattcaccaagatctccttaccggacacctgatgggacgtaccgaaaagaagacgtgcgacactctctgttataacagctaccggaagcccggattttacttccgcatccgaataaggcttaccgtctataaacgaaaagtcgaatatcctccagaaagctccatcggtctcgagggcatcgatccccgtacgtacaccacggggcaaagctacctgcatagtttcgggtatcgtatagatactgacttcctcggccgtcgttaatccttcaaaacatccttttgctgtctgcagccccatcggaccgttactcgatccgtcatcactccagtttttgttgctcgtgctcatctgtttgacatgcaatagccggttacggttactctccggagcaaaaggggtggtttttatttgctgttgcatgaccactaccataatcaggcaaatggtcaaagcagtgcccaacacactaatcgtagtcagcaagggctgctgtctgagttgtgcaagggcctgcttgaaatattgtttaatcattttgtgcttgttactattttcctattttcagtccaccggtattgacaccgccaaccccgtttcttgatatttttgcggtaccggctttaccattcagggtcatgcttcccactccattggcttgggcttccaatgcgtcacaatcaaccttgacatttacacagcccactccatccagtttcaccgtgaaatccttacacttcaaattgtcgatattaacatctcccactcctgaaaggatcaggtcgaagcgccttgaccgaagtggttcccggcaattaaagctacccacgccttgcaacttcacattgtccagattgggagccgtaatatacaattttatgtgtttggaattattgttgtttttttgatatccgatcactaaaacaccatttttcacaactgtagtagtttgggatacgtattcttgcggcccctctatccggacggaacaacggtcggactgagtgaaaaaaatatctccgacagcctccagccggatcatcgagaaatcggcaactttacggttaccgacagccaaggttttatcttcggtagttttaccacattggcaatcggcactgcattgagcttgcaccgtataaccgatggctcccaggaaaagagccaaagctacgagtataatttttgctttcattgtactttgtattatttattgcacttgacgtccgtcgaagaagcggatggtgcgagaggtttgtttggcctgttcttcattgtgagtaaccattacgatggtacgtccgtcttccttattcaggcgatgaagcagttccattacttcggcacccatcttagaatccaggttaccggtaggttcgtcggcaaggataatctcgggattaccgatgatggcacgggcaatggcaacgcgctggcactgaccaccggaaagctgtgtcgggaaatgacgcatacgatggctcaaacccaccttctcgagaacctcctgcgccaactttctacgctcggacgaactgacacgacggtagagtaacggaagctccacattgtccagtacgttgagtgagttgatcaggtggaaagactggaaaacgaaacccagtgtcttattacggaaagcagccaattctttgtctttcatgccttctgtatgtgtaccgtttatttcgatcgtacccgtcgtaggagcatccagcaatcccatgatgttcaacaaagtagatttaccacaacccgaagggcccatgatactcagaaactcaccacggtcgactgtcagattcacgttttcgagcgctactgtttcaatctcgtttgtacgatagattttagaaagagaagttaatgtaatcatcacttatagttttaaatatttcttttattagattcttgttcaaatgatatgccaaaaaattaattcctttaaatacaaccgcttatgttcccaacgaggtgtccgataatgaacactctgcccgtaaatgaactcgggagtgtccctcaacagacatgcttattcttcgtgcagtgcttctgcaggctgaatacgcatgacctgacgggcaggtatacaaatcccgatgacgatcatgacaactatcgacacaaacgtcatagcctgcacaatcaggaaacgggtgacggtaacaaccggcatcgtatcggtcagcaaatccataaaggcaagattcagacttatgacagcagccggcaccgtggccagtattaataataaaaccccttcaccgatcagcaaacttctgaggttcgcacgggtagatcccaaagccagccggagtcccatctccgaacgccgttgctgtgtccgtatccaaaatgtaccgatcactcccatcagaatgttcagcaagaagaagcctaaagcggcaatccgggttttcacatcatttatcttcccgttgctgcggtaatagttctcacgaagatcgtcaaaagaggtaatatccagaagataaaaattaccgacccgaagctgtaccttcatatctttacggaaacgggacggaaagtccacaccatccgcatccggacggacacgcacacaaaactccgcattattccccctccaccctaacaaagcagcctccgaatgacattcgatataagtagggtaaagcggataaaaatcatcaaagcggatggtattgcatataccgcgaatggtatgtgtcgattctgtctcgccccaattcttcactcctttacccagtgcatcggttcccttagcggaaaactcacgttcggtttcggcagaaatgatccatgtgttttcctgagtagccgcctgtacaagtgactcggtttttccctgcttgtcagtgatgcggaatacccggaaataatcgggtgatacattatacacatatccgtgtacccaagtggtatctatccctcttgaaccgctggaactgctttgattgtaaggatgcgaaccaatactcagcgatacggcctctactcccggataagccctgaggcgcgaaaggatggagaaccattgttctatcttcaagctatcagtatcaccgggtttatattcctttcctccgggaggtatcgaagctagttttacccgataaacgtgctcggtatcaaaaccgagcggagtggcatacaatcttccggttacgtacagatagtccattacatagaacaggcagactgagacaatcatcagttcaaaccacaaccaggcgttgacagagcgctgggcccatatctgtttcaataaatgctttatcatgatttcttctatttaatggcattgacaatgttggtgcgcgatacacgaatggctggaattcccgcactcagcagattcatcaacaagcagaacaataacgcacaaacaaagacaaacggttgaatgaccatacctacggatacctgagtgtccactccataataccccgacatagaagtattgagtaaccagtcacgcatacacagcacggctatgtacgacaagatcagtcccaatacacctcccatcaatgtaacaaccagattctcggcgagcacctgccggagaagttctccacgagtggcaccgaaagcacgtcgcacaccgatctcttccatccgccggcgcatacgcgaaagtgtgataccgctcaggttaatggcaggcaccaacaacaggatggtaatcactacgatataaatcagaaccaaccgcgatgtatccggatcatcaaacggattatcacgggccaaagacatcaggcgggtgtcgggcgcacctccaagcagcaatttcagttctttctgattggcgttcatacggtctacattctgttgtgcctcggctcgaactacatccggatcgccccccttgggtaccaggatataacatgaatatcctccttgcagaccctcgctgacactacgttcataatccggcaatgccgtataaggggcccaagcctcggcataagcagcctcggccagtaccgacacatcggccactactccacagacggtataatcgacaaatcctaatgaaatgatacgtcccaccgcattgtcgatgccaaacagacgacgagccaacgagcgggtcactaccagtttcttctcgccggacacaaattcctgcccgtaaggtttaccatgcaaaaagcggaaaccaaatacacgccaaaaattatcatccgtataactgaccgcacacttcacttcccgggttccgtcgggagtagccgccaaagacgtcatgctgtagtgcacggcgctcaccgcttccgccgtagtcattggatagaaacattctttaatggtacgcagtgataactgattccccatattccatcctttatcatcaattttctgagcaatcgtcatctcgatcgacaaggtacggtcgcgatttatctccggttcatagttggctgttcttgcctgatagataagtacaatgcacattatcatggcaatggccagtgccgtaccaataatggcaataacactcagcaacttattctgctgaagaagaacaagtgactgcttaaagtattgcttaatcataagctctttttattagattgtattttgcattcctttattgcttactgtacctgacgtccgtcgaaaaaccggacggtacgtgaagtctgtccggcctgttcctcattgtgagttaccattacgatggtgcgtccgtcttctttattcaggcgatgaagcaattccatcacctcggcacccatcttagagtccaggttaccggtaggttcgtcggcaaggatgatctcaggattaccgataatggcacgggcaatggcaacgcgctggcactgaccgccggaaagctgtgtcggaaaatgacgcatgcgatgactcaaaccgaccttctcaagaacctcttgtgccagtttacgacgttcggaagaagctatatggcgatacaacaagggaagttccacattatccattacgttaagtgaatttatcagatggaaggactggaatacaaaaccaagcgttttattacggaaagcggccagctctttatctttcataccctctgtatgtgtaccgtttatctctattgtccctgcggtaggggcatcaagcaaacccataatgttcagtaaagtcgatttgccacaaccggaaggtcccataatgctaaggaattcaccacgatcaactttcaggttgacattctcaagggctactgtttcaatctcgtttgtacgatagattttagaaagagaggttaatgtaatcataactttagtttatttagatgtttcattttgttctatatcgattccacacagacgagatagaatcaaatggtatgccaaacagataacttcctcataaatcgtatattaagcggagagttgggtgtccgaaaatgaacatactgcccgttggtgaactaaaagttctattaatctcgggtacattggcaggaaaaacgccgacgatacaaccctaattacggatatttttacccctattcctgttttaatctcctcacccatactacatataatgaaaattcttacatttgtcacagaataaacaaccagatgtcctatggaagaagtaatcaagctcaactcggtagaccagtataataaaatgtatggtctcgagacattgcaccctttggtaacggtagtcgacttgtcgaaagccacagtgtttcccacacatttcactctcaattatggattatacgctctgttcctgaaacagacaaagtgtggcgatctgcgttacggacggcaaatgtatgactatcaggaaggcacagtgacaagtttcgcaccgggacaagtagtcgaagtaaagctaaacgatggtgtacgcccgatgtcacacggaatacttttccatcccgaccttatccgcggcacgtctttgggacaggaaatcaagcactactcgttcttttcatacgcatcgaatgaagccctgcatctttcggacgacgagaaaaagatttttcaggattgccttgacaaggtacaacaggagttgtcccgtccgatagacaagcatagcaagcgcctgatcgcaagaaatatcgaattgttattggattattgcatgcgtttctacgaacgtcagttcgtgacacgttcgaaagtgaacaaagatgtattgatgaagttcgaagacctactcgatgtctatttccaaagtgaacaatcgccaaacgaaaaattgcccacagttaaatatttcgcagacaaggtaaacctgtcatccaactatttcggcgatctgattaaaaaggaaaccggaaagaccgctcaggaatacattcagggaaaaataatcaatatagccaaagaaaggatattggcttcggaaaaaactgtcagtgaaatcgcttatgaactgggattccaatatccgcaacatttcacacggatatttaaaaaggtggtcggctgtacaccgacagaatatagggtcattcaggtatgacaactccaccgggctatgaaacgtatttctaagtaaatataccgaaaacgtggtgaattttaagtttgattactcgtcccgcaaagcatccgcaggattcatccgggcagctttcgacaccgggatgtaagtagccacaaacgaaacagccaggatcaaaatatatgaaatggctgatacaataaggaagtgtaacaccggacgattctgtatataatccggattcggatcatccggcgcaaatgcaaaaccattgagatatacaatttggaattgcgccaaggctcctattacaaatgcaatagtaaccatccaccaggcctccagaagaaattgccggatcaaccgatggcgagtagaccccatcgtcatgtaaattcccatttcctcccgccgtgagttgcaacgcaaccaaaaagtgccgcccatccccaagaacacacagagtagaaaaaatgcagcaaggatgatctgcaaacggatagtgcccgtagttcccatataatactcaaagtgtttactcaccgttttaaaatccgtgagtgacgccagataatagtttccgatctgcatccgcggacgcatctcacgcttaaaagtctcggtgaaagctggtgatgccagtccgtcacgtacgcggaagcagatgcgggccgctcccggaagatggattaattcagaagtagctttgaataccaacggaccgggctgactgatactcctgatttgcaagggatcgattacagcagtcaacggagatttacgggtactgtctccccaatgtatccatttgttctgcggatacttttcaccgaacagtttttcggcaacgtcaggagtcagatagattccctgttctccttccgcaagcaccggaggtatttctcccgtccgggcatcatgtatccggaagactccaaaatagtcggtgccggaaagaaatgtcatctgctgtatatttgcaaagatcgtatcattgaaaagctgtcctccattccaggtaccgctttgcggatatgaattgaaaaagctgacagtcacatcagagactcccggatagcggcgtacctgatctacaatacgcataaaatcaacctgtttcaatgagtccgaatccaactccggattatatctggtatgattggcagagtatgcacctatgctcagcaagtaagtatcagtgaggtcgtaattgtcaggcaatgccttgtcggacaataatacgtacacagggtcgactactccccataagaaataagtcacaaccaccagttcgcccagaatccatccgttggcagcacgctggttccacagttggcggagtatcatcatcaggttcatagctatttatcttttatcgttaagcgaatatacaatatctttcttcaaagcatgcagggccggaatcaaagccgacagcacattcagtatcaaactgaccagaaatgtaatgcctatcaccacaggattcagcaacataccgggagttaagaaactgtcaactccctcgggtatcacatccgaatatgcacttagcaggtcgggtaaccaattacgcccgcaatagacaatcagatacgaaagtaataagcccaacaaccctccaagccccgtaagaaacagattctcccaaaagacctgcatcaggagcgaagctttggaggccccgaaagccttacgtatacccatttcagaaagctgacgtttcatccgcgaagcgatcattcctgccagattcagtgcaggaacaaaaagcaaagccagcaggatagtcccatacgtccgtatcagttttccccaatcgggtgccgaattacaatattcataaaaagtgcttttccaataagatacgggctgtccatataaatcgaccttgtactttttctgagagaaattatatttacggaacgcatcccgcacttccccggcaaccttatctttcgaaccgacagagggtgccaacatataaacactcagatttccaatcaactcataactaccctctttctcctctacgacctcagcatctaccgtcagcggcaaccagatgtcggcatacgtagcaggagtaatgaaggacacatctttaaccacgccacacacttgatattcgtccgagtcgagaacaaaggtacggcccaccggagcattatctccgtaaagccggcgagccaacgttacggaaataacggctttgcgcaatccggaatcaaaatcagcccgggtgaacggcttaccatctacaaaagcgaagctgaaaactttccagaatccggcatctactagtttcacctgtacctctttcagatctttactctccgacagttcaagcagcgatgtagtatgcccgtccaaagaacaccccacagcctcggcactcttcagcggataatagaagcgtttcaccgtctgaaaagatacattcgaactgaaccagttattttcattgccttgctctatcgcagtcatccctttactcaccaggattcggtttcggttctcttcggggtagaccggtgccatcttgatgtaataaatgatcaccaagctcatggtcatggcaatgcctaatcctgtaccaagcacgtacacactgctgaacaaaggattttgtttcagcagttgccaggcttgtttgaaataaagtttaatcatactgtcttatgggtttaacgagtgatcattcgtcacgcagcgcatctaccggactgatacggctaagtttatgtgccggcatccagattccgatggaaactacaatcagcagcaagagatatacgatcagagtaactgccgtaaaatgcaggccgaagtggttgatccagtaagcaggcattgcctcttccgcactgttacaggtagtataaagtccgtccctcaatgcgtattgcaaatagagtaagcagccggtcaacgtacccaatgtggtcagtatccaaccctcgtataacagcaggcgggtgatgtgtgaaggagtaccgccgaaagaaagcataatgcccacctcttcacggcgtgaacgggtctgcatccagaaagttcctgctactcccaggcaaaggttcactaaaaagaagatacccaaagcctggttcagacgatactgattggtgataccctcggaaaattcatgctgctcctgaatgtcactaaacgactgcactgacttcacataatagttaccgactgtcaactccttattcatccactcacggaagtgatgcaagaaaaccttctccgacaaatgatcgtctatacgcaaagctatcagcggaatataatagtacatataatcaggaaactcttcatacacatataactctatgggcatgggctgcatataactccggtagcgaacaggagctatcactccccccacccggtagtcttcctcgtccccgtttccaaggcggcgtccgtaaagcggttttccgtctttcagccgttgtgagatatccgctgtcagcaccgattcggtccacaggaaatcacggttatccaattgttcggccgtcataccctcggctccctccatccccatggtccggaaataatcggtatgaggtataaaggcaagacggagagtgcggaccggaatggtatcgaacatcgtgttgccgttgcttatggaaagtgccgaaggatactgttcgttcaagatgaaagtagtatacttgactccctcgtagtgtttgagtttattgagcaaccgttcgaaattggctttacgcgccaatgtatcattctcttcggcacggaattgctccgacccggcagggtatgaagccaactgaagcaggaaaaggtgatcgggacgatagccttccggcaaattccggtcatgtgtcagcaccaccaacggatcaacaatcacccatgtgacaatcgataccaatattaattcggccagcaaccatccgttcttccggcggcgggcccagaggtttttcattattagtcgtatcatgttttatttcttttcgtttagtgaatcaataatatctttgtgtaacgaacgccatgtgggccaccatgcggaaagcaggttcagtatcaaacaaaaagcaaacgttacgcaaaacatcaaaggactgaacagcatttgcggattgatagccacatcgactccgtcggatatgactgtcggatatttgtcaaacagactaaacacccaattgcgccccagcacaagcagtccccacgaaacaataagtcccatcaatccaccgatacaggtaagaagcagattctcccataacacctggttcaacaattgtttccggttggctccaaacgcttttcgtatccccatttccgccaggcgatcgtccatacggctggatatcatgccactcaggttgatggcaggcaccagcaacaacgccaaaagcgcccctccatacagtttaatgaccgatgcccagtcaatctcgttcgtattgccctctctgaaccatgtctgccaatacggatccggttgatgaaagatatctactgtatactctttctgggaagtattgtatttacgcaccagttcgttgacttccgcataaagtttcggcatatcttctttctgacgaaccttgaagtaaacgacataagtaccgaccttatgacttccatcattgtttttgtcgtatcccggcaaacaagaatacggcatatagatttgtccgtaagatgccggcaacagataactaccctcacgtaccacaccgaccactttggattccttaaagtcttgcttaaacgtctgccctaccacatcggtcctgccgaaaatgcggcgggccatccggtcagaaagtactacattacgaatcccactggctaaatcggcctccgagaaaggcttcccatccagaaattcaaactcgaacaaccgaaaaaaattaggatcggtatactttaccagagccggtatttgctcgcctcccccggccggttgtatataagattccttccgggtcagaaagtgttcgtttacagcggtaaccagctccgccgattgcaatggatagaaccagtctttcagcatttcataagaacaggaatatgaatttccccctcctttgacatgcatggcgcttacccctttcatccgcatcgtcagcgaacggttcacttccggatagataggagctattttaatataatacacgatggcaatgatcattgtcatggcaatggcaagccccgtgcccagcacatagaggctactgaacagtttgttctgccggatcagcatccacgattgttttaaataaagttttatcataatatgtaattttaataattattcataatgcaacgcttcggccggctgcaacttcatggcccggcgggcaggcaaccaggtgcccagtgcaatgatcagtcccataagcagcagcaccccaccaaaactgaccgcaaagcgccaccaagtgaaagagagattgtataaatcgggaatctccatgtgtaccatattgaatatgacaaccaataccaacggaaccaccgtggtgagcaatagccacccctcggcagtaaagaaccaccctacccgccggcgcgtactgccgagtgccatccgcaggccggtctcgcagcgccgttgctcgatgcgcagccagaatgttcccgttataccgaaaagtacattgagcaggatgaagacagacagcaggaggttgatactgatctttcgccattcgtattgcagacgatcactgcgctgttgcttcatatcttccatgccggttatgtagagattgttttccgtcaactgattcttcatacggttgagaaaatgtcccatctgttccgatgtcagttcttctttcattcggacagtaacctccatattagatgctccggtagcatttacctggcgttccagttccttgggccacatcgtaaagaaaagttcgggttccggctttacaaattctgtaatacgcaccggagctgttaccgccgcaatatgaatctcccgcgtactgcccggataacgcaccttctgtcctactgccgattgtgagccgaaaaaatctttctccaacgcaggagttataaaatacgacaactgtttctgagtcagcggttcgctaagcggtttcccctcacggctcttgatgcggaatacatcatagaattccgcagaaacgatatattgatgataagattgctctttgaacttgctgctgtcggctgtacagggcatgatctgtgtccaggagttgccaccggaatagggtgaagagtagaaagcaacgcaagcattatccacctccggtgcacgacgcaagcgttcaaggattttggccaacgcctccccttcggtttgggtccgggtggtgtcattgacatactcgtcggcatcctcgggatacacatcgaacgaaagtttccagcagttcgtgatatcatatcccatcggacgggtataagaatacaactgtaccacaaacatatctaccaggtaccacagtgccacgaatacgaccagaagttccatccatatccagccgttcaagcgacgttggttccatatcattttaaatatttgctttatcatcatgggtctttgcttttaaaaattattccatatcatgcaacgcttccgtaataggcatccgcgaagctcgccaggcaggaatcgcagcactcagcagattcaatatcaacgtaaaaaagaaagctgccacaaaagtgagaggctgtatcagcatgtcgtgcgtcagcgaaacatctcccgaaaagaaaagcgatttgcagagtgacagcaagccgaatgacagcagcaacccgatcaggccacccatgcaagaggtcagtaaattttcgatcaccacttgttctaccaacgagaacgaacatgcgccaaacgctttacgaactccaatctcgctacggcgtttgcgaaactgtgtcagggttatacctattatattaagggctggcaacaacaaaagaaaaaggatcaccgcaccggtcgatttcaaccattcgcccacggttccctcactgaagccattcgtgcccaatacagcctgccattgagtgaaaggagaatgcatataatccagcttcgtaccggtgagcgaagcattgaaagttgactgtaacttcaacatctcacggcggatggcctcaaagtcggaccgggaacgcgatagaatgcaagcctgaaactctccggtagtaccttcacaataagagatattgtctttcaataaagaagcgttggcggtatagggtatccacacatcaccataggaactttcggcagcccgactgacctctttcaccacaccacatatccggtaatcggcataattcatacgcaaagtttgtcccactgcctcaacagtaccgaacagtctgcgcgccagcttgtcagaaatgactgccttgcgtatgcccgactcccaatcggtatgtgtaaaaggaccgccggccaagaaagtaaaatcgaaaaccttccaaaaaccgtcatcggtaaacttgatagcatatttatcgtaaaactgctgtccgtgtacgttgaccggaagatctccggaagtaaaagcagtcactgcctcgggagtctgcaaaggataaaggcattcgcgcacaaccttatggctcataccaccgttgttgatgggatgaccgtcactcccacatgcctgcagactgctcacaaacagaatccgatatcggttagactcgggtgcatacgcagaaaaatttacttggtagacaagataaataagcatcacggccgccaccgacaaagctgtacccgcaatagagataccatttacgaaacggttctccttcagcaagttataggattgtttgagataaattgttatcataattttgcatattaaaaggcacacggcttaccttttaaaccaagacctcgttggtttaaaaccaacaggcctttagtttaaaatctaagggggcttcattcaaaagatattttaggagtattatttcactttcagtttattcttatttttgtagttcgtcatgtcgctgaccactaccttgtcgcccgggttcaatccgctcaccacttctacaaattcaaagttggagtcgcccaactggattttacgttttacgatttcatcatccgaagtcatcacaaacagatcgtactcgccccggcctacgtaataagaagcattggctatgcgcagcacatcttccttcacagcgttcatcacgtatacatcggtcttaagtcccgaacgcaaccgcttgttgttgtcctctttcaattgcacggagaatgaaataaccccattcttcgaaagcggggtgacactgctcacgattccctcgagtttctcgctgcctatctttacaatggctttgccaccggctgccacacggtcaccataagtatcggctatttcaccatccactttgaaatggctcaggtcggaaataatggctacctgtccgccttgcggaatctgggctccgatctggttgttgatgtaagtaaggatggctttgcgcggcgaacgaatctgggcatcgtccagggtacgcttcatttcggcaagtcctttacggaacatattgagatcgagttcaagaaccttcaggtcagcggctgctatttgcttttcgttggcatattgctgtttaagctgttccagttcaaggcgggaagtattgtagctcagttcggcctggcgcaccttgtcggtcgtaccggctccaaggctgtccagatactgttcattgcgaagttccactttcatccgggcaagtttcatttccgacactttgatctgcatcgccatatcgctcagtttggtctggctgttcacttttgcctgatcgagcttataacgtttcatttcttcttcgtccagcagctttttatagtcggtttccgtactctgcaagtcgagtttcaagatgggcgtacctacatctacactatcaccgccttttctatacacctccacgatgcgggtattgatcggtgaattgatgatctcttcaaaagcaggcaccactttgcccgaagcactgacactgacttcaatcgtacccttatcgacggtagaaaacacaaggtcctttttctgcacgcctgtacgcaacaacgaaatcagtacgctgatacctattatcccgacgataccgatagccgaaaaacggataatctttttattacgctctttattgcgcacctctttaggaatttctctgtccatatatagttaattataaatttgcactgttctttatgcctctatattcaaaccttgtgccaaaaaaggaaagcattgagtttcaagggaaaaaaaagaaagagggtgtccgataatgaacaccctgtacagtttcgtaacaaagcagtactccctttttccgataaccgattgtaagtccggcaagaaaagaccatgatccgggtgtagccatccgacggaaagggtgtagccccgacggcaaaagggtgtaaccatccgtgagggaaggctacacccttttattgtcaacgtatttctgatatgctccgcagccggaagtgaagcctatctcagcctcagcctgtctcccacttcaggaatataatctccgtccttgcggttcatcttgtacaggttcttcagccggatggcaaatttctgcgaaatggtatgcatggagtctccgtcttttacgatatagaccgtataaggtttggatgcccgctttttcttctctttcagatagatgatgtcaccgctcatcaaagtatagtcacgctgcagatcgttgtacttcaccagcttcttccagcggatatcgaactctttggccagcgacttaaaggtatccccgtcacgggctacgatataagcgatgccgtttgctatgtaaacctgatgcggattgagcaccgtcggttcactcttcgacgaactccatccccccttacggtcatatttatagaggtcgtaatcttcaatgatcgttatcagacggttggcatacgaaggatcggtggcatatccggcctttttcaaaccacgcgcccaccccttataatcggttatcttcagtttaaaaaggaatgcatagcgggctccgcgcttcaggaatgcagaatggtcctcgtacgagtcgcggggattgcggtacgcacgaaaacactcgttacgggcatcgtcgtcatgacgaacggtacgcccattccaattactgccacacttgatgccgaagtgattattacttttacgagccaacgtactcatgcccgcaccactctcaagcaatccctgagccagtgtgatactggcaggtatcttatgctctttcatttgctgcacggccagggcactatacttatttatataatctacgtaacgggaattcctgcgctgcgcctgggcacctgcagcaaaagcaaggactgtaactatggcaatcagcctgaggagtttgctattcatctattatttgtgtatcttaagttatgcggcacaaaaatcataaaaataattgggattatcaatctcttttctaactttgtaacatgatttgtagaactataaaccacctacgcacatgaaagacctgactattacctctgtaatcaaagtatatgaatatgatgaactcaatgatacagaccgtgccttattggatgacgccatcgaggcaacccggcgcagctatgcaccttactcgcacttttcggtaggagcggcagcactgctggccaacggtgtggtagtgacaggaaccaatcaggagaatgcggcctatccgtccggactctgtgccgaacgcaccacgctattttatgccaactcgcagtatcccgaccaagctgtggtgacacttgccatcgctgcacgtaccgagaaggactttatcgacactcctatcccgccctgcggtgcttgtcgccaggtgattctggaaacagagaaacgatataaacagcccatccgtatattgctttatggcaagaagtgtatctacgaagtacaaagcatcggacatttattacccctgtcatttgacgcatcagccatggaggattgattatgataagaacttaccagaccaaactgaaaggtatgctggcactgactaccagctatcacaccgaaaagagcctgcagaaagaaaagagtttatataaattcatctgggtacgcaaaggaagcatcaccctcgagatagaccatcaggaagtgatactggccgagaacgaggtcatctccctttccaacctccagcacctggaatttctttcgatcgacggagagtacctgacggttctgttcaacagtaacttctattgcatttacggcaatgaccacgaagtgtcatgcagcggattcctgttcaacggttcttcgcatgtcgttcgtttcatgctcaacgaatcggaacggaggtcgatggaagacgtagtgggattgctggaccgtgagttcaccgtgtcggacaaccttcaggaagaaatgctccgcatcctgctcaaacgtttcattatccaaagcacgcgtattgcccgccaacggctgaacattacccaggaaaaagaatacagcttcgaaatcatccgccagtattataacctggtggacgaacacttccggaccaagaaacaggtacaggactatgccgacttgttgcacaaatcgcccaaaaccctttcaaacatcttttcttcctgcaaattgccgtcacctctgcgagtcatccacgaacgggtggaagcggaagccaagcgactccttttatatagtaataagagttcgaaggagattgccgacatcctgggattcgaagaccaatcttccttcagccgtttctttaaaaatatgaccggagaaagccccgtacaataccgaaattcggtagaagggaagaattgacaattcatacggcgatattgctatttcgcaccgatgggaaaaccctgatctttgcatcagaaagttaaacccataaaaagaaatagcatgaaagagaaatttatcactctgctcacagtagcatccggtctgaaaggtttcggactaaagtttatccgcgtagccatcctcgttgttttcgtatggatcggcggtttgaagtattttcattacgaagccgacggcattgttccgttcgtagccaacagtccgtttatgagtttcttctatgccaaagacgcacccgagtataaagagcacaaaaaccccgaaggcgcctatgtccccgccaaccgtgaatggcacgaagcgaacagaacctacacgttctcttacggactgggagctctgattatgtccatcggcattctggttttcttaggcatcttcttccccaaagtggcacttgtaggcgacacactggccatcatcatgacgcttggcactctctccttcctggtgactactcccgaagtctgggttccgaacctgggaagcggagaatacggcttccccttgctgtccggtgccggacgtctggttattaaagatatcgtaattctggcgagcgccgttaccctactctccgactcctcacagcgtgtactgaattcattgaagaaagccgactgggaaaagcgaaacaaataagggttgcggaatgttataaacttacataaagatacatcctaaaagtaataagaattatgaaacaatatgatgccattattatcggtttcggcaaaggaggcaaaacgctgactgccgaattagccaaacgcggctggaaggtcgcactgattgaacgttccgccatgatgtatggaggtacttgtcccaatatagcttgcgtacccaccaagcggcttatccacgaagccgaaaaggtgagttggctctatcctaccgattacgagaagcaggctgaggcttacaaagctgccatagcacgcaagaacgagatgacagcagcttcaagggccaatatgttcaataaactgagcagccttcccaacgtgaccatctataccggaatggcatcgttcgtttcaaaggatgtagtgaaagtaaccctccccgacgaagtgatcgaacttcagggaaagaagattttcattaataccggctctaccagcattataccggccattgacgggctgaaagacagcaagcgggtatataccagcacctcactgatggaactggacgtattgccacgccatctgatcattgtgggcggcggctacatcggcctggagtttgcctcgatgtacgcaagcttcggcagtaaagtgaccgtactcgaaggaggcaataagtttattgcccgcgaagaccgtgatatagcggatgccgttaaggagacactcgaaaagaaagggatagaaatccgtctcaatgcccgtgcccaatccatacaagacacagccgacggcgtgacgctgacttacacggatacagccgacggaaaccccgtcactatagaaggcgacgccatcctggtagccacaggacgcaaaccgatgaccgaaggtctgaatcttcaggcggccggagtcgaagtagacagtcacggagctatcgtcgtaaacggttatctgcataccactgccccgaacatctgggcaatgggtgatgtaaaaggcggattgcagtttacttatatttcgctggatgattaccggattatccgggatgaccttttcggcaacaaagaacgcacggccgacgaccgcaatccggtggcatactcggtatttatagacccgcctctctcacacgtcggactgactgaggaagaagccatcaaacgaggatattccttcaaggtgtcacgccttccggcctccgcactgccgcgtgcacgcacgctgcaacagactgacggcatactgaaagccatcgtcgacagccattcgggacgtattatgggttgtacactgttctgtgccgaatcttccgaagtcatcaatgtggtaaacatggcaatgaagacaggacagcattatactttccttcgcgatttcatctttacccatccgagtatgggcgagggactgaacgatttgttttcaatagattagtttaaaacccctgttttacacgattcaggacaaccttttcatttggagaggggagaaatatccgatttcttccctctctttttttgcagttaccggaatatcctctatctttgcgacctaatttcatacttatacccatgagaatatctaagtaagacaacacttccggtaaacatcacttttctcaatatgcttcttttcattcactgttaagcatcacgaatccgtgttgttcagcctctattgtgtttgtctgtccccttcctgcttcccacaaaatcaacagcaagtatttactttcaaaacaatagaccgttatgtgtattcaagtacaacaaatcacctatatccatccagacaaagaagttctcttccggaatctcagtttcaccgtcggcaaaggccggcaattggccctgatcggcaacaatgggtgcggcaaatcgacattgctgcaaatcatggccggaaaattacaaccgtcttcggggaacgtgctccgccccgacgacctctattatgtgcctcaacacttcgggcaatatgatgaaatgagcattgcccaagccctcgggatagaccggaagcagaaagcacttcatgaaattctgaacggaaatgcctccatcgatcatttcaacatcctcgatgacgactggaatatcgaagaaaaagccttagccgccctcaacggctggggactcggaaacagatccctttccgaatccatgcacacactgagcggtggagaaaagacgcgggtcttcctggctggcctggaactgcaagagccttccgccgtattgatggacgaaccgaccaatcaccttgataaccaaggacgcaaccgactgtacgaatgggtaaagaaatgccgttccaccctgatcgttgtcagtcacgaccgtactctgctcaacaggcttcccgaaacctgcgaactgagccggaacgcacttgtgtgttacggaggcaattacgaattctacaagcagcagaaagaactgcaacagaacgccctgcaacaacaactggacgagaaagaaaaagaactccgccaaatacgaaaactggcacgcgaagtagccgaacgaaaagaaaagcagaatatacggagcgaaaaatcagtgcctaaaaaaggcatctcccgcatggcggttcacaccctgaaggaccgggcagaaaaaagtaccaccaaactggcggacatccatcagaataagtcagagaaactgaccagcgaacgtagcctgatacgcaacaggctggccgaaaacgctttgcttaaaaccgacttccatgcttccgccttacatacgggaaaaacattgctggctgcccatgaaataaacttttcttatggaaattcgcctttatgggaggttccactctgctttcaactgaagagtggcgaccggatacgaatcgaaggagacaatggaagcggcaaaacgactttattgaaattggttacgggtgacctattgccaacatcgggtacactggaacgcgccgggttcagttatgtctatctgaatcaggaatattccatcatctgcaatcagctgacggtgcttcaacaagcagaatcattcaatgtacgtgccctgccggagcacgaaataaaaatcaggttgaatcgctttctcttcccggcaacgagctgggatcaaccttgcatccaactcagtggaggcgaaaaaatgcgactcgctttctgctgcctgatgattagtaacaacacgcccgacctctttatcctggacgagcctaccaacaatctggatatacaaagtatcgaaatcatcacagctaccgttcggaactatacgggcagtgtactgcttgtatcacatgatgaatattttgtaaaggaaaccggcatcagaaagagtatctttttataattttgcaccaattaaaaagaataatcccaaaatgataaatacagaaaccaactaccggtggttcatcttttaccaagatcagttactgttggaaaagaacgacaatgctttttccatccccacgggcaagaatgcccctgtcaccactccggaaggaataaccgtacacaccatcaccacggcaacgggcatggtatgcaaagctttctacacagactctccgatagccgaaactccggaatacgtgcagataggattgcgcgcttcttatgattacttgtcgccggaacactatcaggccgcaggcaaggttcacgaaattctctactgggaccgcagcaaccgtttctgccccacttgtggaactccgctggtacagaaagaacccattatgaagaaatgcccgaattgtggcagagaaatctatccggtcatctcaacagccatcctggtattggtgcggaaagaagactccctgttattggtacatgcccgcaactttaaaggtactttcaatagcctagtagccggattcctcgaaacaggcgagacattggaagagtgtgtggcaagggaagtaaaagaagaaaccgggctcgatgtgaaaaacatccgttatttcggcagtcagccctggccttatccgagcggactgatggtgggatttatcgccgactacgccggtggtgacatccacctgcaagatgacgagctcagctccgggaacttctataccagggatcacttgccggaacttccccgcaaactcagcctggcacgtaagatgatcgactggtggatcgcacaacagtaaaaacagaacaagctacggaaggtacacctaccacaaacgaacaaccagggacgaatcgaaaagaaacccgtcctcaggatcataaacctgtgtacctgtccgtagcttgtatttgattacaaaacttctattcgaagatcgtcaactcttccagccccagcttctcttcccagtcactgatagtcatctggcaaagatcggccggtttcatatcggcaggaatagcattttgcgccatataaacggcaggagtgcacgacagggcacaacctacctgaccgggttctacaaatgtatatttataaccgatgtaaatacggtcgtagatcacatcctgatcttcaccgcaaagggcaatactgttggtcgctttgcgaagtataccttccagaaaaccgatggcttcaccttctgttgtcgaatcgtctccataagtacctgcatcctttacaaacaggcaagctcctttactacggtctttcagaatggccaggccgattacagaccatacccatacaggaccgcatgccacaacttttctgctacctcccggtacgtaagctcccggaagcacagggaaacggcgctccttggcacggccgaacagacgttcggttgcctccagcaacggacggatattataaacagggatgtccgctccttcgggttgcgcctgcatgtagataggcatctctttccttttggcaatgtcatcgtgcatcgccaggtcaaatccccagatggctccattctgtccgcaaaaagacgaggctttcatcaggttgacttgcccgagatacgcatcgttcttctcacaacgatccttcgctacaatcctttcggttattgcatcgaggtctttcacgtcgactgtgccgactgacaatttcatagtcgaaatatatccttcaccacccacaacgccgggatttaaatatcccatgcaaaattctttacttggccctatagcctgactaatcacattagaggcatcataccggatgccggacacaagatctttcatacgtttttaagtttagatgttgcagtaagaacaatatatcctcaagaatgattgacccctactccctaaagaaagcaaaagaagacgaagaagataaaatgttaaaagaggtgaggttaccaattgggcaagtgcaaacagatatcccattaacctgtctattattcaaagagtacgttccacgcaatgatcagcttaaaaaccgatagtttgtcctatagataatatcacattaagattgaagctaattaaaaagcaaacaaatcgggaccatccggttcaaatcgttctttatcattatggatcagggaaaggtaaaaagagaaaaatgcgcaagttgtatttctcaaccgacacggaattaaaaagtttctgtgaaagaacttttgcacaactgctttctcctgcaacgatttatttccgtattggacattcagccctgtttaggaaataaatcgaaagcaatggaaagacagaattaaatttgcggcataagtgcctgttaaatatttaataaaccaagataatttcaatccgttttaccgaaaatatagaccttacattgatatggggccagttttactatcagttcctttgaatcactaccactctttgtcaaatggctgtccaaacagtatatctgctcgaatgataaatcggcaatcgtattttcattcaatatcacagtttgcggagagcttgcccggttaaagcaagccacagctttacgtccatctgccaacggctttacccaaatatcataatgatccgaacgaatgctgcgttctgcctgcctacctaacacatcctgattaatggctattaaatcaggatccaacaagatttttaatgtactatcattcatattccgtacatcgtttccggaaagtaaaggagaagccatcatacaccacaggctaaaatgggatttatattgttcctgagtacatccttccgactcataaccaatactcatactctttccatctattccgaccactaacatatccggatcattccaaccggatggaccggcatattcactcagaggagcattgatttcaaggatattcaatataccatgtaatccaccaacacgatttccatcccgataccaaatgtcaccgatatctcctgatactctccataaatgtccccccacttgcttcgcccatttccaaggttcacgctgtccccactcacacactgaatagacaatcgaacgattggtagcccgtagtgcccttcccattttcgcatatcgctccatggcttctaccctatctacaggagcattgcaatagtcatatttcaacaagtcaactccccaagaggcaaaatcttttgcatctgtttcttcatatccgtagctaccgcaaacgccgccacaagttttttcggcggcatccgaataaattcccaatttaaacccacgctcgtgcagataatcagctacatattttatcccacgtggaaacttagttttatcaatctgcaaatgtccgtcagctcctcgttccggcaactgccaaaagtcatctatattgatataggaatatcctaaatcacgcattccgttcgttatcatcgcatccgccgtttgcaagaccaattcttctgtcagatgctgtccgaaagtattccaactgttccagcccattggaggagttaataataattcatcaccaatgcggatgaccaattgtttcacacttacacctaatgcattctcagccttcagggttacagtataatctcctttggaagtcacgactccactaataatgccagtcttggaatccagttccagtccttcggggagtttttccgcactccactgcatcggtcgctgaccggaagtcggaatataaaagataaatggagttgaaggataattacctatgatatgaggagaattgatacgtggtttcccttcaaatacttttaaaacaacatctccggcaaaaacagaaggaatgactgtccataaagctaaagagagtaaaaatgcaatgaaatagggtttgttcatagttcttcttttattaatttcactaaataatataataacagatgaaggaaaatattctcaaatatcttccttcatcatttcaatcagtaatccgaataacctcaatcgttattcttatttcacaaaatccgtaatctttattgtccactctcttttcgtaccgtcggcagcagtcacctgatatttaaactccttagctgaaaaatcgccaggactacccaacttaggcgctccgtttaagggcataattctagcagcagtagaaagatctatataagcaataagattacttaatgatacattttgcctgacagcatctgtaaaactaccactggccgttggaaccgtcagcttacaggtaatcagattgtcgtctttcgaaatttgtttttcaatgttgagtgttttaacagccatctgatccttagcctcatcccaccaacggtattcaaagttcaaattagtaatttcagcctcattataggcctctaaatcatccaatcctgatttcaggcacgatgaaacggtacctattagaaatagtaacaaaacagtatttataagtttcttcatattcgtaatactttaattattagacgtccagcatttttctactaccacccctcgttctggtccagatttggattcagatcacgttgtccttgaggtacagggaacaaataatgtttcttggtaaaagtacgctcattatcactttggtaaatgggtatcggaattatctcaaaagattttccatcaggagctattttcatgaacttctgttcaactgtcagttccggaacaacctccagaccgtcggccttaccccaacgaagtacactccagtatcggtcgccttcactgaccagttctatacggcgttcacgtttatactctttccaggtatcttccagtgataaggatttttgcaattccggcaaaccgccatgagttaccctcgtcctattgatatagtcaatagccgtttccttatcaccttggcgcaactttatttccgcataattcagataagagcgtcccaaacgtaacaaagtataatgataatccgttttttccgagttcagcaaacgtttggcttcataaacgcatttccgataaacatatcctgataccggcattccccagaattctgtcgttttagaagtataataaagattacctccctcacgaagccacaccctattagcgaaataagaacatccgtcgtaaacgatagaagctttgaatcgtttatcacgattcttgtaaatagcatcttcaaccgtccctccgtcaaccaggaatttcttataataagaagtctggtcccactctttggcttttccatcctcatcaactacaagataatcatttaccaaatcaacagaaggaaatctttgcggccaacctgccatctcctctaccaagggatactttgcctgcacatcggcaatcaatttagagggatcaatattaggtaccagtctctgcatccacgtatctgaaaagttcgtattttcagcacttctccattgtgccaggattatctcgctcgaagccaatgaatgatcgtaatcattgaacataccggcgtagttaccatccagtgagtatttgtccagtgcaaacagatcttcacaggcctttgccgctatccggtaatactcctcctgtccattctcaatatatgcagccccatgcaaagctgcttctcccaacaatgcgtaggcaacaccgcgtgacaatgcaccggacggagcatctacaggcagatcaggagcagcctccctgaggtcgttcagtatgaaatcataagtttctttcactgtagccgtacgagggaatttcatatccgcttccggatcaataagttcttttactaacattagtttaccgaacaagcgggcacgcgtaaaataaatcatagcacgtatcgtcttagcctgtgctataaaattagccttttccgcattcgtaaagggtgcttccggaacacgtgccaacaccatattgcaacgacggatatcttcatacttattccatccggcatcataataacggtctatcaattctgcattcacatcccgcccatcttccatgatagcttcattatccgtccaattgtctttccaaaccatcatattcgtagcatttgccaacgcagtataaatgaatgcttgtgtcaggtcagtacttttccacacatcattttccgaatatttgtcaagcggtcccttgtccaatatatcactgcaggaaaaggcgaccaaggcaaatagtataattacaaataaattctttatcttattcatatgtattcctccctattaaaaacctattgttacaccaattgaataaactctttgtacaggatagccgtcgccgctggtacttgatgtttccggatcgaaaaatttgctaacacctgaaatagtgaaaagattactaccactcagattcacacgacacgtctgcaaccagtcacattttttcaggtatttatatttaaagtcatagctcaactgcaaatccttcagacgaagatatgatgcattccgcatccagaaagtcgatcctgccttattattatttccgtttacaccggaactgatcgaaattctaggaaaatccgcacctgtattgtccggtctccaataattcaactggttttcataatacaggtattttccttcacctgactgataacgattgccaaaagtcatgtagcgttcacctgtcccataaagtaaaccggacaaagtgaatccttcataacccaaagaaaaatcaaaggcataagtaaagtgaggcattgtcggctttccgatacgtacctggtcttcaccgtctattttaccatcaccgttcacatccgtataaccaatgtctccgagcttagtttgggtagatcccaatcttcggggagagttcaggatatcctctttgttttgataaagtcctgtatctatgtatcccaacccatagtaatcggtctgatgtgtttgacgtttgtaaggattcatcaagtcagataatgcttcatccgctttcactttccacaggctattaaagtaggtcatattgaaccctacttcataagtgaatttacgcggagtcgtatctgaccagcgcattgtcaactccacaccttcgcgacgttgttcgctattcgattttatttgtggtaaaggtttacccaaaggagttgtataacggtctcccggactcatcaaaccacctttggttacgtaatagaaataatcaaaggtacctttcaagcgattattgaagaaagccatatccaatcccaggttaaaggaattcacctgataccagctcagcagttccggagacaccaaagccccttcactaaatcctgattgcagttttcccccaatcactatttttttctcatccagactataggtagaaagatagccgaaacgatttactccattttccgtaccggtctgtccataagaagcgcgtagcttgagcaaatcgaatacatgttgatcccactctttgaagaaaggttcttcactgatggcccacgccaccgctccggaggggaagaatccccaacgatgtcctggagtgaagttatccgatccatcgtaacggaaactaccttccacgatataccgattcataaagtcatatttcaaacggcctaccaatcccatacgtcctccttcatccgaattgccgccattctgctgcgtatctgctgcaccggcaaatagctggtccacaaccgtagataagtattccccacgatatgcattaaaattccatcctgtattttctgcaacattataaacgaatttagcatcaatcgtatgcttttcggcaaaagttttcacataagcggcacttacttcgaaattgtaggactctccccaatagccttcttcattcaatgtcggtttacctattggatatacagctccatctgcgtaatactgaggagccttggtactgaatttcttcacatgtgagtcgttcagacgatagttgaacatagcacccaaggttaactcctttaaccaaggcaatgtccagtctgcagccacttgggtatttatgaatttgccatagttcctgttatatcccgaacgcttgtccatttccgccaacggatggtcggtaactgcggcataagtaccatccttattgtaagccggattcagcggagactggttataaagatcttcccagatctttgccgctgagaaagaggggtattcctttttttcataagctccgttcagattcaggctgaccttcagaccaatcttatcaaaagtcgtgttaacattactgcgaactgtatagcggtcatagttcaatgcattcgaagtatagatactaccttgattgagcatacccagagaaatatagtaattcaccttattgccacttccactcaatgataccgtatgcttgtattgaggagcaacagttttcaatccttctcccagccaatctgtatcggcgtgtccggatgtataaggatctgactgatttttaatgatatccaatacttcctgattaaaaggtaaatctgcctcgtccaaaccatcattgataccggcaagcatttggttataagcatagtcataaccacgagtctttttcagtaatttggtaggttggctgaattcagcattaaacgtataattcaccgctgtctttcccttacctccctgtttggttttcaccatcacgataccattggcagcccgtgaaccgtaaacagccagagatgctgcatcctttagaattgaaaggctttcgatatcattcggattcaacgtattgaaatcccaagcatcggaaataacaccatctatgacatagacaggtgcgccaccgccacggatcgagatagaaggggcagatcccggttcaccacctgatgattgtacaataacacctgttgcacgtccggccagtgaagctgctacactattaaatggcaagtcctgtagtttctcacctttcacggctgtaacagcagacgccatcttgcgtgtagaagtagtaccataaccaattacaacgacttcgtccaacattttattatcctcagacaacaccacatggatctgtttttgcccagctatgggaactttcgtatccaaatagcctatgtaactgatagcaagcacatcctttggagcaacctccaagataaaattaccatcgagatcagtaatagttcctttatctgtaccttgtattttgacattcgctccaataatagcctctcctgtcttatcgacaacttttccggttatctttttagtttgctgttgctgaacggcggacgagctattgtgaacttcttctacttttttttctaatataatatgcgaaccttccaatttatattcaataccagtgttctgtaatatttgatccaatacctttgaaaccgtctgcttatttgccttaatagtaactagcttatttacatttatctgactattataaataaaaagataatccgtctgactctctatctcctctaggaccttattgagtcctacattatccatggcaaaactaactcttgtattttgagaataggaatttccggcatataaagaaaaaacacatgccatcaataggaacaatgtaattctcataattctaaaaaaatgttttatttggggatttttagggtaatatgcccccgacaaagtgttatttttcatacctttgtatagattttaaattgatacatttttaataaaaaattgtgttgatttcttatgccggtaggtgcgggaacacctatcggcattctcaataggttaacttagatcatttttcataggcatttcgcttttaagaattaatactttattttatatagataatttgtttttcattatctttctcatattggaaatctatatttttctgtaagatacgaagcgcataatctattccgtcggtttgtctgaatttccccgtaaaattaatctgcaatacatttttattctctatcactattttcactccgtaatacttttcaaagtctttcataatattaggaaaagattcgtcagagaaacagataagcccttctttccatcgataaggattataatcttccactttagtcattacaaaccgtcctttttctaatgacaatttatgatcaggctttaatattactgtttgcgatgaatctgctttcaaagtgaccttaacactgccatgcatcaatgtagtttcaaatttttctgtttccggatatgcatccacattaaacttcgtacctaatacttcgatgctataagcgtctgtgtgcactataaacggtctgcttttattctttttcacatcaaaataagcttctccttttagtataacgaaacgctcccggctgttaaaagaagtcggatattgtatcgttgtacatgcatttaaccaaacattactaccatcgggtaatgtgacattggttctttgtccttcaggaacagaaatcgtactcattgccactgaatccagaccggctttatactcctgatagaaataactaagcagaaatgtcaatattacagtcatggcaattttcagccactctatttttttataatgtgtaaaattgaaaaaagaggttttctttaccggaagcggattattaagcatcaaggcatcaaaaattttacgttccctatagaaggcgcgctcgttttcgtctgatgcttctacccaagccttgaccctttgtccttcttctatggaaacctttcctttataaaaattatatagtaaatctttgtccatgacaatgtattaatgtccctttatgtataaggcacttcatgggaaaggtatcctagtgaaatttcatcaaaaaataaagaaataatggaaaataatcttttaggttaatctgtaatgcctttaaagctttacaaatatgaaagtctacacctttggttgtcatattcattaaagcagcaatctccttatacgatttgttttcataacggcttaaaataaatattttgcgtgtacgttccggcagtttatccaaagtttgctgaatcaactcttgcatctctttgactaaaagttcataaggttcgcaagcatctaaagaaacgatacgtgcattgagttcccactcaatatattttctaatattttcagaatgttcttcccgtatctgcaaatgacgaagataattaagacttttgttttttatgatggtaagtatatatgcaggaatattggatacttcagataaagtatttctgttttcccaataataaattaacgcctctgttgttatatcttccgctacatcccaatctctgacataggtattagcaaaattcaaaaaacgtgtctgataatcattatatagctgattaaaagatattttatctttcggattagtcttaatatgcattacataggattaaaaggttctaaaaatattttcataaacatcgcacaagactccttcatttcgttgtgtatctttgacgtgcgaaggtcacaaattaattattaaacaaagaacttttaaaaggattttaatatataatattatatattatgatagtaaaatggctaattatcatttataatttgcaaaaaactttacttatatactatcaacacattaaccacttttttaggatggaggatacatactcgtgaaaaaacagatttatactcactgacggagaaggccatacttctattagttatattctaatagatcttctgaacctagactgattcagcatcaaggataaagtgcaaataagagttcatattctaaagtaatgttatgaatatatcagcacctcaagtcgcaaagttatataagtgtctcaggcaatatctctaagttaaagacctttggactacgactaaaagtaccgtaaaaatatagaaatagaacttcagccgaataaataaaatacaaagaagaaagtataattaaaaaacaattcacagcacatccctctatgacagtacccaagtaattgactgtcggtttgcattcgatggaaaaaataagttctcgccaggtcctgagaactatttatccaggaaaacgacagtgatcgtttccctgtcactctccctatcattgtagaaacgggaaaaatcagcacgcggataggagacattgtccaggtggaaggcactgcacaggtcctcggctttttagagaatagtcccaaaagaaatgccccatccaatgaaggacaaggcattccaataatattatggatacatttatatgatgctaagtatccgtcaaaagagtatttaaaatagctcctttaaatacccagtgacttcttcactgcttctactttttcagtagcttccgcatcggcagtagcaaaacagttgcggcatcccatctcacctttcacttcgatatagaatttgatcttcggctccgttcctgacggacgaacagatacttttccaccgtcttctgtgaaatattgcagtacattcgatggttccggcatatcgatgtcagtcacatggcccgctgcgtcggtttgtttcagagtcttgtaatctttcgacagaaccactttcgaaccacccaactctttcggagggttagcacggaaattctccatcatggctttaatctcttccgcaccgctcttacctggtttcacaacgtttacagtaaattccttagagaatccatattcaacgtagatgtccatcagcaactgatacagagtctttccgttatccttggcccaagcagccacttcggcaatcaggcagcaagcagaaacagcgtctttatcacgaacaaagtcctcagccaggaagccatagctttcttcaccaccgccgatgtatttcttcttgccttcacgcaaacgaatttcacgggcaatccatttgaaaccggtgtagcaatcgagcatctcaatgtgattcttatcggcaatcttcttgatcagttcggtagtaacgatagttttcacacaaaattcattaccggtcattttgcccagtttgttatattgagtgatgatgtaataaagatacatcagacaagtctggttaccgttaatcaatacccattcgcctttatcgttcttacaagcgatacctacgcggtcggcatccgggtcggaagccattacaaggtcggcatcaatttctttagccagattaagagccatcgtcaaagcttccgcattctccggattcggagagacaactgtcgggaagttaccgtccttaatcatctgctcgggcacggtatatacgttctcgaatccccacatcttcagtgcacgcggaatcagcatcatgcctgtaccgtggatcggagtgtatacaatcttcatatctttatggcgggcgatcgcttcaggatcgatagaaacagtcttcaccatatccagatatatcttatcgacatcttctccgatgatctgaatcagatccgggttaccctggaacttgatatcggcagcagaagcaatcttatttacttcatcgataatgcccttatcgtgcggagccagtacttgcgcaccgtcgtcccaataagccttataaccgttgtattctttcgggttgtgtgaagcagtcaggataatgccgctctggcaaccgagatgacggatggcaaaagacatctccggagtgggacgcatctcttcgaacaaatataccttaatgccattggccgagaaaatatccgcagagatcttggcaaacagagaactgttgttacggcaatcgtatccgactacaaccgaaatctgtttcatatctttaaagtttgcgttcagatagttagagagtccctgggtagcagctccgacagtatagatgttcatacgattggtacctacgcccatgatcccacggagtccgcccgtaccaaactcgagatctttgtaaaaggcctcgatcaattctgtcttatcttcgttctccagcatgcgtttcacttcagcctgagtttcggcatcatacgccggggtcagccacttttcggctttctcagtcacctgtttgattagttcttcattccccatggttctatctatattttagagattaataattagtttatttaaaatacaaatgtaaaagaataagtttgaaattcctatcttttagtcagaaaactctttggaagcgattattcggttaccttatagcgttctcctgtttgcttcacatactcttcgaggaattcctttgaatagcccggacgtaccacgcctgcaggttgaccaatggcattacgctcgaacttgccgtccttcatcttacggatgacaccatcattgtacttcacaatgataaattcgcccaaacgtttccaagtatcgaaagtgctttgcgctgtcatgtcggtatagttggtcagaaacttcacagccgtttccggattcttctcgtacaacttaacagcaactgcttcaataccttcctgtgcctcgttgaaggtggtttcaagttcgttctgcgtagcacgtacatcgccgatcatcaaatcgtagcggggatataccatgttggccacccagttgaaaatccaaaaagcggagttccaggagaaggtgatgtaatcggcaccgtctacacgcgtatagcataccggagctttggtagtacaacaatatacgggagtgaaaacagtcatgttggcatcatccgtaccaaaccaaagcacaccgcctacagcatcgggaagattggcacgcatctgagccacaaaaacgaaaccgctctgttgtgtagagatgggacgctcattgaaatactcctggtcgcctaccttgaaagtcagcggagagagacggtaaggtgttttataaggcccggcaccaaaatcattgctgatgtcgagggcagttccttcataatggtcgcgcatggcattctttacatcctgaacggagagtttgcgtttcggctttacgaacagaggcatagggtcattggtctttccttggatataaggcagataggcttcaccttggtcggtaaacatattgaagtagctccacacacgggcttcacagaaacggcgggcaccgaaatcgagcggtgcataagcatcggcaaagctgaagtctttgttcacaccgctgaaatatcctttttcgcgggcaaaagaaataacgtcattagaatacatgcagttggccttgtcagccatatcgaactgatggatgcgcgactggttggcatgtgccgaaatgcagtcgtccggcactcggacagctacccatacggctccccggatgccgggacctttacctatcatctccataatccatatttcattgggatcggcaatggtgaacgactcgccactgctgtaatatccgtattcctgcaccagttcagtcatcaccttgatggcttcacgggcagtacgcgaacgttgcaaacccacgtaaatcaggcttccgtagtcgataattcccagcgtatccaccaattcgggacggcctccaaaagtcgtctcaccgatggttacctgaaactcgttcatattaccgattacattataagtctggcgtgcctgttcgatctgtcccagatacttgccggtatcccattcgtgaatatccatcatggtgcctttgggatatgtggctgccggatagtgatacagctcgccaaaaagtccgtacgagtcggccgaataggaaacgatggttgaaccgtcagtagacgcattcttgccgacaattaagttagtacaggcgaaggtttccgccactgccgcagtcagaagagcggcaaagagaaagattcttttcatataataaattattaatacattgtctttattctgtctttatccggaaagctaccagacaaaggtgtctcgaaccgttgtttcgtttccgcaatcgtctgtcgcagtcattactacagtgtgacgtacccccttcttgacatgcttaggatcgagcttacactcccaatgggatttggtcaagttgggacgtccgaacaaggcaaattttccatcgatagttccacgataggcacggatgccggtttctttgtccttcaacctgtaaacgaccttcccattacggccccaggtattcttacctaccggggtaatttcggggggcactgtgtctacagcaaccgtataagttcccaattcacggattcgggtcttcataaatccatcctcgtaagtacctccggcactgtacatacttcctttgggagtgacacgtgccacataatacttggtgctgtcggcaaccggctgacgtcggagaccgatacgcaactcacattccccgtgcaacggcactttctcgtcattcaactgataagtataggctatcgccccactatcggaatgcacttcgtagttgagaggcacattatcgtataacattccccggggaacggtaagggtcaatccgggttcttgcagaaagttcgtcttatcccaggcaaagaaatatttctcccgatgcccgagcggctgaatcggctgtctctttccacgcaccgtaaaacggtagcgggaagtattgccgaaagcatccttcaattcgtattcgaacttatagtcccgctcttcatcaatggtgaccagtccccggttgtcgttcgaagcccgaagcatgcggagcgtattgcccggatcaataaacgacttcatatattgtccgcaggtccaagagtttatcatccggttttcatcctgtgaaaaacggtcgaccacactgcggaacacttccgtaccgtccactctaagcacaacggtatgcactccataacggttgtgcacaccatccatataatcgtaggccttgatgcccgacccgatcactccccatgcctcgatgggacgcgctgtgtttatcgggaagctctgccgttccgggctccctcccactaccccacttcccggctgtggaaacagcatgattccttctgcccggggagcggtgttatcttttattttcgacttgaaaaagggcatcggatcaatcgattcaccggtagcggtctccatcacatccagatgcagatgcggaccgaatgaataaccggtattaccgctccaggctatttgctgcccggccttcaccggatattcacccggctcgggaacaatctcgacttcccaatcttctttttcatattgcagtttctccactctccgggcaatatcgggcatgaaaccgctcaagtgtcggttgattgtcgtataaccgttgttatacaccacatcgagtacatgtcccgacccattggtgacgcgaatacgggaaatatatccgtcggcgagcgcacgtaccggtttgccaatgacaccctgagtcttgaaatcgagccctccatgaaaatggttagcccggatttctccgaagttgccgctcagagtcagtgtaaagtcaaatggagaaacaaaagtagcctgcttcacatcttgtgaatgtccctgaatgctgcaggcaagcatcaaggcaactatatactgtttcatgtagtttgcttaaaaatggaatctttgcaaaaatacatcattcctgccatattagaaaacagaagggtggattttattcctatccgccaccctactatcattctgctgtaaaacatccctacatggataacaacgtaagcagaattttcctacattgtgccatgtttaacccttaatagagtaacgttatgattatcggagtacctaaggagattaagaacaacgagaaccgtgtgggcatgacgccctcgggagtcgccgagttagtgaaacgcgggcatactgtatacatacagcacaccgcaggagagaacagtggttttcaggacgaggcatatacagccgtaggagcacaaatactgcccactatggaagagacatacgctatggcccagatgatagtaaaagtaaaagaacctatcgcaccggagtacagactgatccgcaaaggacagttgttgttcacttatttccatttcgcttccgatagagagttgactcttgccatgatagagaacggctcggtctgcctggcttacgaaacagtggaaaaagccgaccattctctcccgctgctgatacctatgagtgaagtagcaggacgcatggccatacaggaaggtgcccgttttctggaaaagccacaaggtggaaaaggcattttgccgggtggtgtaccgggggtaaagccggcaaaagtgttaatcctgggtggagggatcgtaggtagtaatgcggcccagatggcagccggattgggagccgatgtcacaattgcagacatcaacctgagccgtcttcgctacctgagcgagacgttaccgaaaaatgtaaaaacactatacgcctcggaagtgaggctgaaaaaagagttgccggacgtggatcttgtagtaggttcggtactgattccgggagacaaggctccgcacctgatcacccgtgatatgctgaaaatgatgcaaccgggtacggtattggtagatgtagccatcgaccagggaggatgtttcgagacttcgcatcccacaactcatagtgaaccgacgtatgtagtcgatggaatcgtacattatgctgtagccaatattccgggggcagtgccttacacctctacattggcattgaccaacgccactctgccctatgtcatagcattggcaaacaaaggatggagaaaggcatgcaaggaagatccggcgctggctttaggtctgaatgtggtagaagggaaagtggtatatcgagcgatagccgatgtattcggcctgaaatacgagcaattgaacttagaataaaagagtttcaccacggagtaacagagggttaagcgtcattattctaccctgtgattaccccgtggtgaaatccgcagtgcttctcccggcactgtttataacccggcagaacgtatcttgtccgaagccctccggtatccttctaaaagttctttcatcacttcgtccacactttgtctacggcggaacagggcagcaacctgtcctatctcgagttctccttcctccaggtctccttcaaagattcctttcttggcacgacctctacccaacagttcacgaagttcctcggcagaagccccccgtccttcagcggcctctaccctatcacgaaacgaattggtcacaagtcgggtcggtgcgagttttttgagcaataatttggtatcgccttcgttcagccgcaagcaatactctttaaaaatgtcgcttgccgaactttcatccgtcaaagcaaaacgggtgcccatctgaactccttcggctcccaacgccatcagggcaaaaatcgcctctcccgtaccaatgcctccggctgcaatcaaaggtaaagtggtggcttcacgcactgccggaatcaggcaaagcgttgtagtctcttcccgcccgttatgtccgccggcttcaaatccttcagccactatggcatcgactcccgcctcttcacatttcatggcaaatttggaggaagaaacgacatgtgccactgtgatgccgcgctctttcaaccatccggtccacgttttcggatttccggcggaggtaaatacgattttgactccttcctccaccacgatgttcatgatttcctctatctgtgggtacatcaacggaatatttaccccgaaaggtttgtcggtagccgcccggcatttacgaatatgttcacgcaaaacgtcgggatacatcgaaccggagcctatcagtcccagaccaccagcattactgacagccgaagcaagtttccagccgctacaccacaccatacctccctgaataatgggatactgaataccgaaaagagaagaaattctgttcatagttatatcgttttttgaaaaaggaacaaggatgcctttgtttatcttttaacaaattcagtgcacaatcggttcaggaagcagcactgttgttgaatcgccataagccttcagcacctccaacgtgcgcgatctccggttgcgtcccttcttgtcccagaagtcctttgtaaaaatggtcattaaatcaagtccgccaatcgtacctccattcacggtcacgccgctttttccaagtttcatagcagaggtatgtaccatgctctgcgtaggcaccatcattccattggcacgttcgccaaacagattatgcctcaatccactggaacgtatctcttcgtatgaactgcgtatacctttatcatatacattcttagcccagttggaaggaaccgtctgatacaactcgacaaacggatctcccctccatgtatcggcatctacccgaatcttcttttgataaataggatcccaattatatttggtattggccgtatagggacggagggtcagcaccaccttcttcttttcaagtacctgcggaagcgtttcatccaatctcagaccgggccgttccttcgatattttaggagcagtcggcgaactgttgaaatcaatctgtttcacagcatccatattcagcttaatatcctctttgccattcaggatgcgctgcagattcaccgaatctttcgcggtccattgggcatgaagggtcactgccatccctaaagacagcatcagaaagacaatacgtttcatctgatttaattttttaccaccaacggtatccgcttccgcaaaggggctcgtcaaagcatgcgtcgatggtccatgccgtacgaggatactgtctgttttcccaccagcgacggtatcgggcagcagcatcgagcaactcttcatcagtcaggaaatagataccttcatagttctcggcattggctctcaccattttgcagccaaacgaagcataatgacctaaccggatggtttccacaacccacaacatacattcacccaagcggaccttgccactataataagcagacaccggcggaagcggaaaagaagtgatcaaagtcagatcttcggcataattaagcaatgtcggaatatccttctccgtaaatttaggtacttctacaaagcccttcggactcttggtattataatttcccgctttgagttgccttacgaaaaggtctacatcggggttgttgtaatctaatgtctcttcgctgcaacttacgcaagtaagcaatgacagaacaagtgtgagcagcattaaaaatgtttttttcataacatccgtactaaatggttaataggtcatacgcagaccgcaaatcaggttaaaattcgtaggcctcgccgaacgtactgtttccagtttggagtctgtcttgaaatggtgcgttactcccggttcggcaaataaagccagtttatcattaatcttataattcattcctacgcccgcagtcagagccagctgcacaggttcattcttaaaactgttatccggcgctcccgctatgcacttatctgcaactccgcctaccgaagcatatagatcaaatttgggagtttccgccagcgtcacattcagttttacgggaattcccagataatgcagattctgttcggcacgcaggtttgaatacaataaaccggtttcgacagctaaatgtttatttatttttttctctaccgtcagtccggcagttacgggcatcttgtacttaccgttagcggcaggcaaagcggtacccacagcagctttcacagcccatgtcctcgatttgtccgccacaactgtgtgatcgtccggccggggtccatcagcagaacttgccaaagccccaccttctccaccagcttgccaataacttttgtccggatgattattttgtctcctgcgtgtagtcgtagaagagaaactgaatgacatggagactgtaaccgataccgaatcatcttcctctcccgatgattgtgccaaaacaccggaacgcttgggagccggtttacccaaaaccggttcggagcgcataggggtaaaatcctgtttcaccacgtctccatccagatgtgttgtatttccgctgacaaccgccacttgggtaaaagcttcttctatctccgctttcggagagaagaaccagaaagcagccgacgaagcagccaataccagcagtacggaagctgctgccgctacacgaaagaaaactactttccggtgatggctgcgcaccatcatctcagaattcagttcttcccagaaaccgtcccgcacggtcatttcggcatttcccagacgggaacggaacagatcggttatttcatcattttctttcttcatggtttctatattctttaatcctttttgctaataaaaacttggcccggtgcaactgcgaagtggatgaatgctctttgatacccagcatatcggctatctctttgtgcgacttctcttcaaacacataaaggttgaaaaccgtccggcacccatcgggcagatctgcgacgaacttcatcaactgttcttcggaaattcgccctgcctcccctccttccggaaggtcggggatgtcaggtagctgttcctcgtgtacctccaactgactaacccgcttttgccttcgcaggtaatccagtgcctgagtcaccatcacccgggtcacccacgttccgagagaagcctcgccacgaaacgaaaagttggtgaatattttgatgaaaccgtcatgcagtacatcgtgcgccgcttccatatcgcccgtatagcggaaacataccgccagcatttgcctcgagtatagggtataaagttccttccgagccgaatcctttcctgcccgacagccctttatcagttctatctcgttttccaatgtcaattgcctttttaaaatcgaacgtatgtctgcgtcgtttgtctattagacgcaaggatgcagcgaatgctgcaaacgaaaatgaaaaaagaagttaaaataatcgttttaacgatcaaggtcctcaaacgatcgaccgtgaacgatgaatgtgatctgcgatgaagtgtttttttcaaagaataaacgatgaacaacttgcagcctcaacgcacaaattgtccaccgttcatcattacttgttaaagatcattcatcgtttggaaatcagcatgccttgaaactcatatcgagtcctttcaccgaatgggtaagggcaccaactgaaataaagtctacaccacactcggcatagtcgcgaagcgtatcgaacgtgatgccgcccgacgattcggtttcatactttccgccgatcatctcaacagccttctttgtattttcgggagtaaagttatcgagcatgatgcggtctactccgccgatgctcaatacttgccggagttcatcgaagttgcgcacctcgatttcgatcttgagatcttttcctttctccttgcaatactctttggcacggttgatagctttgtcaatgccaccggcaaagtccacatgattgtctttcaagagaatcatatcgaaaagtccgatacggtgattcacgccgccgccaatctttaccgccgctttttcaagcatacggagtccgggagtagtcttgcgggtatccagcacacgtgttttcgtgccttccaactgcttcacgtatttgcgtgtcatagtggcaataccgctcatgcgctgcatcacgttcagcatcagacgttctgtctggagcagagactgaatcttaccttccacaatcattgccacatcacccggtttcacttcggcaccatcgttaataaatacctcgactttcatcgtcgggtcgaaacggtggaatatttctttggcaatttcgatgccggccaacacgcctgcttctttgattaaaagtttcgattttcccattgcagtggcgggaatacaggaaagtgttgtgtggtcgccatcacctatgtcttcggcaaaggccagatcgatcagtctgtctattaactcattcattggttttatctattcttatttgatttattaaatatttgttctgtactctgcggaagaagcagtttatccggaaattgccgttggcagtggtcagggtaccgataataaaactcgattcatcccgcttaccttcatggtttacattaaaaccactaaccttattgctactgaaaaaagcggcaagtgttccttcagctgcctgcctgtctacactctccgagcgattctgaatcaccagattcactttctctcccaaatacctgttcagctcttgggagtttcctttcttaaacgcaacgaccacgcccaccggtatgtcctgtgcgaagagcgaagttacagcgaatacgagtccggccatccataaaagtacccgttttttcataatcacaagtattatcgatacgcaaaggtaagtatttaatgctaaaaacaatatttttttcttatttttgtgcaataaacaagagtttgcacttgaatgaaaacaacccttatcgtcgtaggacggactgtagagcagcattatatcactgcaatcaacgattacatagagcgtaccaaacacttcatttctttcgatatggaggtaattccagaattgaaaaatacgaaaagcctgacacccgagcaacagaaagagaaggaaggcgaactgatagccaaagcccttcagccgggagacgtggttgtgttgctggacgaacacggaaaagagatgcggtcggtggagtttgcccgctggatggagaaaaagttggtaaacgtcaacaaacgcctggtatttattataggaggaccttatggcttttcacaaaaggtatatgacgcggcacacgaaaagatatccatgtcgaaaatgactttttcgcaccagatgatccgcctgatctttgtagaacagatatacagggccatgaccatactgaacggcggaccctatcaccatgaatagggtcatcccctattcatgattcatcaaccggtgggttgccatctcttcgtatttcgtccccggacgaccgtaattggcatacggataaatcgaaatgccgccacgaggggtgaagatgccggtcacttcaatgtatttaggatccatcaggcggatcagatctttcatgattatgtttacgcagtcttcgtgaaaggcaccgtgattgcggaaactgaacagataaagtttgaggctcttactctccaccatcttcacatcgggcaggtagctgatacgtatttccgcaaaatccggctgtccggttatggggcataggctggtaaattccggacagttgaaacgtacccagtaatcattctcaggatgtttgttatcgaaggcttccaatacctcgggagcataatcctgcttatattcggtctttcttcccaacaaagaaagctgctctttcaattcggtcataatctattaataattaacggtttcttttacttaaatactcttccagtccctgcttgcgtaacttacatgccggacaatgtccgcatccgtcggcgggaatcccgttgtaacaggtcagtgtctcgttccgcacaagatcgaacacaccgagttcgtccgccagcgcccaggtttcggctttatcgatccacatcaacggagtgtgaatgacgaactgttcatccatcgccaggttcaaggtgacattcagcgacttgatgaacgaatcccggcaatcgggataaccgctataatcggtctgtgaaactcccgtaaccagatggaaagctccctgctcacgggcaaagacagcggcaatgctcaggaaaaacaggttgcgtcccggcacaaaagtattcggaaatgaatctttgggcttgtcttcgtccatcgagatactggtatctgtcaatgaattgctgccaaggcttccgataaaagaggtatccattacatgaaattccactcctgccctttcggctattccccgggccaactccacttcgtgtgcatgcttctgcccgtacaggaaactgagcgcatatactttcttaaagtgtttcttcgcccagaagagacacgttgtcgaatcctgtccaccactgaacaggactactgctgaatcatttttcatcatttatattcttgaaaatgttgttttaaattctcctatcagatatcctttaccttcagtacattgtaggagatgtccgtatcgtagacatcgcttccgtcaattcgcttaacggctttcacgacacggatggtaatcggaagaataatcacttcgtagagagacttcagtacgatttgagtacccatcatcaccagcagttccggccaggcaatcagccctccgaatgctatggggaagaaaatcagtgagtcggcagtttctcccaccaccgtcgaccaaatggcacgggcggaaaagttacgtccgccactggccactttcattttactcatgacgtaggcattgaggaacgaaccgaccagaaaagccagcagactggctactacgatacggggggccatgccgaatacaaaatcaaaatgctgttcgccttcccagaaaggggccgccggcaatgccacggcgatcagtccgagggctactacaaagaagttcatggcaaagccactccagataatcaaacgggcttttttgaacccccatacttcggctatacagtcgttgataatgtaagagatgggaaataccaataatccggcagtaacagtgatactgcctacctgaataactttggtttcaagaagattggctgcaatcaggcaaacattgaacagaatgccgagcaacatgaagggtacggatactttttctttcataattcctgttttttacgtggtgttctagaatacacgaccgttattcacggcatcatacgttttcgggcggcaaaggtaacaattcttttttaatcgacaaaataacaatatatgtaacggggcattacatatattgttatcggaataacatataatgtaatgccccgtcagaataggacatcatacaatgatcacttaacgtgcctaaaccgttatcctttacgagaaatctttcaaatcctgctgcaatcttttacggatcaggaacagacggctcttgatagtccctaccggtaaatccatcttctcggctatctcacgatacttgaacccggccacgaacatcataaaaggcttcttcaggtcttcgggaacggcattgatcactttgtagagctccttcaggtcgtagatcgtctcaaaccggttcccctcctcgccttccgtcatggtttgcgcatagagattataagtagagtcggtcatgtctacttcgcgcaatgacttacggtaattattgataaagatattgcgcatgatggtgtacatccatcccttgaaattctgggtatgcacaaatttctctttgttgtccaatgccttcaacagacaatcctgtaccagatcattggccgactccctgtcggcagtcaatttatacgcaaaatgctccagttcgggctgcatagccactatcttatgggtaatattcatcttttccattgctctttttcctttctaattatcgaatatgcaaagattcgcattttaaacggtctatgctatagcaattcttccgcataatttggcgatttttccctcgccccctcaaccatttcccatttaagttgttcaatagggcaattcacctaaaacttaacttataatgaaaacattttttagatctgtagctatgctactcggactgggactcttgcctgtagcggcacatgcccagaaaaaagtaatcatcgaagatgaagaaccgaactccgtgatgtttgtatcgacaaacaaagccggagacgagattatccggataatgaacgaaacacgcctcccgcgtttccacgaaccgaaggctccacgctttgtactgaccgaccgacaaggaaaattcgcactgggtattggtggatatgtccgggcaactgccgaatatgacttcggaggtattgtgaaggatgtggatttctatccggcactgatccccaacaaaggttctgccgaccgtgcccgcaaccagttccagatggatatcagcacttccaccctcttcctgaagctggtgggacataccaaacgtttaggggatttcgttgtttacaccgctgcaaacttccgtggagacggaaaaaccttcgaactgcaaaatgcttatgccaccttcctcggctttaccctgggatacagttatggtaactttatggacctggccgccctaccgcccaccatcgacttcgccggccctaacggctcagctttctatcgtaccacccaattgagctacatgtgtgacaaactgaaaaattggaaattcggcgtcggtgtcgaaatgccttcggtagacggtaccacgaaccagtatcttaccatcaacacccagcgtatgccggactttaccgcttcagcacagtataactggaatgccaacagccacttgaaactggctgctatcgtacgcagcatgacttactcgagttctgtggacaacaaggcacattcaaaagccggatacggccttcaggcttcgacttccttcaacgtaactccgaaatggcaggtatacggacaggtgaattacggaaaaggaatcggacaatatctgaatgatttgagtaacctgaatgtggatatcgttcccaatccggagaaagaagggcgtatgcagacgctccccatgttgggatggttcgccgggctgcaatataacatcagcaaaaacgtctttgtatcgggcacttacagtctgtcacgtctttattcggaacatacctatccgagcgacgagcccgatatgtaccggaaaggccaatacctggtagccaacctgttctggaatgtaaccagcaacttgcaggtaggtgccgaatatctaaggggctggcgcacagacttcagcagcaatacccgccatgccaaccgtatgaatgcattggtacaatattcgttctaactttttataaatctctccgaactctaacgtaaaaaaagtctaaggacgaaccctgccccgtctctgttgttaccctacggagatggggctaaaaataaaatttcaccacacagggattatcatcttctacccttttactcagcacccgatattcttcctcgggaaggatacttttataattctccagttcttctgtcggaacgatgcaaagcataaaatcctcggttaacacttccggatcgattcggataccctctcgtgtcttctcaaaatagaagacagctccatcctttttacgataaaaaagatttgtgtatttccatttgggcttggatgccaagctgagcaattgagcataatagtactttccgttttggtactgattggtgaaattaaaggctattttaccggtttcacgatattcgttcagccgcctgtcctcctccctgcgtgtgtccggattcgaattgaaatgatattgtgctatatttatattctgttctcccatatcccagcgataggctacacggaagctatcgctcgtaagttcgtagacctcttcataaaaagcgggagcaaagtaagctttgccctgataggaatagaacatatccctacaagcccagttcaaccagaaatcatcggaccagaactcattgatcaacttcgccgaatcggcatccaaccgcatgatacaagccccgtcatccttgttctgcaccgaccacgtcagcagatcgccatccggagtcagtccaatctcctggaagttcattttctgcggcaatatctttctgtctataaacgaaccatccaaacgataggtatacatcgatccgaaaggagataacatatatacccggttccgctgctcactgataacggcatcataaacctgtgaatattcaccgggaccctgtcctactcgcccgatagaacgaaggtagttccccttcttgtcaaaagccatcaacgtgatatgcctgaaagtgggataatcctgagtcaatatataagtagtatcctcggaaacccgtactctcaagattctggccagcagacaactgtccgaagtttccaacggaatcacttcaactttagaaaagaaatcggaaacagaaacaggagtttccttcaactctactttcagaacatcgggctcttccacagagggagtccgattacaagagctgcaaacaaagctcagagcaacgaggaaaagaataaatgtgtttttcatatcttgtgggattagaaaaacaaagataaattcaattaagcagtatatcaaaaaaagggaccggataatttagtctatccgatccctttttgaggtttatataaataaagattagcctataagggttgcatcagaacttatagtcgagaccgataccgaacactttgttggtacgggtgaagacatcttttccggcgattccggtacccccatagttaggagtctcttttgtatatttatcgtaatcggtccaaaaataagcgacattcaatttcaggttcttcgcaatatcgaatccggcaccgaaaccgtatgaataagagctgactgcaaaactcatatcactctgataattatcacccacaccatatttggtacgttgcataccggcacttacctgagcccatttacacacatcccattcgatacctcccagatactcgttggtaccctgtttgatgaaatgctgtttgcccatagtctgaccggtcacaggatctttagcatcggccatacgtgcattggtatcgaagaaatgatgatagccaactgaagcacgaagtacaggaagaatttcataagaaacacctactgtcagcagagccggaatgtcatgcggagtatttaccccattcgcaaacagtcctgtattatctatacgggtcttgttctctacattcaatttggtgttaaactcgtatttcacaccgatgttccatttattcatcttaaagtccagacccagaataggagttactccccaaccggtttggtcacaatccagttctttatcggccgtcagtccggcaaccttggttgcttcttttgcaatggcatcatattttgcataattagccagatcatttgcagccagataagcatctgcggctgttctggcctgcttggcataatcactgaaatacttattcacgtttaccatttctccaccaccgatgttagcctcaatgttacgaatgtgtccttcgtaaccattgcttacgtagttcatacgcacaccggcaaatgcagacaagtaatctgtgattctatatgtggcacccagctgaaggccaaaaatcatttgcttaccacgcatgtagctgtcaacagagtatttattggttccattaaaaatgttaatcggcagaacacctttatccaccatttcattgcccgcagctaccaacatgccgggtactacagataccaatgactcaaatgaacccagcccttcattaaaagtagccttaccgccaccaccggttaccgcaaaattccccgaaaatgcccacttatccttcttatatactgcaaatacactgggaatgaacggagccgaagcttctcctttatatactttggtagcgtttcctccaaaccctgcaaacggagcgaaagtagaagtgatagttcttgtctggaacgcactctgtccgttgagtgacaagtggaagccgttttccatgaaagccacacccgccggattggaatatactgcgtcaatttgtgtagaagcatcacgagccaacattctcaaaaacaatacgtgctgattggtattcgtcaggagacctcccgcaaaagttgaagttgaaacgattagcaacccgatgctaatcaagaataattttctcatctaaatcttttttaagttatttcgggcgcaaaggtacaataatattgcacatgacgaatatttttgtgcacctaatttccatttcacaaacaaattaattgaaaacacaaactgtttctactgaaacgaataagaatccggagaaagaaatgctacccccggacacaaacattactccccccataaacgttctattattatagaatgtaaataagaaaattatggcatatacaatcgcattttttggtaccaaaccttatgatgaaacttccttcaacgagaaaaacaaggaattcggattcgaactccgatttttcaaaggtcatctgaaccgacacaacgtattgctgactcagggagtggatgccgtctgcatctttgtcaacgataccgcagatgccgaagtaatcagaacaatggctgccaacggagtaaagctactcgcccttcgttgtgctggttataataatgtagacttgaaagctgcagccgaaaacggtgtaaccgtcgttcgtgttcctgcctattctccatacgcagtagccgaatatacagtggcactgatgctctcgctcaaccggaaaattccacgggcatcatggcgcacccgggatggaaacttttcactgcacggactgttaggcttcgatatgcatggaaagacagccggtatcatcggtacgggaaagatagccaaaatactgatacatatattaaaagggttcggcatgaacatactggcgtatgacctttatccggattacaactttgccagagagaatcaaatagtatacaccacactcgacgagttgtatcacagttcggacatcatctcactacactgccccctcacggagcagaccaagtatctgatcaacgactactccatcagtaagatgaaagacggcgtgatgatcatcaacaccggccgtggacaactgatccacaccaatgcactgatcgagggactgaaaaataaaaagatcggttcggccggactggatgtgtatgaagaggagagcgagtacttctatgaagacaaatcggaccgtatcatcgacgacgatgtactggcacgcttgctgtcgttcaataatgtaatcgtaacctcccatcaggctttctttacccgtgaagcgctggccaacatcgcagcaacgactctggagaatatacgggatttcaaaaatcagaagcctttggtgaacgaagtcaagttgagcaatgcctaaaggcatcaaaaagaagcttcggttgcaatagtgccaccgcttcctgcgaaagaagcggcagaccttattaggtttgcccggactttaacgtataatgtccgggatggctgttcatcaatcattccttttcttagacgaaaaatataattgactcataactatttctttttaaatcaagttcctactctattatgaattttcggttcctctgtttagagtcaacactctataatactctctaatatgggttctcctctcagcggagcataaatagtgactttggcaaaaccatacttgggttcgcggattagtaattcagtcatacagatgaagcggtagttatatccgcttgccaattgcttggcaaccagaagaggagtatagtccacacccttcaatgtcatgcaagtacggaatatctctttctcctgatccgtcaacggtttgaattctccccagccccctattatcggattcgctttctccgaagtaaccacctcataagagaatatatcttcgtaaagcacttcctcagagtcacggtaataggcaaactgaatctctacctgccccggctgtaaaaaccggaagataaaagactgtacagacgttcctcccggagtatcggcatcttctgacaattcctctacaagggcaactccgccggtcaggcgtactaaagcgtaacgataaccagtacctgcttgtgaggtacgtttgatggtgattgtatcacccactttgaatactttttcaatcataacaatacgtgttttttgaaagattaattcattaagaaaggttttctaatggtctgatatgccgatcagccttatcgagaataatctgccgagagagacctcccggcagattgggtactgtacatcacctaaaccagtttcgttgatgtggttcaaaggtagaaggaaggattttcaaatcaaaacatttcgagtaggttattctctcattttttcactttgagtctctcattttttcacttgtcctcagtaatattcttattattaatatgttgtacccccacctgaaaatctgtcggagtcactccaaactttcccgaaaagaggcgataaaaagattgagtcgacatgccacactcctgggctatcgtatctactgtataatcggggtagttctttaacatcttagccgcatactccaaacgaagattattaatatacttcgaaaagctcattcccgcatactgcttgaaaagaggagcaaatttatttttgggaatatagatcgtcttgatcagttcctccctcgaaaaatccggctgaagatagagctgacggctaatgatctcatgttccaacttgtcgaacaatatcctatcgtgtatgtcatttccatctccgacttgaggttccggaacaacagttgtttccgctttcccgtccttatcggttgatagcgatcccccacctgcggacatccttaaattctgctccctctccaattgctctttcagaataagattctcctcctttttccgatacaattcttctttatgtatcagcaaatcttcgatagtgcctaccatcgccttatttttgcgacgtataatccggttatgccgtatcgtccgccacaaaagcacacctaacagaaaaacgatacagagggtaaataccaataagagattcctcttttgcatatcagccgcctgctgctggatgaacaaatccttttcgttcgtttcataaacagctgccaattccaatgccgcacttttttgttcacgattcttaatgctgtcgcgcaacacagccaactgctcaaaatatcttgcagcagtacggtaatcgcccttatcacgataagcccatccaagagatctctttatcgtagtcatgtaatagttcaccgtatccccccgcatgatatacatcttctcacgggcggcattcatccggatcacttggtcatacatcttcctgtcgaacaaataaggcataatcaggtaatcgtcacggtcatattcctcacttgccgccaggaatttccggtagtaacgttcggcctcttccgcctgccccaaccgaaaaagaacgacagcataatgggcatacattgcttttttctcctttgcactcaacccctccatcggagtttcactgccggtctcttcggtcaccaccttttccaacgcagccagtgtcctgagagcctcctcattacgcctgtccgacttctggaatatcagtaaagtgttgtaatcataacgcagattatcgtatttatgccgatagtccgtctttgacatcatttcaatcgcctgttccagatattcatatcccttctccttattaccctgataatacagcattttacccatattgaacaaagcaacggactgcatggctttatccccgcactgctctgccctttttaaaagtaaatagacatacagcgattttttattttcattatgcaaacagtcgtaacaagagatcatgcgatgcacctgttccatataattcttatcattattgcgcaccgagtcactgtccaaagcacgcttatagaacttcaacgccttataatattggccgacattgaaatataaatcaccttccaccacatccatccggaacatggaaagagatttccgctttctcaattgttccataatctgctgtgccttatcaaaatcggagaaagtatatttatatacgttatcatccattatcaagctgtccggcaaagagagtatttcggcacaaacagcccccggaaacatcaataaacggaaaagtagtaacagaataacatacaataactttctcatatctcttatctattggctaattttagaagcacaaaaataagataatgatattgacaacaaaattttttctatctcttatttaccgaacgtattcaactcttttctgtttgccgactttcagagagttgtccatttcttttctatttccttattatagcttctgattcctataaaaagtgaacatctcaaactatttacatcccccgattgtttggtttataaaatctatttataaaagaaaggatatacatcatgaaaaaagtagttcaccgctcagatacccgcggacgatccgtatacgactggctcgacagccatcacagtttcagctttgacgaatattacaatcccgaacgggttcatttcggtgctctgagggtactgaacgatgaccgggtagccccgggtgaaggttttcagacccatccccataaaaatatggaaatcgtctccatacctttaaagggtcttctggcacatggcgacagtaaaaagaacagtcgtaccattactgtaggcgatattcaggtgatgagtgccggtacaggcatttatcatagcgagatgaacggcagcaaatcggaaccggtggaatttctgcaaatatggatcataccgaaagaacggaacactcatcccctctatcaggattatgacatccggggattactgaaaaaagacgaactggccttcatactatcacctgacggaagtacacctaccaaactattgcaggacacctggttctcgatgggtgagataggagccggaaagacagttgaatatacactgcatgggacggatatgggagtctacgttttcctgatcgaaggagaagtaaagatagatgatgtgatcctgactcgacgcgacggattgggaatatccgaaatcaagaattttgagatagaaactctgaaagactctaaaatactactgatagaagtaccgatgtaaatttaaagtaatcgcttatgtcaaccgatcatatatccacacatcccgactcccctcttcacggaaacgggatcgggagtgaggctatcaacctcgctgccatccggcaggagtacaccaaaggcgggctgaaggaaggagatcttcccgacaacccgctttctcttttcaaccgatggctccacgaagctatcgatgcacaggtagacgaacctactgccatgctggtaggcaccgtatctcccgaagggcaaccatcgacccgtaccgtactgctaaaggatttgcatgatggaaagtttatcttttataccaattacgaaagccggaaaggtacccatctggcaaagaatccgtatatttccctctctttcgtttggcacgcgctggaaaggcaggtacacattgaaggcattgcctcaaaagttcctgccggagagtctgatacctatttccgccaacgtccctacaaaagccgtataggagcacgcatctctcctcaaagccgtccgttgaaaagccggatgcaactgattcgcaatttcgttgcagaagcagcccgatgggtaggcagagaagtagagcgccccgcacactggggaggatatgccgtcactccccatcggatcgagttctggcaaggtagggcaaaccggcttcacgatcgctttctatattcccttcaaccggacggaagctggcagaaagagaggcttgctccctgatatttccggttattgtacttgcgcaaccaacaaataatacgtaatattgcatccataaaatacatccgcctatgattctggattatatataccacagcgggttcgccatcgaagcagaaggtgtaacccttatcattgattattacaaagactcttcagaaacggaactgaataaaggaatcgtgcacgaccgtctgctccaacgtcccggaaaactgtatgtgcttgcctcacatttccatcccgaccacttcaaccgggaagtactgacatggaaagagcaacgtccggatatcatctatatcttctcaaaagacattctgaaacaccatcgggcacagaaagaagatgcgatctatattaataaaggtgaggaatacgaagatgatatgctacgtattcaggcattcggttctacggatgtgggcatctcctttctgatccatctgcaaggcaagagcatttttcatgccggtgacctgaacaactggcattggagcgaagaatctaccgaacaagagatacgcaaagcagaaggagacttcctggcagaaataaaatatcttcaggcagcagttccgaccatcgacctggtaatgtttcccgtagaccgccgaatgggaaaagattacatgaaaggagcccaacaattcatcgaacgaataaaaactactatatttgtacccatgcactttagcgaagactacgaaggaggcaatgccttccgatctatagccgaagccggcggatgccgtttcataaccatcacccaccggggcgaaagctttgatatataactaaataaaacatacaattatgaacaaactgacacaaattttcctcgtgttatttatgatttgcctgcccgtgacactttgggcagacaatgacaaagatgatgatgacagcagataccttgcaggcgccgtgcccgaagttgacggacgggtagttttcagccgcgaattcagtatccccggtatgtcgcaagacgaaatctatgaacggatgctcaagtggcttgacggacgcatggcccagaacaaaaacaatagccgggtggtatataaagaaaaaggagtcatcgccgcagccggtgaagagtggttggtattcagttctaccgccctttctctggaccgcacctggctgacataccaagtcaccgtaaactgccagccccaaaagtgtacaatggaggtagagaaaatccggtacacctatcgtgaaaaagaaaaatatgcggctgaagaatggatcaccgataaatacgctctaaacaaagcgaaaacgaaaatggtacgtggtctagccaaatggcgcagaaagacagtcaactttgccgacaacctctttgaagaagctgcaaaggcactgagtcagaaacccatggaagcaaaagcagaagccactccgaaaaagcctgccgtagtaaccgctccgaaagtcgtggttatcggtgataatcaagagactggaaaagtagaaaaagcagcagaacttacccctgcaattcccgttacctctccaagcacgatgccgggttataaagaagtagcccccgaccaggttcctgccaatgccattcagatgggtgcaggccgactggtgattgctatcggttctgatcctttcaatatgaccatgatgacagccaacgccggaggatccataggaaaaatttcgggaagtcctgttgtattcagtatcctttctcccgaccagccttacgaacagttggagaaagcagaaacatacagcatacgcttctatcctaccggacaaaaagaaccgtccgtcatactggaatgtcagaaactaccggccccgacacctatggaaggacagcccagaacttatgcaggtaaaataaccaaagcatttatgaaataaatcagtcaccacaggttacacagattgagttttgaccggatcattgccataaatcatccgtgtaacctgtggtgtaaactttataagctctattttaatctaaaaaacaaacttagaaacaatggaaataaaaagtagatttgaccacttcaatatcaatgtgactgatctggaacgtagcattgctttctacgaaaaagcattgggattgaaagaacatcaccggaaagaggcagccgacggctcttttatcctggtatatctcacagataacaccaccggttttttattggaactcacctggctgcgagaccataccgaagcctatgaactgggagagaacgaaagccatctttgcttccgtgtagcgggagattatgatgccgtacgccaatatcacaaagaaatggactgcgtatgctttgagaatacttccatggggctctatttcatcaatgatccggatgactactggattgaaatattaccggaacgactttaaaacgaataacgatgaacgataaacaggctgtgcgttgatatcgcagtgagtttatcgttcatcgttattcgttatttaccgtttatgtctgttcgccctctttctccggatctcagctttcatcttggcagctccggaaccgtgagttccctttatataggttgttttcttcgcttttgttttcactttattttcatctttcttcgggccttctttctttcctttaaagacaattccacccataatcgcatcttctaagctcataatctttcctttcttattctatattttccgtggacaaagatactctttttctgtgaattccctatctttgcccgctgtaacaactaaaaaccaatcaatgaatacatccctgctcccggcagaaaaagacccgatgggtgctgccatagccgatttttatcatcgccaaaaagcagacagattacgcgtattttcttctcagttcgatgaagacgaaatacccgtcaagcaacttttccgcaaagccggacaaatgcctctactcgaacgcacagccctcgcaatggctaccggaacaatactcgacgtaggtgccggaagcggttgccacgctcttgcccttcaagagagcggtaaagaagtttccgccatcgacatctcccctttatccgtcgaagtgatgaaactgcggggagtgaaagatgcccgccaagtcaatctgttcgacgaacgctttgccgcgactttcgataccatccttatgttgatgaacggttccggcattatcggacgtttggagaatatgcctctcttcttccgcaagatgaaacaattactccgcccggatggttgcatcctgatggattcgagtgacctccgctatctgttcgaagatgaagacggcagcttcctgatcgacctggcaggagattattatggagaaattgacttccgcatgcaatataaagatattcaaggcgatcctttcgactggctgtatatcgacttccagaccctcagcgcctatgctgccgacaatggcttcaaggccgaaatgataaaagagggtaagcactatgactatctggcccggctgactgttgccttataaacaggagggaatgtttccaacaaaccgtccctccctaaaagactaaaacggaaacagtagcggcaatacgaacaccattaccacgcccataatgatctgaagcggcagacctacttttacgtaatccataaacgtatagcgtcctgccggcatcaccaacgcattaggcggcgtggagaaaggtgaagcaaaacacatacttgccgccactgtcacggcaaacaggaacggataagggctcagccccaactgtacggccgagtgaagagcgataggagcaagcagcacagcagtggccgtattgctgataaacattgtcatcagcgaagttgtaaagtaaatgcctgccaacaaagcaaaaggcccataggcccccagcccattcaccagcgattgcgacaccacctccgaagctccggttttctccaatgccaatgacatgggcagcatacctgctatcagcacaatactctcccagttgattgttttataagcttcttccacattgcggaaacatccggtcagtaccatcagcagtgccgctataattacggccgtcacaggagccaccggaataaagtcaaacatcatggttacaatcatacccaacatgatcagtgccgctaccggtgctttatgattcagggttactttggccgcttcagccaacggctgccccagaacgacccactgtgactgatcctcaccaagcctggctatgtttgcccaacttccctgcaccagcaagatatctcccgaatgcatcttttcatccttcagattcttcagcagatagtcacgtttacgctgaatacccaatatattgatgctataattctccctgaatccggaagctttcaccggtttgtttatcagattggcggtaggcagtaacagaatttcagcaatgcctatctcctgaaaatcgaatccctcgtccgtatcatgcagactcccctcggtcttatgtgtatccaataaagacagacggttctcaccggcaaagcgtttcacattttcaaattctcctaatacataaagaatatcttccgcctcaatcagggttccggcttctgccatctcctgcttttttgtcttgaagaagtgccgggacgaaaccgaacggcggcgaacctccaaaatcgtcacatgatacctctgcggaatccctagctcctgtatggtcttacctacaaaaccggaagactcttcaacctccacccgataaaggttctgtgataactggtattcacccgccaactcctgaagcgacttattcttgcgctttccccgtgcctctttatcacttttcttcgtcaggaagatcttactcagcggaatcagcacaatcagcccgacagtgacacacaccaagcctacaggagtaaaagtgaagaaagagagacgttcatagccggcttcaatcaaggcattttgtatcacaaggttgggcggtgtaccaatcaatgtcatcatcccacccatactactggcaaaagcaagaggcatcagcaaacggcttacattgatattggcactcatggccatactgaccacaataggcagcatcaacgccaccgttcccgtattgctgacaaaagcgccgatggcagccgtcaccaatataatcaggataaaaagttttagttcgcttgttccggcaaatttcaggatacggctgctgatcatctttgccagccccgtctgaaagatggcaccacctacaacaaacaggccgaccatcataataacaacagaattagaaaatcctgaaagcgcctcctccggagtgaggatattgaaaaggattaataataccaacgcacacaacgccactaagtcggaacgtacctttccactcataaaaaagacagccgacagtacgagaatgataatcgttatagccataaaataaaaagatggggtgatctatgttaaaaacagaaaatcacccctgcttgttcaacttattttttcagcatttcatctatttgatccaccagtgaggcaaactcctcttcgttatataaacgagtcagcttcacaatcttaccctcccggtctatcaggacattccgggtgatgcccgattcacgcaatgcatacttcgcaaagatatccgctcccggatccaatcccaacggatacgtcacccctaccgactttccaaatgcgatcaccttatcgagaggttcgtcacggtcaatgcctatcaaagcaaactcaggattgtttttatgcttcagccagatatctttctctataaaaggcatctctttacggcatactccgcaccagctggctgtgaactgcaacatcaccactttaccgcgaagttcggagagtttcatctgctttccgtcggtcagagtaatggtaaaatcgggagctgactctcccactttcacaatatatcctgtgctgtctgccgcaacactatccgttttcaccactacactatccgcaacaacagctgctttatccgcttttccttgtccggaacatgctgccataccccaaagaagcaatgacagaccacctgcataaaaaaagtttttcttcatactttcctataattaattgatttgcaaaagtaaacaaagaatccgacttatcaaacactatttttatgaagcattttttttcaaagtatttgcaagtttaaaagtttttcctacctttgcacccgcaaaacagaaatgacgcctctttagctcagttggccagagcacgtgatttgtaatctcggggtcgttggttcgaatccgacaagaggctcaataaaaaagaaaggatcggcaattgccgatcctttcttttttattgaattaacttctcttcggaacttccgtctactccttattctttctcacataatagggtacgaaaacaaaaagaagaacttcccccagtttccttaaaaacatacctaacgaatgatgctccaaaatgtcagaaatataattttaaaatattccttcaccgaacgattacagatatatttcatattataccgtatcttatcgggcataatctgttctatatatgctctgtcaggatccgaagcctctccaagaatcatattttcatctacatactcaatagaagcataatccgtaatccccggacgtacactcaatactttcttttgttcatcggtatataaatccacatacttacgaacctcaggacgaggccctaccagactcatatctcctttcagtacgttaaacaactgaggcaattcatccaatttatacttccggatcaggtatccggtacgagttattctcggatctctccctcctaccgttatcaacccctttttatcagcccctacacgcatcgaacgaaatttataaacataaaaatcccctccgtaccttcccacacggagctgtttatagaaaccacctcctttactttcgagacaaatggctatataaagaagaagaaaaacgggagaaagcagaagaattcccaaaagggaaaaaacgatatcaaaaaaacggatcaagaaacttatctatttagtgtttgtaaatatactatcggttttctgcaattacggtcgcataggccgcctttacagtttcaataatgaaattcaatttttcactatccaattggggatatatcggcaatgatatctcgctcttaaagttctgataagcttgtggataatcctttatatcatatcccatcgatttgaagaacgacaacatcggcatcggtataaagtgcacattgacagccacttcacttttagcgatttcatcaatcatccggtcgcgttgttcttcggtaaagtccttaatacgcaaagcataaatgtgataagagctttccttttccccatccacagaaggcggaacgatggcccagtcacaagccgaaaaagcatcgctataagcattaaacacccgctttcgttctttcagcaattccggatattctcgtatctgtgccagtcctatggcggcatttacatcggccatattgattttcatcccgaaaccgacaatatcataacgccatcctccggctttagatttcgaaaaagcatccttggtctggcagttcaagcttgtcatccgtagctctttatacaactccgtattatcgaacggtttaggcagattcaggcaaatggccccaccttcggcagtagtcacatttttcacggcatgaagtgaaaagatagccacatcagtttcacaaccggtacgctgacggttactgtaacgtgctcccaaagagtgggcagcatcattcatcaccaagatgcgtcccaatttttcttgcacaggagattccgaacggaacagttttaccatttctggttcctgcaccagtgccatgattctttcataatcgcagggaaaaccagcaatatctacgggtataatcgcctttgttttaggagtaatagctttacgaacagcctccaccgaaatattaaaatcagttccggaatccaccattaccggtttggctccggcatggagcactgccaatgccgttgcactataagtataggcaggaacaatcacttcatcgccctccttcactcccagccaacgcaacatcataatagctcctgatgtccaggaattgacacaaagcacttcttttgctcctgagaaagatttaatttcttcctccaaagccttcactttcggaccggatgtgatccaaccggaacgtaacgaatcaacgacttcgttgatgaccgcctcgtcaatataaggtggtgaaaaaggtattttcataaaaacgtatattctatattattcattagtttttataatctaattccattaatacttttttatttatctcacgcctattcttatcaaaaagccatccccacttattgaaatatttcaccatgttatacaacaagataaaatgcattttcaagcttttataaggagcggcctcatagccgtgacaaacttgtagatatgggtaatatatcgttttatatttcatatgcatccttcgtgttaaatcatcatcttcaggatacataaaaaaacgctcatcaaacagacctatttcttttaaagcactcactcgtaagaacataaaacatccagacaaaataggaacattcataattgtattatatccagtaaatttaagcataaatttatctgcatgtttttttgcatacttgaacggcaaataacgcttacatatataatcccatggagtcggtattaaacgacataaatattgcaattctccattttgatagacgactttgggcatcaactgcccataatctttattcttatccataatcaaagctaatctattcagcaatcctttttcaaaagaaatatcaggatttatcacaacatgataatccacattttcttctatagatttccttaaagccatgttatgtgccacaccatacccaacattactatcattaaaaatataaattatatgttcagaataatttctaattaccttcaattcgtcagttggagaattatcaataatataaatcttatttacacaactcttcaatatacaatctaacaacaaagtgatttcttcactcgtatgtctataagttacaatagaacaatttaccatatttttttactaaaaacaattaatcgataataaaaggagtatatatatgccaaagacaaagggaaattacataaaaataaattcaacaaacttccacctattgccctaaataaaagattgacagcagagaaatacatcttatgcttacaatacaaatattcaactcccatcccataagccttaaaacgatagcacagattctttacagataaacttttatattttacttcataatgaggatgaaaattaatcaattgtttagaataataaaaattcgctccacagtttatacaacgtaaaaaatagtccgaatcttctgctgctccataaatagctccaacccccatattctcatcaaaatcccctacttgcataaatattgattgacatataataagattaacagacatggcaaaaggataatcttttctatgtaatttctgagaatcattaaaaaaattaggtctatacaactctacactatttaagaaaaacacatctattaaatagcatttatcattctctacaactgacttatattttataaaaaactccatatcaaaaattgaatcatcatcaggaaacattatatgcccaaattgaatctgaaattttttgagataattcaacgcacagttacgagccgatgaaagacttatgatattttgtattcttattttcttaattagaatattagagtttacatacccctctatatcaaatatcatccctccttgctccacaagaactactaatacagataagacagtattataatcatatatactcttaagcaaactaccgatatgtttttggtcaatgtaagtaactacaaagactaaatcgtacttagttcttaccccaacttgatcgatcataataataaataaatgacaataatgggaaatataatatttccatcatacaacccaacaaaaaaacgctacaaaacaacacatatattctcaaatcatgtatcttattccccatatatgcaactacaaataagaccaataaaaagcagaacaagcctgattccaagagcaactgacagtaactattatgtaaatttaatcccaaactattcaagtttatcgtttcgccagctcctgcacccataaataaattatactgctccagaaacaataacatcgactcgttttgcaccaaaaatctatggctcatagatattagttttatctctaataaccctacaaatcctaaagactcaaaataatctattatatcattagaaaaatagactactaaaaaatagcacagaaataatataattgtaaaagatgtaacaaagcctctaaacatacgttcgcttttatcagtctcaattttatttattatgtgatatataaacagtaataaaatcgacattaagatggccgcaaaggaacctgataaaataatagaaaatagacagatatatgggaagtccttctttctcactattctaaaaaaagaatagaccaatatcaaataagaataaaaattagagtcctctgtcaaagctcctattcttggcataaagccagagttaccaacagatgtcatagttattcctgttacaaaaaacaaacagaaatcaatataaacgatagttacattgatataaacaaaaatgtcaagcaggtcaaatattgtatttctatcttttatccggttacataaaaatgcaggtaatagaactacaaatgtcttatatattctaaaagcgtctttagccccatgatagattaactgaagaataaatatagaaataaataagatcacaaaccaatgcaaatatttattcatcctatttatcaataaaaacggaataaagatcacggaatataatatatatatatttgattgataagtaaaattatagaagcttagtacaaaaaagaagacaaataaattatttaatatatcaactttagttttatgcaaaaaaagtgcattgctcattatctccatatataaaactaatcccccaatataatacgtaaatattttctaaataaaattccaatatcggtatataatctcaataagcaataaaacttatacctagaaataagcaacataacttgttcgtgaaacattagaaaagatcggtgtttttgctcaatgtccaaaaataaatttgaaacttctggcaagttatctttatctatatgttttaacaaataaattttaactctcaatttcataattaacagggacttcgaatacaaatcggcatcattaacaccgttaaaaaaaatgctcaacatatcacaaacttgaatcatattacttaaagccttttttgtcacattatttgtatatgaactggtattatactgcacataattatataagtattcatccaattttacaatcctattggcactatataacaagcgaggtattacagaaagatcttctccctgattaaccccgtcaattgcacgaatctctgattttatatacaaatcacgctttagaaaacgactccaaatagagggagtaacctccaattgcaagactttttttatatattcaactttattcccaacgaaaatttcacgtaattttcgtctttttcctaaacaatctatatatgaatcaaaaacaacaacatcagcttcttctttttctgctttttcataaagcaatcgtatagcatcatgctctaaataatcatcactgtccacatttaatacatacttccctgtagcgtgttttaatgcggtattccttgcagcggctaatcctctatttactgaatgagttactatcttcacctgaaactggcgattaggataatgaagtagcatctccttaagaatctgaatgctcttatccggactacaatcatcaacaaaaacatattcaatattctcataagtttgttcaaacaaagaacatgcacatttacttataaagttctccactttataaactggtacgagtattgaaaccttcatcatactaatattatctcaacttaaagagaagaaaaacagtgattaaatcaaaggcaggaatgttttaaatttattgaaatgtattcatgaggcatttggcgtttgtccattggtggtaacaccatataatctccatacacattcttcaaccataaatcatattcttgaggtgcataaaaagaatatccctcaaactccaattcaacaggattcccaaaaatatatttagacataatttctttcttgccataaacgcctaacagattgcccacataaagagacgtagaaaaatcaaacttagtcactagcatatctattaaatcatgaatatggtttgaaaatataatagacaaagatttcatagacaaagattttaaagaagttatttcattttgcttagacaaatatttataagatctcaaaacctgaaaaaactgaattaacttaacttgcatttttctaaaaaaaacatatttagatgtcccgtctatggggaatatatccaagaatactccaattgtataattcggattttctattggaatcatagacgtttctatatcaactagttttgaaaagttaaacatatatttcttaggagccttatgtaaattccatacttgaaggcgctgaggaaattctatttgcggcaaccttataaaacgctcataatccgctcgaggcatccctacatcaatatcatcatcccaaggtataaatccatgatgtctaacagctccaagtaatgttccacctaacatataatatgtcagattatgttttctacatattctatcaaaatcgattaatatttccaacaaagcattatgaatatcctcaatatcaacattctcactcatcttattacatctttatcttataacttagaatctttctcttactaaaataggctgtccttctatgggattagcagcatctgtcaaacagaatacaattgtgtcagctactgtatccggttgcataatagacttaggatcttccgtaggagccaatattttccgtaaaggagtagccgtacgccccggacaaatcacaaaaatcttaatatcataagcagccaactcttctgcaaccgctgaagaaaaatttataactccacttttagctgcggcataagcactccatccaggacgaggagttaaaccagcggtagaagctatatttataattttcccaccattctgtttcatcagtagactggcatacttacaacaaagaaatgtaccagttaaattaatagtaatagttttttcccaattctccaaagtcgttgagaataccccttctggttctacatatcctgcgcaatttattaatgcatccaatcttccgaaatgctctcgaacaaaaccaaacaaagaaataacagaagattcatttgctacatcaacgtcctgacataccgatctccctttaagcaatttctgaatacgcaaatcatcttgaatatgacgactactccaaactacaatatagccttgatcttgtaactttatagctgtactttgaccaataccagaactagccccagtaatgacaacaactctatttttcaacataactcttatgatagcttcaataatttttcaacaatctcaatatctaacatcgtagtcacttttatatttgactctcttccttcaataaaacggactttatgcccataatgaaaaaccaacataccatcttcagttgccacatatccatctcttacagcttcttgatgcgcatcataaagaatgtgagtatcaaaaacctgaggtagctgtatattatgtaaacaacttctaatcaattctttttccatatatattcctccttctaccacagtaaatttaacagggatagtaggtacaacagctacttcatttttgacagccaaaacactttctacaaaatcaacagaaatcaaaggacgagcagcttcatgcaccataactttctctgtattcacatattctaaagcaagtcttacagactcttgtcgggtacttcctccaagtacacaatgaacatcattgatatgatacttttcaatatagccttgatatacttccaaataatcttgagtgcaagtaaccacaatcttatctatctctttacaccttcgtaatacttccaatgaataaactaacatcggtttaccattgatagacaaaaattgctttggatatttcaacccagtacgcgagcctattcctgccgacaataatattgcatccatatttttatatttaaaaaaattatatatcttcctttacttcattttcatactcgggacaaaatgattcaatacttctattaatactttattttttaataagtatagaatcaatatatagaacataacacatgctaaaattgataatacgaaaaagacaacgccattcattatacatagcttaaatccagcaataataggaacaaaacaaagagataataaaaaataaataccactatcttttgtaaaaagtactatacgtatgtttaatcgtgttttgatataccacaattctgtagtaagtaatcctagctctgcaaataatgtagtagcaattgcagtagagggggtaaatacacctattttcacaaatagataatttaacaacaagttacatactccccacatagcattacataatgctatgatcttttccttgccatgtaaaaacatcgtttgctgagctgtaatgttctcaaccatcaatgttataaatcggaaaccaaatatacacaaaggccaaactgcttctgaatattgtgagccagcaaaaacaagcacaatagaatgacttaataacatcagtccaatccccattggaatagccaacattaatacaatatgaataagtttgttaagattcaaaagatataagtcatattgattattcaaataatacgaaagtcggggtaaagtaacaaatgttagagttaataataacgaacgagttatttccataatcttctgtccaactgagtaaaatgcgacagaatctgctccacagtatgttcccaacattaatctatctaaaagagtataaaacacactactattattaagcaacaaaataaacaaaagcggaggtaaataaagcataaaattaatattacatctactccattttaaagaaaacaaagaaaagtcagtatacctccttgcataaataaagcctacgatataatttaaaaaattggaaagaaccaataataaaagataaatccaaacatcatcaggttccttaacaaatagcaaaatacctattgcgtataaagaacgtattataatcgtttttatagctataaatttaaaatcctcaaaagcttcattgatccattccgtataaaatatattagaaataaaatttagactagttattaaaagtaataaatacattggagaagaataaaaagataatcttataaaaagtaaatatatacacgctactataaaattacttaaacaaccaatcaggaacaaattggcatagatagattttactttttcttgtctatctctatttttactaacttcacgtaacccatagttataaataccaagtactccaaacaaactaaaatatccaaaaatagaagtagaatattctacttgcccaattgtctccggagatagtatacgatataaataaggcgtaaccaacaggggaagtactaaattaaaaaaattcaaagcccctttatacagtgaatttttaaatatagaatgaagcactttatttttcgttaaaaatgactcctaaagaatgcgcctgtatctctctctgatcttcaggaggtatttccatataattattcccataattccttctcaacataccatcaacatcatgaggagcccagaacactttattctcaaacgttatagaacttaatggaaaaatatactcaataggacaactatattcataaaaatcaataccataagaatagctaagttctcgattttttcgaataaataaatctactagtctaaaagaaaaatgcatcaaattttcaaagaaatatataatattaaataaaagaattttcaatcccaatttatcattaggtattttcactttcaatgcaacaatcttccatcgtatatatatagaaactttatttaaaaacttactcttaataaattccattggaataatatcgataaatactccttgaaatttacaatccttataatctaccgatgtagaaatcaatttagaatttaaatctcttagtttagctacataacgataatatcctttatccgttttaaatgtctgaagagcaatgttaccaggtaattctttgggcagtatttttaataattttttataatcagaacgaagcatttgaacatctaaatcatcgtcccaaggaataaatcctccatgccttactgcacctaataaggtccctccctctagccaatatggaaggttatgctttttacatatcttatctaaaacttccaataattccagcatacggtattgaagctttcttaaatctgaaccctctttattatatctatttaagtcttccattaatacaaatttatttaacaaatttcacagcttctctcatcacctcaaagaacctctcaatatcctccacatcaatctctcccaacgcacaaagccggaatgtattcgttgtggaaatcttacccgggtagatcgtaaagccacgttcatagcagtaatcatgaaccttatcaaaatcccagaggggatcatcaggatacaatacagaaacaacaagacccgactgccattcacgtttgatcgcatactgaagaccaagctcttgcaaacctttatggatggcttcaaagaccctcttgtgacgggcgaatttagcctcttcacctactgcaaaatattcatcaagagcctgacgggcagcgtaaacggtttgaacaggaggagtaaaatgcatctcacccgtcttctcaaagtaatcgtattgcaaatagaggttacaatagtaggaacgttttggataatcccttgaagcacgtatcagggattcatcacctatgataaaggaaagacccgtcatggcctgaagacctttttgagccgaagccatacaaaagtcaacattatccttcccgatatcaaaaggaatcatacccagggaggaagtggtgtcgacaacaaaaacggc

SEQ ID NO: 5053 - DNA, 1282 bp, Unknown
  gut microbiota DNA sequence
gcccgtcttctcaaagtaatcgtattgtaaatagaggttacaatagtaggaacgtttcggataatcccttgaagcacgtatcagggattcatcacctatgataaaggaaagccccgtcatggcctgaaggcctttctgagccgaagccatacaaaagtcaacattatccttcccgatatcaaaaggaatcatacccagggaggaagtggtgtcgacaacaaaaacggcaccgtgcgaatgggctatttttccgatctcacggatggggttcaagatacccgtacccgtttcatggtgcgtggtatagaccaaagcgatgtccggattgtcggaaagcgtcttttcgattaccgacaggtcgggaagttcgtaaacggaaaacttcaaatcgatatggggaagaccgtaatattcgcagacttccaccgcacgggtgctgtaggcaccgttattgacaaccagaactttcttatccgcaggaagaagagagttcaggcagatatcgatattgatcgtacccgagccgcaaaacaggacggccgtatgtttggagaggtctccatgcgcaacgcggaccaggtcgtcacgtaactgtttcatcatacccgcaaactctttctcacgcggacagatatcgggaacaacctgcgccagcttcaccgtatccgtcgtggtggcgggacccggattcaaaaggatctttctttcgatattcatgaatgcgtatcttttaaaaatgccataaaatgctctttattctctaccggagtagtcgtagggcgacccagatcatcacgtgaatcgatccggaccttaatttcaagaagaaccgggccggacaggccggacagcttctcaagcgcacacgaaagcccttccttgtcggaggcagtcagtacatgcgcataaccgcaacctttcgctatcgaggcgatatccagacggaaaccgagcgtgggttgaccgccgacagattcatgcgcaccgttgttgaaaaggacgtgcctgtaattcttgggagaaagatcgccgatattgctgacagcacccatgtgcatgataaaggcaccgtcaccgtcaagacagtagacacggcggtcaggcttctcaagggcaatccccagggcaatggaagaactgtgccccatggaacccacagttaggaaatcccttgcgtgcccctgccctttcgattcacggtactcgaaaagctcacgggagagcttgcccgtggtggaaaccacaatgtcattgtccccgaggtggtcgacaacctgcatta

SEQ ID NO: 5054 - DNA, 906 bp, Unknown
  gut microbiota DNA sequence
cgcatttcacttttttgtagtaactttgttcagaaaatagccttattttctatcaaagacttggatatatttaataaacctgtgaatttttgataggatctcattacaagttgtatctgcccgtccttgttaaaccattgtgtaaaagcactagggagtataacttcatccggtccgtttcctattttctgaaaacttccaagaaattgcagatggggaaggttgtatacatgcagcatattctcctctttatttagagctaatattagaaatgtatcggtgacaataatatcgcctatgccgattgggtcaatggataaaggttcgtgattaaaagataatgtctgttgtgcatccgttgcaattgtttctattgttctagctttttctggtttggatgattggctacaggaggtgatgtacagacacaatgtaaaggaaataacggttagaagtgcttttctcataatgtttgttttaaggttaatgttctatgcatattagacaagtgccttttacatagccaaatgttggctttttattatttattacgccgcaagatgtcattcctgcttgtccactcgaaccattgcactcataatgtggttcattatcatgttcctctgagaaactatagtaacacgtttgttctatccatctaatacatgccccttcttcaccggcggctattgcttccagattttgtaactgtacattggttaaaaccggttgcttatgattccaggcgtacaatgctgtgcatgctataattatagttactacagctttggataaagtttgtttcatactatttttattaaaggttattatttgcaaatatagtttatatttacttcttattttaaaaaaaaacagttgtcaggttcttgtgcgcagataacaagt

SEQ ID NO: 5055 - DNA, 81532 bp, Unknown
  gut microbiota DNA sequence
tcacatccaaagaacaagttttaactctgtgttaaaacaaagcttttaaggacagaagtcttgcttttttaagatcttgattttcaaatggtttagtctaagattcgcttctttacctcacggatggactctgcgggtgaaagccgggatacttgcttttttgtcaactataaaagagggcttacacttccgaaaactgaattagattccatgagtaaaagaaaacttaccaccaaatttgaagaagaaccgttttttgtatggaagcacaaaaacgatgatgccaatttttctgccaggataaaaaaggctgtattttctccggataattgcaaaaaacgatatatctttggaagagatcattttattaaccttaaaagactaaagactgattcctgatgaagcattttaccggcatattatttttacttcttctctgtttctcttgcaccccggtacatgatgcgccattggagcaggctctcacattggcgggagacaatcggaaggaacttcaacaagtattagggcattacgaaggcgattcgttgaaacataaagctgcctgctttttgattgaaaatatgattggtaaaggaactatccgttatttgcttcgggagagtgatagttgttatatacaacaagaacccgagccggacttaacgtgtataacagccgactatttgatagaaaacatagatctggcttttgaagtctggcaaaagtatccttggtgcaaacaattatcttttagagagttttgtcggaatatattgccttatcggttaaaacaggagcctttggaccgatggcgttcttactattatacacgttataaaatgacggtcgactcgttggcacgagcaggggctaccatgagagagattgttttcttctttaactcacagcatggaaagaaatatcttcatgatgctgccaaaataccgggggacttctctatcgagttgatagaaaagctgggagggggcacctgtgatcatctggcgttgaatgctgtacagttgatgcgtgctgtcggtatccccctgaatcttgatattcttccataccatggcaaagtgaatggaggacatgcttataacagctttaccgatgaaaatggaaaatttttctatttttctccttatgagcgcgaaccggaacggaatcaatggattgctcctttggtacagcgtgtctgctatgaacgtcagccagagccgaaaatagggcgtaaccgttggaatgcacaattgatcaatcgtttactgaaagaggtaactgccgaatattatttgtccgacagtgtccggttacctatacatacatcggatacggtggcttatatagctacttttaaccgtggagttttcaaagtagtgtcgcagggaagagtagaaagcaacagtgtgctgcatcgtgtgttaccttacggattactttattttcagatggcggataagaaaggaaagttggttccgacaggaaatccgtttgtgatgactccggatagcattcacttcattactccgatccggcagaccactgtgctgaatggtattcttacgtatgatgtaaagcgggttttagagttgggtgatgaagcatatactttgtattattggaaagacggctggcaaccggttaaagaagtgacttctaaagattctcgtacgctcgactttggagaggtacctgtccggtctttgtttcttgtatgtggaaatacttatatggggcgtatgcagcgtcctttcttgttggaggatggaaagccggtgtattattgacagatgaggcttttgctaatatctgttttttatgagatatataaggatagtagtggaaaaaacagtcattttctgataatattgccagttcgtagatcttcttgctttgtatcttttaggtgagatttgtttgtcggttgtttctaaaacaatatatttgtgaatgaataatcgtataatatgcaatctatgattacaactcagttactccgtccccagagcattgtcgtagtgggggcttcgaacaatacacataagccgggcggcgctattctgaagaatctgattaacggtggttatcagggagaactgcgggctgtcaaccccaaagaaacagaagtgcagggagtgccttcctttgccgatgcaaaggagttacccgatacagatcttgctattcttgctattcctgcagttctttgtccggaggtggtggaaacactggccgcagagaagcagacgcgggctttcataattctttcggccggatttggagaagaaacgcaggaaggcgctttattggaagagcgcattcttgaagctgttaataaatatggagcgtcattaattggcccgaattgcatcggattaatgaatacctggcatcacagtgtgtttacgcaacccattcccaatctgaatccccatggagtagatctaatttccagttccggcgctactgcggtgtttattcttgaatcggcagtgacaaaaggacttcagtttaattctgtgtggtcggtgggtaatgctaagcaaataggtgtagaagatgtattgcaatatatggacgaaaattttgatgtccggaaagactccaagatcaagttgatttatatagaaagcatcaagaatccggatcgtctgctgttccatgcctcttcattgattcgtaagggttgtaaaatcgcggctattaaagcagggagttcggagagcggaagtcgcgctgcatcatctcatacgggagctatagccagttctgattcagctgtggaagctttgtttcgtaaagccggtatagtgcgatgctattcgcggggtgaattgacaaccgtcggttgtatttttactttgcctgagttaaaaggaaagaatttcgctattgtcactcatgctggtggaccgggggtgatgctgactgatgctctttcgaaaggtggactcaatgtacctaaactggagggtccggtcgctgaagagttgaagagcaagctttttcccggggcttccgtaggcaatccgattgatattttggcaaccggaacccccgagcacttaagtattgccattgattattgtgaagaaaagttcgaaaacatagatgcgattctcgccatattcggcacaccgggattagtgactatgtttgagacttatgaggtattgcatcaaaagatgctgacttgtaaaaagccacttttcccggttcttccttctgtgcgtacggccggtgaagaggttgccttttttttagagaaaggtcatgtcaactttgctgatgaagtgatgttgggaactgctttgtcacgtatcataaatgctccaaaacctgctgttccggaaattgaactttttggtgtagatgtaccccgcattcgtaggattattgattctattccgcagaacggctatatcgaaccccattatgttcaggcgttgcttcattctgccggtattccggtagtcgaagaatttgtatcgggtaataaagacgaagtacttgctttcgcgcgacgctgtggatttccggtggtggccaaggttgtggggccggttcataaatcggatgtaggaggagtggtactcaatattaaaggtgaacagcatttggcgtttgagtttgaccgcatgatgcagatacctgaggcacgtgctatcatggtgcagcctatgctgaagggaacggagttgtttatcggggctaaatatgaagaaaagttcgggcacgtggtgctctgtggactgggtggcatctttgtggaagttttgaaagatgtttcgtccggtttggctcctttatcttatgaagaggcttattcgatgattcattccctcagggcctataaaataatacagggaactcgtgggcaaaaaggagtaaacgaggataaatttgcagaaattattgtacgcttatctacgctgcttcgttttgcgacagaaatcaaagaaatggatataaatccgttgctggcaacagaaaaggaggttgttgccgttgatgcccgtattcgcatagaaaaataaacattactttcggaataaaaaagaaggatatcagatgcagtattacacttacttctgcgtttattaaaatgagatggactttaaacgcgaattctatatatgaaaaagaaaaacgaacaatggctacgatacagtaatcgggcgctttcaggattacttatgttgtttggatttgtgtcttgtgacaatggaggtggagatatacctgtagaatatgggatgccttctgctaaatatcgggtgaagggcaaagtgattgatgcggatacgcaggaacctgtaccgggtatagaagtggtcaccggagctgtgcatacgggcgatggcaaagaatggctcagttatccggatacgttgatcactgataaagatggagcttttgctactgaaaggacggagtttccatctaaaaaatatcgttttatcgttcgcgatgtggatggtgatgccaatggtacttattctaaggatagtgtcgaggtagaagccggtggatttacaggtggcagccattggtaccgtggagaaacaagtattgataaaacaattgaaatcaagaaggagacagcaaaagacaatgaaaaataattctggacgattgtcacttcgcaaacgcctggggttggaaatagccttaaagataagaaataacctcagggaattgcatccgttgcgtcaacttttctgggaatgtacattacagtgtaacttggcttgtaagcattgtggcagtgattgtcggaaaatgtcggagcagaaggatatgcctgcagcggattttcttcaagtcgtagattcgattacgccgcacgtcaatcctaatgaggttaatatcatcataaccggaggtgaaccgctgatgcgggatgatcttgaagaggtggggatggctctttatcgcaaaggttatccatgggggattgtgtccaatgggttgtatttgacccgcgaacggctcgatagtctgatggctgccggcctgcatgctgttacgatcagtctggatggatttgcggaggaacataactggttgcgtggcaatccggatagttatgaaaaagcgttggaagctatcaagatgttagtgcatgaaccggaactgacatgggatgtcgtgacttgtgtcaatcggaaaaactactcttatctggaagagctgaaagcctatctgtacactataggagtacgtaattggcgtatttttactatttttccggtagggtgtgcagccaatcatccggaattccagctaacagacgaggagtttaccggagtcctggaattcattaagaaggtacggaaagaggggcgtgtccacttgagttatggttgtgaaggttttctcggtaaatatgaaagtgaagtacgtgatcatttttattcctgtaatgcaggtatcagtgtagcttctgttctggcagatggttcgatctcgtcgtgtcccagcattcgcagtaatttccatcagggcaatatttatgaagatgattttatggaagtgtgggaaaaacgttttcaggtatttcgtaatcgtgagtgggcccgtaagggagagtgtgctgattgtagctttttccgttattgtgagggcaatggtatgcatttgcacaatgacaatggagacctcttgttttgtcatcagaaaaggattgtagaactttaagagactatttaggactattttttcatagattgggataattattctatttttcggactccatttggcctatatttgtagagttgtaatcctttcactccatcatgaagaatacattctgcgttttagcctgttttttcattacaatcttttgccaggcgcaatcggttgaagaacattattattttaagaacctgagtatccgaaacggtttgtcacagaatacggttaatgcgattctgcaggatcggaaggggttcatgtggcttggtaccaaagatggcttgaacaggtatgacggattgtcttttcgtaagtttaagcatgatgctgctaatccacgcagcattggaaacagttttatcacttcgctttacgaagatttcaatggtaacatttgggtcggtactgatgcaggagtatatatttactatcctgagaaggaggcttttgaggaattcgattgccagagcttggagaagacaaggatagaacgttctgtttcaatgattgcaggggataagcaaggcagggtttggatagctgtggaggctcagggaatgttctgttacgatgctcgtcaaaaactacttcgcaattatccgttaagtgagatttcttccaatatcaaatgttttactttcgatagcggtggaactctttggctcggattttatggtgacggtctttattactccaaagataatctggcaactgtgcatccttatggatcgccagaagatggtaaaagagaatttgaaggaggagtaatcaccaaaatagttcaaggaaactataattgtttgtatattggttctgtgaaggaaggtgtgagtgagttgaatctgacttcggggcaagtgcgtaacctgttggctatcgatgagagtggtgaatctattttttgtcgtgatctgctgccatattctgataatgaattgtggatagggactgagtccgggatttatatttataatttgcgtacagcgcaattcattcatttacgtgcttctctttatgactcttattctttgtcagacaatgctatctatgctttatataaagatcgtgaagaagggctctggatcggttcttatttcggaggagtggattattatcccagacaatatacctattttgcaaaatattatcctaagaatatagcaaatagtctgcatggtaagcgggtacgtgaattctgtcgggcggatgacggtactttgtggataggaacggaagacggcggattaaatcactttaatccgaaaacgaaagaattccacttttttgagccaagtgccggatttactaatatccatggtttgtgcatggatggcagtcatttgtgggtgggaacattctctaaaggacttcgggtgattgatacacggacgggagtgattctgaggacgtatacggaaggtcatacttcacattcgttgaacgataatagcattttctctatttgtcggacttctgccggagaaatttatctgggtacactgtttggtttactgcgttacaaccgtactcaggataattttgaccgcattccggagttgaatggtaagtttgtttatgatattaaagaagattcttatggaaatctttggttggcaacttatgccaatggagcttattgttatgacgtaagtgcacgaagatggaaaaactatgtatttgatgccgaggatgaaaagagtctgccatatgataaagtgctgagtgtttttgaggactcgtatcgccaaatatggctaactacacaaggtgggggattttgcctatttcatcctgatacggaaacatttacacgctatggactgaaagatggacttcccaatgatgtggtttaccagattgtggaagatgatgatcgttttttgtggcttactacaaataatgggttggtccgttttgatcccaaaaccatggaaatgaaagtattctctactgctaatggcttaccgaccaaccagtttaattaccgttcgggatttaaagatgaggccggtaacatttatttgggtagtattaacggatttgtagcatttgatccccgaactttcgctgaaaacaggcaggtgccggcagtagctattactgatttcttgctgtttaataaagaggtgccggttggagaaaccgattcacccttgaagagcagtattacgttttctgacaaagtggtactcactgccgatcaaaattctttttcttttcgtatcgctgctctaagttatcaggctccaaggatgaataaactgatgtataagcttgagggctttgacgaaggctggttgacaataggagaaagccctttggtgacttattccaatttaggctatggcgattatgtgtttaaagtaaaggcctctaatagtgacggagtgtggaatgaacaggagacttcacttcatctttctattcttcctccattctacttgtccggatgggcatattgtttctatgtattatttttcatggggtgtctggtctgtgtcatcttctactttaaaagacggaattatcggaagcaacatcgtcaaatggaaatgcttgaacaagagaaagaacgggaagtctatcatgctaagattgatttctttaccaacgttgctcacgaaatacgaactccgctgaccctgattaaaggtcctttggaaaatattatcctgaaaaaggaagtggattcggaaacgaaagaggatttgtatatcatgaagcagaatacggagcgtttgttgaatcttaccaatcagttgttggattttcgaaagacagaaacacggggattccggttgaactttactgaatgtgacgttgttgcagtgcttcgtgaaacctatctccgttttacttctttggccaagcaaaaaggattggattttatattagaacttccacaggagtgctttatggcggatgtcaatcaggaagctttgacaaaaataatcagtaacttgctgaataatggagtgaaatatgcctctacttatctccggatttctttggaaacagacgaaaaagtatttcacatacgaacttttaatgatggggagatgattcctgatacaatgaaagaggaaatttttaaacctttcgtacggttggataaagaagatgaagtaactaccggaacaggtatcgggttggccctatcacgttctttggcagaattacatcaaggtagtctgatgatggaaaagggtgaagaggtgaattgcttttgcttgaccttgccggtgaatcaagattctacaattactctctcggctgaaaacgtatcacaggttgaagagaactcttgtggatgggaacaggaagaaaccgatacgaaagaaaagaaaccgatgattctagtggtagaagataatccggatatgttagcttttatcaggaagcaacttacaacggagtattcggttctaactgctatgaatggaattgaagcacttgctgttttagataatcattatgttaatctggtggtgagtgatgtaatgatgcctcagatggatggttttgaactgtgtaaaactattaagtcagatttgagttatagtcatattcccgttgtactgctaactgccaagactaatattcaatcgaaaatcgaaggattggaactgggtgctgatgcttatattgaaaagcctttctctgtggaatatctgctcgcaaatatttccagcctgattcataatcgtgaaaagttacgtcagacttttgcgaagtcaccctttgtggcagccaatacgatggctttgaccaaagccgatgaagagtttatatggaagttgaatgatattattcaggctaatctgcataatccggagttcagcatggaagatatggcagatgcattgaagatgagtcgatccagcttctatcgaaaaattaaaggtgtattggacttaagcccgaatgagtacctccgtttggaacgcttaaagcaagcggcacaattgctgaaagagggcaagagtcgcgtcaatgaaatttgttatacagtgggatttaattcgccttcttatttctctaaatgtttcttgaaacaattcggggtacttccaaaggactttatagggtaatgctaaaaaaaggtcggatattgttatgaatctatgtgtttaggacatttttgtcattaattgggttatttgttttataaaagaactgccggttagggtaactttgtcatcatcattcgacaaatagaaattactaaaatgaaaagacccttatgaaaatgattttaaagacaatggtgtgtctggcagtagctttttccggaactgcaggggcagctaattattctccggaaaagtcacaagcttctttggcacttaaagtcccggggaatccggctgtggaatatccgcttactctcagtaaactatcggatagttatttcgattatgagtggaaagcaaaagagaaaataccggtaactatctttcagcagatatcaactgtggatgataaacagcaggtaacggtggttctgacggctatggaagatgtgtacttcaattttgaagagcgaatcagaacggattttcgtcatgatgattgccagttttatttgccaggtttctggtatcgtcgtaatttacgttcacctaaagaggctccatcgtttcatacttccgatagctgggtagtgcgtgaagatagattgagcacgcctttgaccggtatttttgatgaaaaacaaaagaaatacatgactgtggtccgccgggcagaatatattcaggacgctttgagtactcataaggaaggtgaggtgattctttcgggaactacttcactcggtttcaccggatttgaaaatctggatggaacggctgctttggcatttggttttccgtataaagaggctccaaaaacctatattcgtaaacttacacttgcaccttcagtcactgctttccaactattaaagaaaggagagagtatttcactaacctgggaaattcatgaaggaaaaggggaggattttgccgagtttgtaagtcatacttgggaatattgctatgatacttttcaaccgaaacctgtggaaacggattatactcctgattatactaaagagattcttagccatttttttattgagagttttgtaggtgatcgtcctctgaactataattcaggggtacatatgcgtactgatgattgccaaaatacaggttcggcagaggttggttttgtgggacgagttttgctgaacgcatttaatgcctgggaatatggctggaagaataatcgggctgatttaaaagagaatgcagcgaaagtctttgatacttatttggtgaatgggttttctcctgcaggttttttcaaagagttcgttgactaccgtaccggttatgaggagacggtatttagcattcggcgtcagtccgaaggtatttatgctatatttcattatctggattttgagaaaagaaacggacgtaaacatcctgagtgggaagcgaaggtacgtaaaatgcttgatgtattcctgcagttgcaaaatccggaaggaagttttccccgtaaatttaaggatgatctttctattgtagataagagtggcggaagtacaccatcggctactctgcctttagtgatggggtataaatatttcaaggataaacgttatctggaaagtgctaaacggaccgccgaatatctggagaaagaattaatctctaaatcggattatttttcgtctactcttgatgcaaactgtgaggataaagaggcctctttatatgcggctacagctacttattatttagctttggtaagtcagggcaaagaacgtgaacactatacaggattgacaaaaaaagcagcttattttgctttgtcatggtattatttgtgggatgtaccttttgcgcccggacagatgttgggagatattgggctcaagacgcgcggatggggcaatgtatctgtggaaaacaatcacatcgatgtgtttatctttgaatttgcttctatactaaattggctttccaaagagtatagcgaacctcgtttctcacagtttgccgaagtaatcagtacttcaatgcgtcagttactcccttatgaagggcatctgtgtggagtggctaagtgcggatattatcctgaggtagtgcaacataccaattgggattatggcaaaaacgggaaaggatattataatgatatatttgctccgggttggacagtagcttctttatgggaactattttcaccgggacgtgcagaacagttttttcggaaataaagagtaataagtgaaacgatcagaggccggtaacgttctattaggaatattaccggtcttctgtatctaaaaataaaaattcttctatagggagatttttctataaaccatcttgttattgtttcagtttggcgaacattacaatattattgtcattgtcatttaacgtcttgatcaagttctgtacctttttctttttatctacggtcagtccttttttgtttacttctttctctagtatctctttcaatgccataggctccatattagtgacataatatccattgttgaacgaaggatagatcgtctgactcggggtactgataaaatcgttgtaaagccgcacataattgccatgcaatgtttttttgtcaaccatgtaataagccggtttagagccggagaatgtactttcgtctatttgtattgggaaagagacatcaccgatgaaatatttagggatttcataatatgcatgccaggggattttatcatttgaaggatacttgacggtgaaacgtccttccagtttgttgctggcggcattataatggtagagggtatctacacttggttgtggcatgattttcattaacatcacatcgtaggcagctgtgttattccccattgacacttcgttactgaagtcttgtggcatggcaaggcttcccggtgctacaaagtttttacgtttaccctttaaatcttgtgtccagactactgccggccatttagggaatggcaggactgtgactgtgacttctgacttagctgtgtttacccggaattttcctttaggaactctcaggcacagggggataggatccaatgcattacctttcaagtcgaataccaatatcttgctgctttgccagggtaggatatagatgcgattattggcttcgtccagttgttcggcataagtgtttagatattcattcgggccttgtccataagatccgatattggtgataaatttacctgtccggtcgaatagtttataaggagtttgtttgttattgctcactaaaatatatttttctccgacggttgttcgtatccagccgccaataagtgcttcgtcccgattgtctaattttacaatctgtaattcttctgttaactggctcaatgggaagtttacagtatcttttagtgccttcagatcgcaactgattagcggaccgttaggggtatttgttagtttggcaacagtaggcgatttgataaatgggtcgttttcaccggttgtaaaagcaaaagcaggcaatagacaacagattgccaaactgtgatagatcattcttgttttcataagcataaataattagatgaataatcaaacgcgttttgtaacagcaaaattagatattaaggtaagagaaggcaaaaaaacaggcggacaagaatgattgtatgaatatggtttaaattgttgttttataaatggttatgtaaatatagcctcttcggataggcggacaaatactatccgaagttttgaagaatggcatccaggctgagagtttcgtcagaaatatgcatcttttctgttttaattcggtatttgcgtttggttatggccgctttgctgacgcaatagatatccgatagatcttgtatgttcacgttaatctttaccaggcaacaaaagcagatatctttttcattgagttgcggataatcttcttgcagacgatcaacaaaattattaaatgcgtcatttaccgcttgcttcacttcacaccattctgcatcgcttacagtaattttcttcctattcggattgtcatctgtagagttctcgatgtggagagaaggaagtttctgaaggaaagaaatatgacggaacaaagcttcacgcatctcgctttctttgttgcgcatgatgatctctttttcgcgcagtgcacttaattcggcttctttatgtaatagttcattttcatgttgtagccgacgagcttcttctccggcctgttctgcttgtagccttcgttccgatactagtctttttttcttttcctgatgatagaaaaagagtattagtagagctataagtaataaaataactgctattcccatcatccacagctctttttcttgttgggtaaggcgtagttgatagagttcgttctggagctttacttcattatattttctggtggtttcttttgctttgaggtttgatgtgaggtctttatatagtatatcttctgttttagccagataatatgcctgttccggttgctgggtcgcatttgtcagctggtataaacgtgaggtagcctcaatggcgatatagggtgaagttgaggtagctgcctgtttataataatatccggccgagtccaattgatgcagggactggaatatttggcctcggatcaattggtagtaaggtatatcatagcgattgcgacgatacaggcggaggttttgcacagattccagtgccttgtcgaagtcttgctgtcctagataatagtttacgatgtcttcggctatggtgtaagttagataatgatattctttggaaggagcaaaccattccaacattttgtaatacccttctatgacttcatcggtctttcccatttttcttaatatttccaattgggtccgatgatcataaaataaagaaagagtgtcattagaagggttattcagggccaacaccttattagccaattttagtgcttctggatactttttttgattgaaataggtgaatttttgtatgttatagtaatatctttgttgggtgggagtcatatactctgttttgtcccgaagctcccgggcagaatgtaaaatagaatccggttgatctttataaaagaaactattggcctgttccagttgggcttgtaaccattgggcagtatctccaacatgtaggaaaagtgggatacagacttttaatagtgaatctttgggcttttgggttttccacaatgtggctttatacaattgaaagcagtattctgcccgttgtttgtcactcaggtgattgggggactgtatttgttgaagataaaatagcatactgtctgtagaaataccttccatttctacagacttcttgagtaaagtctgagttgaatctttacatccggtcacacaagatagtaaagctaaacagagtataataagaaagctctttttcataatgcttttattcttgacgttacccggcccaattttcccgatctaaattccgataactgattgcctctgccaaatggctgggttgtatttgttcgctttcttccaaatcagctattgtgcgggatacttttaagatacgatcataggcacgggctgaaagattcaggcgttccatggcattctttagcagtaatagccctttcgtgtcaggttgtgcaaaagaagaaagttgcttgctggtcatctgggcattacaataagttcccggatagccggaaaatctttcttcctgtttctggcgggctttgattaccctttggcgaatggcagcgctggattctccctgttgccggtctgaaatcttttcaaatggtacgggaactatttcaatttggatatctattcggtccagcagggggccggatattttattcaggtatttttgtacttgtcccggattgcagacacatggttttgtcgggtgattgtagtagccacaaggacacggattcatggaggctaccaacatgaagctggccggatagtcaatagtgcttttcactcgtgaaatggttatacgccggtcttcaaggggttgacgcaatacttcgagcacgctacgattaaattccgggagttcatccaggaagagtaccccgttatgtgctaggctgatctctcccggttgtgggaaactgcctcctcctaccatcgctacttgtgagatggtgtgatgcgggtccctgaaaggccgctgagatatcagagaggaattgcgtcctaatttaccagcgaccgaatgtattttggttgtttcaaggctttctcccaaggataaggggggaagtatggaaggtaatcttttggccatcattgatttaccacttccgggggctcctaccataattaaattgtgtcctcctgccgccgctacctcaagtgcccgtttaacgttctcttggccttttacatctgcaaaatcgtattcaaaatcactctgacacgcataaaattcttcacgggtattgactatggttggtgtcagttcacgtttaccattgatgaactcaattacttcctgtatattatttactccatatactgacagattattgactaccgccgcttcccgtgcattttgtgaaggtacgattaatccgtcaaatccctcttcgcgtgctttgatggctataggtaaggctcctttgatgggttggatagttccgtcaagacttaattcacccatcatcatgtaacgtgatagcttctggcatgagattgtttcgccagctgcaagcatgccaatggccagggggagatcataggatgaaccctctttgcgaatatctgccggagccatattaatgactatattgctggttggcattttgtagccggtcacttgtaaggcagacagaatacgctgatggctttctttaacggctgaatcaggaagacctaccatgtagaacatgcatcctcgtgaactgttgacttctattgtaatgagggttgcttcaatgccttgtacagccgctccgaatacttttattagcacgtgttttcaatgattttaggttagtaactcggtttagcggatagatttccctgtttttttctcttccgtttttagtaattctttcagcttaccggtaagcgcttctccctggatatctcttgctagaattttgccggtgggagagagcagtatattagtaggaagcgtcagtatggcatattgtttggctgtttccgaactaagtcctgtaaaatcacatacttgatcccagctcaaagtatccttcttaatggctgtttcccatgcttctctatctatgtcgagtgatattcccaacattgcgaaatttttgtttttcttatattccttattcagtctttttaattctgcattggcttcaggttgcggatcacaccatgaagcccagaaattaagcaggagatatctatttctgaatctctcggcagaacgtgataatttctcgcctttttcattgggtaaactaaagtaaggagcagatttcccgacagtcactttttccaattgatcgatgtagtcgctgatattctcgatatacgggcggtcgaggagtgcacctgtcatagcctcagttatttctttaattttgatatagtccggttgcggagtctgtacaaagtatttatccagcagataaacacttgccaatgaagagttgtgttggcggataaatgtttcggccttctcctgcatcattttgtctgatgcactgcctaagcctctttgttctttcataaaaaggctcaaactcgtatttggttcattgccatttatgtccagatagctgagatcatcaatatttcctttgatcgtaatttgatttcctttatccaaaaaaacaggatactctacatgaccgtttatcaggagtacggctgtagtcagtgtgtcaattactgtagaatcgatattgaggttgtagctgaacttgcctttctctgcataaatcgtatctatacgatcgtacaaagcatctgtcccatacaggtagagtgtgtcattagtcaatcccttgatctcgccttccagactgatcctggaactgttgtttttgcatgcaagtaagcaaaatatggtaataaatagaagccctatctttctcattcttcattcttttttgcgaaagtaagggttttgtggataaaaaaaaagaattgtccgtcatttgtgtgacggacaactctcttttttatgttttgctcaatgaagtctcgcttattttacgatgctcatgaaatctgcattcgtataatatttagcgaactcaagatctgtagcagctttcttagccagagccgggtttttagctacagcactcttcaagctgcttgtcagcatagaagtgttgttagttcttgcacccagaacagccatcaggtagtctgtgtaagcatccggagttgcgataccggccaatgtgtttttagctttgttgtagtccttagcaaggatctgtgccaaagcagcactgtttgttttagtatcaccaaatgcgttaactgctctttcgtattgtccctgagctacgtacaggttacccagtgtttcgttcagttcttttgcaccggcagccttgcctaagtaagattcagcagcagctttgtcacctttagcaagagcgatcagacctaagttcatgtttacttcaggtgcagatttaatgctttctgctttcttcacgtatgattgagctttgtccagatcacctgcctgataagccagtttacccaagttgttgaatgcacgatagtcattcgggaactgctgagaagctttagtatagatgtcagctttcttagccgggtcgttagtcagtgtagcagcgtacagaatttcctctacgttcaactgtttcggatctgttgcagccagattagcgatttcttcgtcagacttaccgatgatttcatagttcaaagtcaaacgagaacgacgcaactgcggcaagatttcgtcagccaaagttttgtaaacagaagagatgttcttaatttcagtttctctttgttcaggatcctgatacatagacaaaacgcgaaggatcaattctttatcctgaatgtttgatttagaaaccagttcttggaaaccttcccagtcctgtgcagtatatttagcatcaaccggaacttcaattttagctttcttcaggtctttgttgatcagtttggttgtgttaccttcacggttttcagccaaccctgtattcaacttcacaccaccatcgggagaagcgtaagcagaaatttcgatattgctgatcttcttgttttcagcatcgtttacattagcaacttctttgttgaattccttagcagtcttcaattcgcttgagcggatgttagcctgttggataaggaacataatgttagcgttgtgtgcttctttgatgatacgttggaaagcgtcgtcacccaaagccggattagcactgctcaaagtgttgttaatcaattcagaagtagagatcacaccgtctgcgatttttacagcagggatagcgattgttttctttccgacttttgcgttgaactcaaggtaaagttcagattttgccatttcaggaacgtagtcgaatgtagttttcatcgtgtaattaccacccatcttgtaagagatagtctggtcgttaccttctaccttttcaccctggaatacggcaggctgtcctttaacttgtccaccctcccatttcagaaccggagttacttcaacaactgcgttctttttgaaatacttttcagggaactttccgttgatagtcacaggaactttaccacctacagcttccagtacctgaggagtcgtagtgaagtaatcagatgacagtgcacccattttgttgctacatgatgacaatgcaacaaccaatgccataagtaaaggcaaatacaacttcttgatcattttaggtataaattaaatgtttgtaattgaaattttgtctattcaatatgcatctgtggattgcccataaatgccacgcaaagatattaattcttatacatttaggcaaatacactcttaattttattataatttaatgaaaactatcgtgtttacgggttgtttagcactattttccttcttaaacaacaccaaatcagcctctattgtttaccgaaacggctttttttcttgtcggtatttgatgttgcgtggatgatgttctatgatttcacttcgcaacatattgcggtcgatgtgggtgtagatttcggtagtcgaaatagactcatgccccaacatgcattggatagcccgcagattggcgcctccttcaagtaagtgtgtcgcaaaggagtggcggaatgtgtgcggactgatatttttggtaattcccgccatatcggccagctctttgatgagatgaaagatcatgattcgtgataaatgggtacctcgcctgcttaaaaacagataatcttcatgatctttttttatattgatccgatttcgatccaagaaataaagctttatttcctggatcgctttgggagagatagggactaatcgttgcttgctgccctttccttctactttaatgaaaccttcgtcaaagtacaagtctgatagttttagtccggttaactcggaaacccgtaatccacagctgtaaagcgtttccaggattgcccgatttcgttgcccttcgttcttactcaggtctattgtcgaaataatccggtctatttcttctacagtcagtacttccggaagtttaaatccgattttgggaccttccagcaattcgctgggatcggcttctatataatcagctataatcaaaaagtggaaaaaggatttaatacctgaaatgatacgtgcctgtgaacgggcgtggataccaatatcatgtaatccggcagcaaagcgttgaagatctgtcaggctgacttcaagtatctccacgccttcggctgatagaaaacttagtaacttctccaggtctgtcaagtaagcctccagtgtgtttttggataaggacttttccagtttcagatactgttggtactttttgataatcagcccttgctcatccttcttttttgttttttcctctaatttcatttcttttttctacctttgcaccttgaaatattgttctcgaagacaaaggtattaaaaatagcaggattgtgttatgaggatacaaattattaatggtcccaatattaatcttttgggcaagcgtgaaccttctatatatggaagcgttacatttgaagagtatttggctgaacttcgtaaaaaatatcccgatgtggaattgggctatttccagtcgaatgttgaaggggaaatcatagatattattcagcaaaccggattcgatgtggatgggatcatattgaacgcaggagcttatacacacacttccattgctttgcaggacgctatccgctccgtaacctctcctgtagttgaagttcatatatccaatgttcatgcccgtgagcagttccgccatgtatctatgattgcttgtgcttgtaaaggtgttatttgtggatttggattgaactcatatcgtctggcactcgaagctttattagataaataggtataaatataaataggtagatagattatgttgctgaaacagactaaaatcgtagcttccatctcagacagacgttgcgatgtagattttataaaagagttgtttgatgcagggatgaatgtggttcgtatgaacacagcccacgccagtcgtgaaggttttgaggcgttgattgccaatgtgcgtgccgtatccaatcgcattgccatccttatggataccaagggaccggaagtgcgtaccactgccaatgcggaccccatactttatcagatcggtgagaaagttaaaatcgtaggagatcccgatcgtgagactacccgtgaatgcattgccgtttcatatccgaattttgtgcatgacctgaatgtaggggggactattttgatagatgatggtgaccttgaattgcgagttattgataaaacaaccgaatacttactttgtgaagtccagaacgaggcaactttggggagccgtaagagtgtaaacgttccgggtgttcgtatcaatctcccctctttaaccgagaaagatcgtaataacatcctttatgccatagagaaagatatcgatttcattgctcattcttttgtgcgtaaccgccaggatgtgcttgatatccgtggaatactggacgctcacaatagtgatatccgcattattgccaagatcgaaaatcaggaaggtgtcgataacattgatgagatcctggaagttgccgatggagtaatggtagctcgtggtgacttgggtattgaagtaccgcaggaacgtattccgggaattcagcgtatgttgatacgcaaatgtatccttgccaaaaaaccggtaatcgtggcaacacaaatgttgcatacgatgattaataatccacgtccgactcgtgcggaagtaaccgatattgccaatgcaatctattatcgtacagacgctttgatgttgagtggtgagactgcctatggcaaatatcctgtagaggccgtgaaaacgatgactaagattgctgcacaggctgagaaggacaagttggaggagaatgacattcgcattcctttggacgaaaacagtaatgatgtcacagctttccttgctaaacaagctgtaaaagcaactactaagctaaagatacgtgccatcattacggatagctatcaggggcgtactgcacgcaatttagcagctttccgtggtaaatatccggtacttgcaatttgttataaggagaagactatgcgtcaccttgcactttcttatggtgtggaagcgatttatatgcctgaacttgccaacgggcaggagtactattttgcagctctgcgccgtttgttgaaagaaggacgtttgcatccaactgatatggtgggttatctgagtagcggtaaagccggaacgcagacttctttcctcgaaatcaatgtcgtggaagatgctttgaagcatgccggtgatagtgtgttgcctaatagcaaccgttatttataagagacgagatgaaagagaccgatcttttagacgaatatatcttgcagcatatcgatgaggaaggtgaatacctgaaatctctttatcgggatacgcatgttaaactcctgcgtcctcgtatggcttccggtcatctgcagggacgtatgttgaagatgtttgttcgtatgatacggcctcgccaaatattggaaatagggacttatagtggctattccgctctttgtctggccgaggggcttgaggagggcggaatgcttcacacattcgagattaatgatgaacaagaagactttacccgtccctggctcgaaaactcagcttatgctgataaaattaaattttatattggggatgctctccggttaatacctgcattgggcattacgtttgatcttgcttttgtggatggtgacaaacgtaagtatattgattattatgaaatgactcttgcacatctttctgtaggaggttatatcatagctgataacactttgtgggatggtcatgtgcttgaagaaccacatagcaatgatcaccagacgatcggaatcaaggctttcaatgagttggtggcacatgatgaacgggtagaaaaagtaattctgcctttacgtgacgggttgactataattcgtaaaaagtagaatgatttttcgttgtttgggctgtgataagtgattgtaatagctggctgtccatcttcttgtattcgttgataattgctttaaatcttttctgtagagtcggtttatttcagaccgacattttatttcaaaagtgtatgttttcttgtaacgtctgcttatgtgctttccgtgaagatcgttttttgaataataattcaataatgaaaattaaaaataacatattattggcctatcaaacgatatatttctataactttgtgttctattgtaacaagtactaattgcttgtttgataaaataattacgtagaaaaatttatggaaacaacgagacaaaacaagatatcacgtctgttacagaaagaactcagtgagattttcctgttgcagactaaagctatgcccggtgtactggtatcagtaagtgctgtacgtatcagtcccgacatgagtatagctcgtgtatatcttagtatcttcccttctgaaaagagtgaagaaatggtaaagaatatcaataataatatgaagtccattcgtttcgaactcggtactcgtgttcgtcatcagttacgtatcattcctgaattgaagtttttcgtggatgattcgttggactacattgaaaagatagatgctttgttgaagtgaacctccccttctacatagcccggcgatatcttttctcaaagaaaaagcacaatgccatcaatatcatttctgctatttctgtgtgtggagtggcattggctacgatggcgatggtgtgtacactttccgtattcaacggttttcaggatacagtggccgatctgtttactgtatttgatccggaactgaaagtgacgattgccgaagggaaagtttttgatgcacaggcccctcgtattcaagctatccggcagatgccggaagtagatgtgctgactgaaacacttgaagagaatgcgatggtacaatataaggaccgccagacgatggccgtcataaagggagtacaaaacaattttgagcagttgactgcgatagatagtatcctttatggtgcaggtgagtttttgctgaatgattctattgttgattacggggtgatgggaatagagcttgtctctacattggggactggaatcagatttgttgatccgttgcagatatatattcctaaaaggagcggaaaggttaatatggcgaatccggctgcttcctttaatatggattatttgtattcgcccggtgttgtgtttgtggtcaatcagcagaaatatgacggacagtatattcttacttcgttggattttgcccgacgtttgcttgactatactaccgaagtgtctgcaatagaactaaagttaaaacccggctctgatctttccttcgtcaaagcaaagattaagaaagaactgggagatgattttgttattcgtaaccgctacgaacaacaggaagatgtatttcgtatcatggagatagagaaactggtttcatatttgtttctcacttttatcttagtgattgcctgttttaatgtgataggttcgttgtcgatgcttattctggataaaaaggaagatgtggatacgcttcgcaagcttggagctaatgatcggttggtttcgcgtattttcctttttgaaggatgtatgatttccttttatggagccataatcggaattgtactcggattgctgttgtgctgggttcagatgacgtacgggattatttcattgggtggaggtagtgctgcaggaaattttgtagttgatgcttatccggtcagtgtacatttgtgggatgtcatcgtgatatttattaccgtttttgctgtcggattcttgtccgtctggtatccggtaaggtatctaagtaaacgtttactaaaaatgtagagaacatttttatcggcataattgttctattagtcgatttccatttcttatttttatagaaatgtttatttttgatttattaatgaaaatcatcatgtttatatatagtgttaatagtatctctgtgaagagagaattgttatgtaagtgtaatacctctctatgaaagaaagtttcgtttttcataaaaaactgatgatcggcgctgttctgtcccaacggggaagagcagcgctacttcatttataatgaaaggaacagtaaatagagtttgatgttttttcgtagaaactttagggcatcggagatgtggtgttccactgttctttctgatatttgtagtctttctgcaatttcgcgataagaaagttcctcatccctgcttaaacgaaacacttcctgctgccggggaggcagcattgagatcagtgctgagatatgtgtgcgcagattggctgcgtccaattcttcttctatatcgtatgattcttcgacagcttctatcactgatagttggtagaagggttcattcagattcttacgggaacggttgaaaacaaggttgcgcatcgtgataaataagtatccggcaaaattttgttcttcatccaaagcttcccgattctcccaaattttaataaaaacttcttgaacgatttcttccacatcgaccgcagaggtgatgtaaagtcgcgtaaaattgtaaaccttagcccaataagagcgatagaggaatgcaaaggcggctttatcattgcaggtctttagtttaataattgcttctttttcgttcattaagcgttacgtttgaattacaaatatagcatactcaatttataaaacagaaaaaaagccgaaaacatataggggggaattttataaatagtgtatttatggatagatttataaatatagcttggatttttggaaagaaatataaagaatatgaagatttctaataaatatgataggcttgtccgcaaattgattgcaggtgagtcttcttcggaagaaatggaagagctggcacattggaatgttgtggagacgaaaatgaaaaaacaattcgatgcggcaaaaaatatagtggaaaatggtgctattgaaagaaggatctgggataagattgactccagatgccaggctcctgttgagcgtagtcagaaacttcaactcagatattggagggttgcactagccgcatgtattacggctttattgattatcggaggtggtattttcttttttgataaagggcatacagcttcacagcgtataattgagtatactgaagttgtttcttcaaatagccggttgtatgtacttcccgacagttcaaaagtctggatgcaggctgggagccgtcttcgtttttcacaggattttatgagtaaccgggaagtatggctggagggagtgtctacttttgaagtaactaagcgtaaaggacataattttaaagtatatatcgatcaggcatttgtcgaagtcaaaggaacggtctttcgtgtgcagtctacctgtcaggatggtgcggaggtgactctttttagtggaaaggttgacttcaatgtgaaggcttcacagagaaaagttgaaatgaaacctttgcagcagattgtttttcatcccgagaaagatgaagtgatattaaagaacataggtaatatcagttgggatgaagggcgttataagtttgtcgacatgcgtatggatgatttaatagaagctattcatgatatttaccacattccggtagaactcgataggaaagtagctcgcaatgacttgttcacgggttatatgcgctatgatgaccctgcctctaaagtcatcgaaaagatttgtattaatatgaatttgaaatttaaaaaagaaacacagaaaatcattatttataaataatcgcttttatcaatcactaattaatcgtataatcaaaaaatgaaagacatgagactatgttttagcgtctgtaacaggcgttttctgacaggcgtaattatgtttatgctcctgtatcctatgtccgtttttgccgtgcaaggacagataaccgtgcagggaaaagcaatgagcattaaacaggctattcaagttattgagaagaacagtaaatatacgttcttctacaaggcggccgatttgagcaatgcaaagatccgtgacatccattgtgaaggttccatagaggaagtgctgaatgttttgtttaaagatagcggtatcagctatgttatcaaagacaatgaggttattctgaagagtaccccggtagtggttgcaacgccacaacagagtaataagatcgttgtgaaaggcaatatcagggatactttgggtgaatcggtcattggagctaccattatggagaaaaataatgctcaaaatggttctatcagtgatataaatggagatttctccttgtcggtaagtccgggtgctgttattgttatctcttacattggttatgtaacgcaagaattgaaagccatagcgggggcccctctgaaagtagtactgaaggatgattcccgtactttggatgaagtggtggtagttggtttcggttcacaaaagaaagcgaacctgacgggggccgtttcatctattaaaatggacgaaattattggcgatcgtcccataatgacggcttctgatgcattgcaaggtacagttccgggactgctggtttctaatagtggaaatgctccgggtagcggaaagtcattccagttgcgtggtgcctattcggtgggtatcaagaatagcgacggatcttatggtgccaatgtcgctccccttatcttgattgataacgtagaggggagtctcgatatgttgaatccggaagatattgagaccgtaactgtattgaaagatgccgcttcggcagctatttatggtgcacgtgcagccggcggtgttgtcttagtgactaccaagcgtccgaaagaagctacggcctttcgtctgaattataacaataattttggttttgctactgcaaccaatctgcctaaacaggcatctttgatggattatctgcaggcttatcaggacgggggatattctgatgcttattggtcgtatggttcacccagcgtttcaaagtggaaagaatacctcacacagtataggcaggatccttcatctatcaaaactgtaggtgacggtattttcgcagatacggatggagctttgtattatttgaatgagcatgatccctataagaattttatggagaccagcttccagatgaaccacaatctttctgtatccggtggtacggataaattgcgttatcgtatgtcggcgggatatgtatcgacggacggtgtgctgatcaccgataaagacacctatgagcgcttgaacatcaattcctatatttctgctgatataaccaaatggtttacccaggagttgactatgagttatgcacgtaccaatcagtcgcaacctaattccggtttgggaagtatgtttggcagtaatcaggtttcttatcagccggaaggtaatatgccttcggatgtttgttctacaatttctcaggatttgcctttcaacacaccgcgcaaccaggtattgttagcaaataaatggaaaaagtcgtatgataatccgcgtgttttcgtgaaatctattctgaaaccgttcaaaggttttgaggcagtattcgagtatacatttgacaagaacatgtatgattataatttctataccggaaaaactcagtatacagatattcagggaggtaataacatctggaatgcagcaaaagattatttgcagaaagagaagcaatttaccgactacaatgctttcaatatttacggaacatacaagtttgatctcaacaaagaccatcatttcagtgtaatggccggtttcaaccaggagtccaagtatacagaaggtgtaaatgtattgtcttataatcaggctgttgttgaagtaccggcattgggttcgggtacaggtgacctgaaagcgacagacagttataatgaatactctgttcgaggcggatttttccgggtcaattacaactatatggataagtatttgctggaagtgaacggtcgttacgatggttcatccaagttcccgaaagattcccgttttggtttcttcccatctgtatctttgggttggaacgtagctcaggaaaagtttatggaagttacgcgcaattatattgatggtctgaagattcgtgcatcttacggtgtgatcggtaaccaaaatgtagtgaactatgcatacttcccaactatgagcgttagcaataaatacaacggttggctgtctggaggtgattatgtaactgctatcaactctttaccgaatctggtaagtacaagctttacttgggaaaaagtggccactacggatatcggactcgacttgaatatgttcggtaatcgtatgaatgttgtgttcgactggtatcagcgtgatacaaaaggaatgttggctccgggtatgcagcttcctgctgtggtaggtgcaagttctcctttccagaatacagccgatatgcgtactcgtggttgggaactggcagtgaactggagagaccgtatcggtaagttcaactatcgtgtcggattcaatctttctgatagctattctgaaattactaagtacgacgacaatgctgcttctaagctgctgagtaatttttatccgggacagagactgggagaaatctggggatatgaagtggacggattctatacggtagatgattttgtagatactaatagttggaaacttaaagatggagtggcctctattaaaggtgtcagtccacgtcctggtgacttgaagttcaaaaatctccgtgatgatgacaaaagtacaaatcagattgatagcggagacggtacattagataatcccggcgaccagaaagtaataggcaatagcttgcctaaatatttgtatggtattactctcggtgctaattataagggtttcgacttgaatattatgatgcagggaaccggccagcgtgatgcatggattgccaataacctggtattcccgatgtatatttattcagtaaacgatatcaaataccaaccgctgtttgatggtttgactgactattggaggccggtagatgcagccaatggagattacactgccgtaaatccgaatgccaaatatccgcgtatgtatggacaaaatcctacagtcggctccaattacggacgtaagacagataaatatttatctaatgccgcttacttccgcatcaagaacgttactttgtcgtataccgttcctaaaacatggatatcccgaatcggcttaaatcagttaaagggttttgtcagtgtagaaaatctggtaactttctcttcattaccttcaggtatcgatcccgaaactctgagctggaactatccggcattccgtaccgtttcgtttggtatcaactttacattataaacgcataatcaagaattaaaaatgaaaaagatatatctatcattggctattttagccggaatcggactggccggatgtaatgacagctttctggagcatgcgcctgtcaccagtctgacagaaaataatgcttttagatcttatgataactttaagtcgtttgcatggccttgttatgagatattcaaggataataatatagccaataccattaacggaaccggacaaggttcctgctatgcaggtgatatgaatgccggatacttggaaagccgtgccaatgagtcgggcaatgactatgctttcggaagagttcagagtgtagcttcgggcaatggttggggcttttccggcacattccgtcgtgccaatattttgcttgctaacatcgataagtcggaaatgaccgatgccgaaaaggaccattggcgtgcagtagggtattttttccattcatactggtacatggagcttatcaatcgttttggggcggtgccttgggttaatacggcccttaacgaaaattctcctgaggcttacggtccccgtgttgaccgcgaaattgtggccgattccgtattgaaccgtttgaaatgggctgaagcgaatattggagattttgagaagcaagatggtgcaaataccattaatcgcgattgtattcgtgcggctatctcacgatttgcgttgcgtgaagccacttggcgcaaatatcacggaatagacggagctcagaagttctttgacgaatgtattcgggtgtcccgtctgttgatgaatgattaccctactctttattacggaacagacggtcagcccgcagccggatatggagagatgtggacaacagaagatttgggcaaagtgccgggtgtcatcttgtatatggagtttgttcaagacatcaagatggccaattttagtgcattggaacatatggatagccacaatgtagagatgaatcagcatactgttgacctttatctgtgtaaagatggcaagccgattgctacttctgcaaattatcatggagataaaactccctatgctactttccgtgaccgtgatccgcgtttatatcacgtagtaatgccaccgtataaagtgaaagcaaaggtgaagacgaaagaagatcccagaacatgggattataccgatgatccggcagatcgtgaatatatcgatattatgggtcctaacgaatcctgtgataatcccggtattggtatgaaacgccttcccggacagaactggagtgcttcattggtaccttcttcaccaaactttatggggggtatcggagctacaggttttgtgagaagccgctcgggatattatttctggaagaattggagcaactgggaaacgaaccgtaacggaggtgtcactctgaacacatcggataagcctatctttaagatcgaagaggttttattgaattatgccgaagccatgtgtgagaccggacagttcactcaggcagtggccgacgaatctattaataagttgcgtagacgcgccggtgtggccgatatgaaggttgccgatattgatgatagttttgatccgaaccgtggacgctattatccgaaaggaaatgaacaaggtgttctggtagatcctgttttatgggaagtgcgccgtgaacgtattgtcgagctaatgggtgaaggcttcggattctacgatatccgccgttggagaatggcgccctggttccttaaccgccagtttaaaggaatgtggatgacgaaagataagttcagacatggtgcccagttcttattgaatgaaacgaccggtggaccggaccctgccgacggagccatgacagaaggatatatttatttacaaccggaccctatcaaagcaggtgaaggctggcaggagagatattatctttatgaggttcctactcaagaaattatcttgaatccggcacttgcacctaacaatccggggtgggaataattgaaacggaatagcaatgaacctgtttcaccacagataacacagattttcacagattaataatttattttattgataacaagattagaagttctgtgaaaatctgtgttatctgtggtgaagttaaaaccaaatgaactcgaaacaaacccaagaatgaatcaaaaaattatttatagtagtgcattacttgtcggattaggcagtccgcaagcatttgcccataaagaaaaggcccatacccctcaaaaaccgaatatcatctttattatgtgtgatgatatggggtatggagatctgggttgctatggacagccatacatcagcacccctaatattgacaacatggcccgtgaaggcatgcgctttacgcaagcctatgccggaagtccggtgagtgcaccttcgcgcgcatcgttgatgaccggacaacataccggacattgcgaagtgcgtggtaataaagagtattggattcaggcgtctacagtgatgtatggcgataataaagaattttcagttgtcggacaacatccctatgatccggaacatgtcattctgcccgaaataatgaaagataacggatatacaaccggtatgtttggtaaatgggcggggggatacgaaggctcggcgtccactccggataaaagaggaatcgatgaatattacggatatatctgtcaatttcaggcacatctctattatcccaattttctgaatcgttatagtccgtcgttgggtgatacaggtgttgtacgtgttgtgatggaagagaatatcaaatatccgatgtacggtccagattatcataaacgtactcaatactcagctgatctgattcatcagaaagcgatggaatggatcgagaaacaggatggtgaacaacctttcttcggaatctttacctataccttgccgcatgcagagttagtgcaaccggaagactctattttgaatcattataagacacagtttgctgatgacaaagcttttggtggtcaaaaaggatccagatataacgccattacccatgtgcatgcacagtttgcgggtatgatcacccgtttggactattatgtgggcgaagttctgaagaagttggaagagaaaggatttgatgagaatacgattgtcatctttaccagtgataatgggccccatgaggaaggcggagccgatcctactttcttcgggcgtgacggaaagttacgtggcttgaagcgccagtgttacgagggaggtatccgtgttccgtttattgtccgttggcccggtcaggttgctgccggaacagtgaatgatcatcaatgtgctttctacgatgtcatgcctaccttgtgtgatttgacaggcgtgaagaacttcacgaaaaaatatgtgaataagaaaaaggaagcggattattttgatggtatctcttttgctccgaccatactgggtaaaaagaaccagaaaaaacatgattttctctattgggagtttaatgaaacgaaccagatcggtgtacgtatgggagactggaaaatggttgtcaagaaaggtactcctttcctttataatctggcgacagatatccatgaagatcataatgtagctgccgaaaatcctgatattgtgaagaaaatggttgggattattcatcagcaacatacggaaaatccaaatttcaaggtaacattacctgctactatgtaagaagattcttagtgatagatcaagcgctgtcttttaccctctattcagaggaaggatagcgctttttatttgatagcttagagcgctgttcggtatcaaaatgtttgctgttttatttttctgctggcatctgctttggcgaaatgttgcgaaatagaagaggaatcatcagatatttcttttcagatcacttgttaccgggaaattatgtgagaggtatcggaaggaagttaacttcctgtcgacaaataactaacttcctgccgacagagaattaatttcctgagagtaggaagttaacttcttatgaataagaagtctgtattctgatgaaagcatcggttttccttctcgaaacatcccttaatttagggaaaaagaactgctttttcttctagaacagagtttggaggactctttttaaaagtgttattccgaatgtttatgagatttccaggtttcttcctaagagtaaatgcccttggtatcttgtctttatggtagcatttcactgtattttccgactctctgacttcctggaaaagggtattcctgcgttttttactctcttcttgtttccagggcacaaagaattgattctgaggaatctcaaaatacattttgacagaatgctaaaagaagatttcctgtgtaatgttggttttgatgtataacctccatccggaacatcgaattatcatatacttttgcttgaagattattgtgaacttcctttgtctattataatccttgtcgttattatattaaaacaataaagagggatgtgtcaaaactcgtattcaccatagattacactgatttacacagataaatatcattggctatcagtgtattaaaaacgtttttgtgtaaatccgtgtaatctgtggtgagttatgagacaccctctttcatcatttaattaatgattatttgctgttttcactatatttttttcgatagatccatatcaggattattactcctaccagcaataacgccatcgctccgtatgcaataccttctgtaatatgcaggctttgcggatcaaaacgcatttcgatggtgtgtttacctgccgggacattcatagcacgtaaaatgtagtctgcacgggcaatatcggcgggcttgccatcaatggttgccgtccaccccggataatatatttcggagaaaaccactataccgtcttggggtgaggaagtctcgtatactaattggttaggttcataactggtcaaacgaatcgtagacagtgagtctttgtacccctcgttcactcctttcagtgcctctttaaacttagagtctactatagcggtttgttgcaggtcgacttgcccgatggcatcgatttcttcgtttgcattgttcacgtattgtattttatctatgaaccatgcatttccgaaagtatatgggttctcaatggggactgtttgaccttgctgtccggcagggaatataaagtatttcgtattcagcatattcaatacaggaaacttagcagcgtttacgctatccatttgtccaccggctgtagctacttcctgataggctgcctgcatttctttagcgatgtgatggtctatcatttcctgataacggcgaagctttgcagcatgataaccgcctacgctcttgtgccaataagaggtattgttttcttcaaatgtattgcccgcaaagttcagtacacgataatccagtgatgggtcttgcaggattagttcatctgtctgtgttttccggaatgtagcagtctgctctgatttcgggataaactgttcgtcgtacagataacgtttatttacgctccacatgtctcccaggcataatagagcaatagcggcaacagtccaggttgctttcagctttttggcgttataggccagtaaaagcagggtgccgatggtgacgataaagaaacttcgccaagcatcagaggtgaaaaggtgtacacgcatttcctcaagattggcaataatgggcgatagttggtcggcaggcagggcattttgcagagctgccatttcgttacctggaatataggtaggaaagaacagacggggcgcaatggcaaagagcagtgccaatcccccggttaatccgaaactgatatagatgtatttcagtttctctttcaataattccggcttggtgagtatttccttcagggtaaggatggcgagcaaaggaatagtaaactcggcaattaccaaaatagaggatacagcccggaacttattgtacattgggatataatcgatgaaaaagtctgtcaatcccatgaagtttttaccccatgaaagtaggatagagaagatggtagctcccagtagtgcccatttcataggaccttttacaatgaaacatcccaaaatgaaaagcattagtacgaatgcgcctacatagaccggaccacttgtcatcggctgatcgccaaaatattgagttagctgtgagtagaggctgctatacatcggattagccttttccattgctttctcacttcgtgacagcggtacggaagcgcctcctttgacattggggaccagcagggagaatgtttcaccgataccataactccattgagtgatgtaatcgcggttgaggccgctgctagtctgtttggcagcagctccttcatatttcagttcacttttaccacgcatcgtttctttactatattcgtaagtgtggtataggtttgagaggttgatggatactccaatcagtcctgcaacaatcagcacgccggtagctttgaagaattgggggagttctttttttcgccaggcgtcttcgaagaatgcgcctaccatgaaaagaataacaaacaagaaataataagtcatctgcacatggttggacaatatctgcatagccatgaataaagcggtgataatacctcctaacagatatttctttcggtaagcaagtactatacctgctatcgtaggtggaatataggccaaagtaataaatttccagatatgtccggcagctatcagaatgaagaaataggacgaaaatccccaaatgattcctcctaaccctgcgagccatgccggtatgccgaatgcccttagcaggatatagaacccgagcatcatgataaatgtgagccatacgtagttcggaagaaaaaggtgatatactttctgtacaaatgtcagcggctcggtagaatcgtaactcggggacatctggtaggtaggcatacctccgaagagtgcattggtccagcgggtacgttcacctgttctctcataatattctttggcttcttgtccggctccggctccggccacggtgtcgtgctggaagagaatcctgtcttcggtgatagcagggaagaaatagatgaaagagataactataaatgccagaatggcaatcaggtcaggaagaaattttttcatttacgattagacgatttacaatttacaattgaagtttgacttaggattagacgatttactatcctgaagtgagaaaaagtaatttcagtcgttattcgtaaatcgtccaatcgtaacttttttaatatctgtaatgatccgctttgtaaggaccgtcaacagacacaccgatgtaggcagcctgctccggagtcaacttggtcagcttcacaccaattttttcaaggtgtaggcgggctacttcttcatccagatgtttaggcaaacgatatacattgatatcgtatttcttgttgaacaactcgatttgggccaatgtctgattggtgaatgaattactcattacgaatgacgggtggcctgtggcacatcccaggtttaccaaccgaccgtctgctaacagaatgatactgtgaccgtcagggaaataatagcggtctacctgtggcttgatattgacacgtttgatacccggataatgtttcagtgcatctacctggatttcattgtcaaaatggccgatgttgcaaacgatagcctgatctttcatttgttccatgtgatcgatacggatgatatcgatattaccggtagtagtgacaaagatgttaccttctttgcaggcgtcttccatggttactacttcaaaaccttccatggcagcctgcagtgcacagataggatcgacctctgtaaccagcacccgggctccgtaggaacgcatagagtgtgaacagcctttacctacatctccataaccgcataccacaactactttgccggcaatcattacgtctgtggcacgtttaatgccgtctgccaatgattcgcggcaaccgtacaggttatcgaatttagatttggtaaccgagtcgtttacgttgaaggcagggaacaacaacttgccttcttcctgcatctggtataggcgatgcacgccggtcgttgtctcttccgaaactccgcgcacttcagccgctacccggtgccagcgttctttgtcttctgccagcacttttttcagtatagcattcaattctatttcgtcttcggcatgtacttctttgtccaatacagcagcattgttttctgcttcgtaacctacatggatcatcatagtggcatccccgccatcgtcgacaatcactgtcggtcctttgcccccctcaaagttcagggcctgcaaggtacaccaccaatagtctgccaatgtttctcctttccaggcaaatacggcaacacctgaagctgcgatagctgctgcagcatgatcttgagttgaatatatattgcaagagcaccaacgcacttcagctcccagggctaccagtgtttcgatcaggacggcagtctggatagtcatgtgcagtgatcccatgatacgggcacctttcaatggtttggattctccatatttttcgcgaagagccataaggccgggcatctctttttctgccaagtcgatttccttgcgaccgaagtcggcaagcgtgatgtctgccactttgtagggcagggtagagaataattctgtggacataaatgtaaattgtttaaaatataaagtggtgcaaagatagaacattctgagtagtagggcaaaagctatcgacttttttaatcaataataacttcgatttgtaggatattttttggatatatgtattatatttgcaagtaatgtgatgctatatacaacaaaacagatttaaatagactcaaatccatgggacattacgagcataaaacgaaagaggaactactggaaattgtatgtaaattggaaaagaaggtggaaggcctctcttccgaactcgactctctgaaaaaagggcgattccgtgaacggtacagtactcggattttagatgcattgcctgatatgctgactgtttttgaccataatgcgaacattgtggagttggcttcatctcctacaacaaatcatgtggaaggtaccacctccgatagtattattaattcaaatgtaaaagatattgttcccgaagaagcgtatgaaagtgttcgtcacaacatggataaagtcatccataccggtaagagttcgacagctgaacattcattaatgctggacggggtactccatcattatgaaaatcgtatttttccgctggatgatcagtatttgttatgtatgtgtcgcgatgtctcgcaggagactgagatggctaagatcaatgagacccagcgaagtgagattgtacgtctcaattcgttgatgaatgacattttgaacaatattcccgtctatttatttgtgaaggataccggaaatgattttcgttatctttattggaataaagcttttgccgagcattccggaatctctgtccagagggctgtcggtagtacggatgcagatatatttccggacaagaaagatgccgaacatttccgggaagacgatttgaaggtgatgaagttgggacgtattgaatatctggagaattatacaactatgagcggtgaggtccgtacggtcactacaatgaaaacagttgtcccttcgggaggtcagcatccttatattatcggagtatcgtgggatgtaaccgaaatcaagaagacggaaaaggagcttatagctgcccggattaaggcagaagaggccgaccggatgaaatcttcgtttttggctaatatgagccacgaaatccgtactcctctgaatgcgattgtaggtttttccaaactgattattgaagcggacaatgagtgtgaaaagcgacagtatgccgatattgtggaacacaactcgactgttctgttgaatctctttaatgatattcttgatctttcagcacttgaagccggttccttggagctttcttatcacccggtgaggctgaaagatatctgtttacagttatatgaattacatgtgaaatcggttaagccggaagttcggcttgtgctggacgaggtagattcgcaactttgcatacaaggagactgggaacgtatttctcaggttttggttaatctgattaccaatgccattaaatttacttctgtcggagaaattcattttggatttcagaagaaggcggatatggtacagttttacatatctgatacggggaaaggtattccggcagaaagggtggccaccatctttcagcgtttcggaaaaatagatgattttgtgcaagggaccggattgggactgactatctgccggatgcttgtcgaaaagatgggcgggcgtatctgggtacgttccaaacagggagaaggaactgttttctattttactctgcctatggcaaaatagtgacagtgataagtgattagcgtcagacgctaatcacttatcatgcatatctgctttatataatctggataccttgctcctcacagagcttcagtcctaaatccttcagtttgaatttttgtatcttaccgctcccggtcatgggaaattcgtcaataaagaaaatgtatttagggattttgtagcgggagattttattccggcagaagtcttgtacgtccgaagcctgcatagttactccttcgtgcaaaatgatgaaagcccctactgcctctccatattttttagatgggatgcccgatacctgtacgtccttcactccgtcgagcttatagaggaattcctctatctcacgggggtagatattctctccaccacggatgatcatatctttgatacgtcctgtgatacgataattcccatcttcgtccttgattcccaagtctcctgagtgtaggaaattgtttttgtctatcacttcagccgtagcttgtggattcttgtaatatcctttcatggtgttatatccccggttgcacatttccccctgtacgccgaccgggcattcttcaccagtttcaggatcgagcacttttacctccgtaaattcaaagtcacgccctacggtgttacaacgtacgtcaaacggatcgtcaatgcgtgtagcagtcattccgggggctgcttctgtcagtccgtatacactggtaaccttcatatacattttctcttccacttgcttcatcaattctaccgggcagagtgagccggccatgataccggtgcggaggctcgacatatcgaacatatcgaacatcggatggttcagttcggcaataaacatagtgggtactccataaagtgctgtacatttctctttatggatagaggctaatacgatcagcgggtcaaaacgttccaccatcacttgagtacaaccatgagtcagacagttcatggtggccagcactacaccgaagcagtggaacaatggaacacaacagcagagtttatcattgcccgtgaatttcatgtgttctccggtcaggaaaccattattgctgatattgtaatgtgtcagcataacccctttgggaaatccggttgttcctgatgtatattgcatgtttaccacatcgtggcaatcgacctgcgacttgagttcgttgagctcggtgtcttctatgttatcgcctagcaacaggatctcctgtgtgttgtacattccgcgatgtttctcctgtcctacgtagattacgttcttcatataaggaaaacgctcgcttttcagatgtcctcgttcgcaggttttcagttccggaagcatggtgtaggtcatctgtacaaagtcgctgtctttttcgccgttgacaatgcagagcgtatgcatatccgagttctcgcacaagtattccagttcggcttgtttatagttggtgtttaccgttacgtagactgcacctatctttgcgcaggcatataataaggtaagccagtccggtacgtttgctgcccagattccgacgtgggtacctctttccactccgatggcaatcaatcctttcgccatatcgtctacccgcttgttgaattgtttccaggtgaagcgcaagttgcggtcggagtatacaatatattctttgtccggtgttgtttcggcccaatgttcaagccattgtccgagtgttctttcgtatagttgcatgtttttagtaatgtgtagagcgatcattgctgatcattaaatgggtgtatagattactgccaggattttggcggcttgtccttcataagcatgaacgtgatgggggacgatggaatcatagtagatactgtcaccttcttcgagcaggtaagtgctttttccgtaactgatttccatgacaccttccatgaccatgatgaattcttctccttcgtgagaagaaagtacaaaatcactgtcttgtgtaggggctacatcgatgatgaacggctccatatggcggtcggcttttgacttggacagtgaatgatactgcatgtgtttgcgcgaatggatggcgttgtttgagaagctgatcgtgtctgtagcttccatcttgcgtgagactaccggacctgtttcgtcctggtcgtcgaggaaagtgcccagacgtacgcccaatacgcgggctattttgataagtggagccaatgaaggcaagtcaatattgttttcgatacgttctatttgttcaatggccaatcctgagcgttcggcaagttcttctattgagattcctttgttctcacggagtgatttaattttttctcctacgattttgcttgtatccataatgttgaatgtattttcccggtaaaaggttataatttaattcgttttgctgcaaaattaatgaaattttatatccaagcaagggagaaagataaaaaataaaagccgtttcctccatagagaggaaacggcttttaaattttgttcgcagtaagtgattacttacgcaagccgagctctttgatgatatcacgatatctggtgatatcttttgctttcaggtagtcgagcaaagcacgacgtttacctaccaacatagtcaaagctctttctgtactataatcttttctgttgagcttcatgtgctcagtcaggtgagtaatacggtatgaaaacaaagctatctgggcctcagctgagccagtatcagtgttagactttccgtacttactgaagatttcttgctttttagcagcgtctaaatacataattaataaaattattgatctataaaatgtttctttgagtgtgcaaagataggcattatcttttatcccacaatgaattgcaggaaatattttctatagtatcccttttttctaatccaatttttgtacctttgtcgccaaataataggtattatatgcaaaatattcgaaacattgcaattattgcccatgttgaccatgggaaaacgactctcgtcgataaaatgcttttagccggaaacttgtttcgcggcaaccaaacaagcggagaattaattctggataacaacgacttggagcgtgaacgagggataacgatcctctctaaaaacgtttctatcaattacaacggaactaagattaatattattgatactccgggacacagcgacttcggtggcgaagtagagcgtgtgctcaacatggccgacggatgcattctgttggttgatgcttttgaaggcccgatgccgcaaacgcgctttgtgctgcagaaagctttggaaatcggattgaaaccgattgttgttattaataaggtagacaaaccgaactgtcgtccggacgaagtacacgagatggtcttcgacctgatgttcagcctggatgctaccgaagagcaacttgattttccgacaatctatggttcggccaagaataactggatgagtacggactggaaagagcagacggacagtattgtgcctttgctggattgtattgtagagaacattcctgctccggagcaattggagggtactcctcagatgctgatcacttcacttgactattcttcatatacaggccgtattgctgtagggcgtgttcatcgtggtacactgaaagaaggcatgaacgtgtctttggctaagcgtgacggcagcattgtgaaatctaagattaaagaggttcatgtattcgaagggctgggtcgtgtgaagacgactgaggtctcttcgggagatatttgcgctttggtaggtattgacggattcgagatcggagatacgatctgtgattatgaaaatccggaagcattgccacctattgctatcgatgaaccgactatgagtatgctgtttgccatcaacgactctccgttctatggtaaagatggtaaatttgtaacttcacgtcatatccatgatcgcctgaccaaggaattggataagaatctggctttgcgcgtacgtaagagcgaagaagacggtaaatgggttgtatcaggccgtggtgtgcttcacctttctgtcttgatcgaaaccatgcgtcgcgaaggttacgagttacaggtcggacagccgcaagtaatctataaagaaatagatggagtaaaatgtgaaccgattgaggagcttacgattaacgtacctgaagaatattcaagtaagatcatcgatatggtaacccgccgtaaaggtgagatgactatgatggagaataccggtgaacgcatcaaccttgaatttgatatgccttcgcgtggtatcatcggtcttcgtacgaatgttctgacggcttcggcaggtgaggctatcatggcacaccgctttaaggaatatcagccgttcaaaggagacatagaacgtcgtaccaatggttcgattatcgctatggagagtggtactgcatttgcttatgctatcgacaaattgcaggatcgtggtaaattctttattttccctcaggaagaggtgtatgcaggtcaggtagtgggtgagcatgctcacgaaaaagatttggttgtaaatgtgactaagtcgaagaagttgactaatatgcgtgcttccggttctgacgagaaagcccgtttgattcctcctgtacagttctctcttgaagaggccttggaatacattaaggaagacgaatatgtagaagttactccgaaagcaatgcgtatgcgtaaggttattctggatgaaactgaacgtaaacgcgccaataagagctaatatttgcggatatatctatctaacgaaaggctgtgtaattttgcacagccttttctgtttatatatgcttttttttcctatataataatataaaaaaggacatcctcacggatgcccttttcccaattttcctttttcaaatttgtgtagctgctataaatctcttaccacaacaactttattatatactaaaaatcaatactttttatattttagttcctattggaaaactattattcgatagcaggttcgcttgttttgcttggccagtatggattctggtaaagcacagaattgttgactgaacggtccggagacaaaagctccatttgccgtatcggcaccggatacaagtagtatgccttagcgaatgtataaccgtcaaatacagcgttgtttgctttgacgattgagtacggacgtacatatttacccaattctttggctgacatattggccgttgagctaccgtctgatacaattttgtatttgggctcgcctttgtcattcttcattgccacatagtcatcataagcttcatcccagaagttgaatccttccggaatatatttggttgtgagcaactgatccatagctctccaacgcatcaggtcgtcccaacgcataccctcgccgatgaattcgcaacgacgttcgcggcggatattgaataaagttgcgtctaccaatgtagaaccggagtattttgcccagtctacttccttgctcatatccgtattgcggatggtcttttcgtagtctgtgtccactccgccacgtttgcggatagcggtccagtattgggctgcttttccgtcgaccttaccgtttctcaggtaatatgcctccagatagttaaggtaagcttccacaccacgatagatgatgcatcctgtggtcgactggtcggaaccggagatgatctggtctttcttataagtcaggcacttgcggatgcgatatcccgtcaagtctctgacttcctgcaattcaaagagagcaggttcgccgaactcgggcatagtgccgtcaccatcggctctcggagcctgtttgtctttctcaccgaataagaaaagttgcaggcgctggtcacgtccttccttttcttcctgaattctgctgtcacctttaaatccgctgttgctggcataccagggcaatccgttctccatcaggaaagtctgtacatagcttctcaacattccattgtttccacctgaataaatatagttgggagcaccgtggctgatgttgatacttcccgaacgaagataatctttccagaaaagaacttcggaataaccactcatgtcttcggcagagaacatttcaaagtaaggattccaaccggaatattcgctgtcgctgagcggattgaatacccctgtgttttcagtcagtgtgatagcgtccgctacttgtgaggctgcatccatacactggtcgaggaagaagttgatttcggctgttacatcaagtgagaaattcggatgtacgctctttcccggccatgtttcgtcacccggcacgcggcctgttccctgatgatatttctcaaatgtagcttcgtataatgccacacgtgatttgatcagcaatgcacattgcttgttcaggcgattgttgttcatgaagccttggtttttcattaacccgatggctttgtcgagatcttcgagaatgaagcgggccactttattgcgtggctgacgtacactcttttcaatcagtatcgcttcatcatccggaagtacctcagtgatgataggataatctccgtatttacgtagctggttgtaatatatcaaggcacgcatgaaatacatttcaccgatgtagtgtttgagatcatcttctgcccccgaaatctttccggcttcatatttaggcagcacctgttcgaaaaagtagttgcaataacgggccagtgacaatccgttggaccagttgtcattgtttgaaggtactttccagattcctttttcatagtaggtagagttataaccacccactaccatgttgtctgtaccgccatcattgtttaccgtaccggcattccatccgctatgtgttgagaacatagagttgtattttgaaatggtatatgctgccaggtggtctgcagtctggaaatactcttgcggagtgacctgatccagcggctctctgtccagaaagtcgttgcacgaagtcagagctatggatgctcccgctacgaggcaagcctgcgccacgatatatttcattttaattttcataatcttggtgttttttagaagttaacatttaaaccgactgaaatgactctctgcaacggatacagtttaccgttgttcgcatcatatgtacttccgattgcttccgggtcgaagatgcctgtgatatcagagaaagtaagcaggttgtctccggatacatagacacgtacagacgacatacctgctttttctgtccatgttttaggcaaagtatagcctatctggatatttttcagacggcaataagctgcattctgcaaataacggctctgtacattcgtattcttaccgccgtttcttgctacacgtgggtagtaagcattggtgtttgctcccagagggtcaccttccggacgccagaagtcccaatgttccttgaagccggcagcctgccattgtccaagaccggttgatccccagaagtacgggccctgcagccaatagtcacgtttaccgatgccctggaagaatgcgcggaagtcgattcctttccagcttgcatcgatagtcagaccgtagttaaagcgcggtgtactgttacccaagataacgcggtcacctgtatctcccaacttattgcttcctgtgctgatcttgccatcaccgtcgaggtcggcatacatgatgtcgcctgctccccatttactacccaaggccgattggtctacttttgccagatgggcgtccatttcttcctggctttgtgcgataccgattgtcttgtatccccagatattattgagtttctggcctttgtaataagtaccgatgttgtagtcttcattcggatatttcaggattttctgctgagaatcagacagaacgaatttcacgccataagagaaatcccggatacggtctctccaacccagttcaagttcaaaaccgtaggacttcatatccgcattattgatctttggcactcctgtacccagagatgctgccaattcgggagccggaccgatcatatcgtaagtataacgaacgaagtagtcgaacgaaccggtcaagcggttgttaaacaatccccagtccaaaccgacatcccatgtttcaatggtttcccatgttttcttcatgctgacaatgcccggattgttggcatagttgggtaatgctccgttcagcaaccagccatagttggagcctgtcggcatagtctgatagaaaggataccatgcgtctttggtatctgtattacctaattgtccccaagaagcgcggagtttcaatgtaccgatgctgcatttttcggcgattctttcaaagaatggttcttgtgcaacgttccatccggcagagaatgaagggaagaatccccagcgtttgtcacctataaaacgtgacgaaccgtcgtaacgtccgttagcttccaccatgtatcggtctttataattgtagttgatacgtccgaagaaaccggctacggcattgtgggcatatcctccccatgctttcgggtcttcggtggctgtgttgatggtaggcaccgaacttgaaatcagtgtgctcttttgagcctggacataacgggttttataaagctcactgttgaaaccggccataactttgaagtagtgtccactgtcaaactgtttaaagtagtccgagtagatgttggtcgtgtagtagttttctttatatgaatactcgtttacctgagagaggccgagtgcgccgccgttccatgaaatcaggtacggttcgttatctgcgttgtatgcatataccggcaatacatcccaatgttcgttcgtgttcgttgtgcgtaaactaccttccacattgattctccagtttttgatgggttcgaaaatgaactgtagctgttgcgtgttcaggtctttctgattgatctgttttccaccgttttccaactgttcgatttccatgccgtctaccggatgtccgttcgggtcgtaagccgggttggtcggccagcgacgggcgatgttatggaagaagagacctgtcagataggacggacggtcaaagtcttcgcgtgtccatttggttgagtaagtgacagtgaaccagtcagcaatctggcttgtgattttaccgttcatcgtatagcgttggaaattatcgctaccatggcgaagcagaccgttctgatcgaggaagcttccgctgatggtatactgcgttttctccgaacctccactgatgctcagactgtgctcttgtgacggaacccagtcattatagaattctttgaaccagtcggtgttggcattagcaccgccataagcctgccatttacgggtttgttcgttcatggtcattgtctctttcagggttccggcttggtaggcaagaatacggtcgagcgcttcttggctgaatgggcctgagtcaccggcattttcggctgcacggttaaagtagagtgcgaattgataagagtccatcatttccggaacacaaagcgcatcggagaaacgtacgttaccgttatagctgacttttgctttgccgctcttaccactcttggttgtaacgaggattacaccgaatgcggcacgggcaccatagatagaagcagaggctgcatccttcagtacggatacattttcgatgtcgttcgggttaaccgagttcaggtcaccttcgatgccatcgatcaaaataagaggagaagatccggagccgtcgccaatggtaccggcgccacggatattgatactcattgagctatccagtgcaccgccggagttacccaccgagaggttcagacccggtactacaccctgcaatgcctgtgatacattttgtaccggacgggcttcgagtacttcggagtttaccataccgacagcaccggttacgttcaccttcttttgtgaaccataacccacgataacaacctcatccagtacctcggcgtcttctttcatcgtaatgtggagagctgtaccttctgctttgactgtaacggttttatagccaatgtaggagatctcgagtgtagcacctttgggtgcatcgatagagaattttccctccaggtcagtgatggtacccatagtggcattgtctttcactttgacggatacgccgatcatggcttctccgttctggtccagtaccgtacctgttgttttcactttctgctgctgtacggaggcgatttcgtgtttttcgtaagtatcggctgccgcttgctgaggtgtagcacaccatagcatgatagaagcagcgattgccattttcaggcgatttgtttctcgaaaccggattaggttcggaaacaggttagttttttctgtcatacactaaattgttcggttaaacattaatttgatagtttgttttaggattccggattttattttgtttccggaataaggtttgtaaaggattcgttttttctacttcataagcataattattagaggttactgtatgtatgtcattcttttcttgctcctttctgaaccatgctgatttgtttattaaatttgtttgtccaaaggtgattaagttctcacggaacttggaaaaaagtgataaatcggcttttatataacttcgaaccttctgattcgtcctttttctttattatttcacctgtacgggtagtcgtattggtccgggaagctgattatgttaaatgatacaggaactactaagtcccgctgattaaccttttgcaaatagagagaggcttatttttctaccaccttcctctgaggcggcacgttttattcattatctgctgctttttaataaaatagtggtgcgaagagcagtgataaagaaaattattattataaattcttgcatattattaaaagttatcgcatctttgccgagagatattgtgattttataaacacaagttagcctaagttaacaaaaaagtattaatacaagaacaggccaaaggttaagacacatttgcagaaacacttgaataacgataagttccgtgagaactataccccacttttattccactcataatatataggtgagcattatttaatattaataatgagcacctctttcctgagaagaattttttgtctttttgttttgaggctttacattaaggttttgtcttttcgttccggttttctatccggttctgtttaatagtgtttatatttaggaatgttggagttgagaaataccaaaatgttaaataggatactttttggattttacaataaagatagtagaacgttagtagtaagatccggatggcagtaacattaggtttggatatctctgtatgatgaatatacttctccggatggagtgaactctgtgtaataaagcaaaaatatccccggaaaaaatacttttcttccggggatatttttatttgatagaattataataaagtattatttgatgaccagtcggtctgcatctaaagccaatttataaacttttcctttacttgttttgaaagagagagttttatctccgtatctcaccgtacaaggttcgcctgcttttgagaagatggttgcttctgcaagctgtccgtttttccatgacaagtctacctcaaagttccctttggcgcagattccactgatgcttccgtctttccaggcatccggaagtgcgggcaatagttggatgaagcccatgtgactttgcagcagcatctctgtgataccggcggtacctccaaagtttccgtcgatctggaaaggcgggtgagtatcccacagattgtccagtgtaccgtttttcagcagattaccgaaaagtttgtaggcgtggttaccgtcttgcagacgtgcccattggttaagtttccatcccatactccatccggttgctccgtcgccgcgatgttcaagtaccactctggcagctttggcaaggtcgggtgtggtgatgggtgagagcgtatgtcccgggtgcagtccgaagaggtggttgacgtggcggtgctcgtctttcgggtcatcgatgtctttcgaccattccatcagctgaccgtagcggcccactttgtagggagccagatgtgtcagcacttcttgccattgtttacgttccttgctgtccactccgagtactttgcttgcttcaatggcatcctgcagaatttcgcggattacggcgtgaacgaaagtggttccttcgtcaattggtccatgttcgggtgaggtagacggagctgcggtgtaagttccatccggtttgcgccataaaaagtctgtggcaaacagggcgctgcttttgatcaggtcgtatccggtctctttcaggaatttcttgtcgcgggtgtaatcataatactcccagacatgcgttgccaaccaggggcctgccattggattgaagttccaggccatctcttcactttcaagcggcgtggtgaatccaaagatattggctgagatcgatgctgtccatcctcttgttccgaagtaagcctgcgctgttttctgtcccggttttaccagcgtacggataaagtcgatcagcggcaatgtacattcgtagaggttggtcgagcaagccggccagtagttcatctgtatgttgatgttgttatggtagtccactctccacggaccgtctacgttgttgtgccagatgccttgcaggttggcaggcatgttacccggtcttgagctggctatgagcagataacgtccgaactgataatagagttcttccagataaaagtccggttgtcctttccggtagttttgcaagcgtttgccggtgggcaggttggcgctttgtgcgtccgggttcagttgtagttttacccggttgaacagagcggcgtagtcgtcgtaatgctgtttgaagagtacatcatatcccatggctacggcattgtccatccattgacgggtggtttcggcaggatttactcccacatatgctttagggtctttgaagtccgggtcgaaattgatcttataatcggtatccgcagtgacaaggaatactacttcgtcagcgtcttttacggtgatttttccatttgcgttcgatagtgttccgcctttggcaatggcatgaatgcgcactacatattgcatgccgttattgtcgaggtgggcagtgtatgcaaggccgttggcaccgtctgccgacatgcttcctgtcgataccggattgggggagtaactgaaagtaaggttctgcttgcccggccggtcggctttgaagcggattgccatcacgttggcaggataggaaatgaagtaatcgcgttcgtaggctacatcatctttcttgaattgtacaacggccaatgccgaatccaaagagagaatacgtttatagtcactcatgttcactgtactgagtccggtttctatataaaactctcccattgtggtgaagttaccaaaacggaaaggtttttctcggttcgactcataaggcacttcgctgttaaagttcttgcgtgtcagcatttcggcctttttctggtctccgtcggtaaaggcctggcgtatttctttcagtacatgtgccgactgtttgtttacattccagtaggcatcggctcctctcgaagtattaggtcctcctctccagagagttttctcgttgaaggtgatgcgttccgcttctatcgagcccatgatgttggctccgatgcttccgtttccaatgggcaatgattgcgactcccagttggcatcggggttccgggcagtgtctcctgcactctccggtttgctttctcctttccagagatcggggcggctgccataccagatggctctgccttgtagtgtattcggtgtgtcgaaccagatggagagcccttgcgtgtagtcggtggcatggacatgcgccgccggcaaggcaaacagggcggtgaggagaagtgaataaagtttcttcatgtttgggtgttattagagttagtattggtttgtcatagtctgcacaaagataaagaaaaaccttgaatcttgtgcagactatgtgacgtttactcggaggtaagataaattatccaacctttccggggggctgtcactatcggtgtgtctacattccattcatgcgcctgttgcatgtctggtatttcgggtgctgtcagctttgccctttgtgggttcaggccgatctgtttccagtctatattcagttttacggttttcacttcatccgaataattacctaaagacagcagtactttctccggtttgcgatagacagtgactttgacagcttcgtccgatgtgcttacagccggatgttcttcccagaacccgagcatggtggcttccgcaatgccgaatgaatcccatatcttccatacctggcgcggatcgcagttgactccttcggtgtaccatggataacggacggtcattccatattgcatccccaaccatgcgttcccacctctgtacagcatgtcgccactcagtccgaaaggaatgcccgatgactcgaccagccagttggccggtgtcattttatcataaaggaagctttcgccgaaccacagcttatctacatacgggaaaaactccgtatattgattggcgggtccccttgagaatcccgtattcgagtgtaaatcgatgaggcatcccggcttaacgctttccatagcccggcgcattcgtttcaggatacggcggtcgaaggaaacgtcgtccagatagataccgtcgatgtccatgttctgcaccatccagcgcaatccttctatataatagttgtaccatcgggagtctccttcggctgtcaggatagatgcatcggcagtgataccctgcttgtcagcattgtcaaagtgttcgtaccattgcggtgtgtagttcgtcacgaagtgctcgcggcaccatgggaatcccccgccgtttccgcctctcaggatttcgtttcccaggctgcggatggcccatatctcggcggtggcattactcagttcgcgcagcgtatagtatatctttattttacatccccgggcatgccactctttggtgaactctttcattttgtctaccgtcaggaaggggtagttgataaacggattgtagtcattgccttgatggacattgatgatgcgtactcctgcttcgatgtcggcttgtgaaggtgtgggtttggggccattgtggtaatagcggtctgtaaactggcttttcatatccagcattttcaccggagtgatgatcatggcaaaatcaaatgtaatggaactgcccgcttcgagcatgcgctctccgctgtatgccacagctttcactccgtctgcctctttccgtatggcgaatccgcctttacccccgttgaaccagctttccggataggccggacggtacagattcaatagcggaccgctgtaggtgcttcccctgaattcgcagtggatacctgcatgctcgttcccgatccagaaactgtcgaacggccacagccattgttgctctttggaggtggggatggacactccgaagttgttcaccgttttctcgggggcatcccatttaccgtcatactgttgaggagtaggttgccccggaagccccatgcccagaaaataagttcctatttcattcctgaccggcaataccagacggacgtctttcacctgtatctgctttttgggggtgatggtatatatgtagtttatccatccgtcgaactccatgattgctttgcagctgactgtcatatcttcgtcttcggctttccagttgcctgctacatggccttctgtccgctccgtcagttcggggacagctttcaggcttttcactccaccggcggtttggatgacaaactctatgggactgctcagcacgtcgttgttccatgaacggatttgtgcgggcagtcctgtgccttcgtctatcgttatgctacgcccgagacaaccgatacggttctcgttcacagtcatggctgtgtagggtgcggtaggtgtatcggctatgcccaatgtcgagttaagccatctcaggcggctgcatctccataattcactgtcacctctgtcgggcaatgcctttcccgcaatccgtatactcaaggggatcgagctttgtgctccgtcggcatcgctgagggtgatggtgcctgtatagataccttccttctgcccgtcgggtatatctattccgaaccagagagcctgtacctctcctttggggacgtttacttcttttttgaacgcttttccgtaaggatcggtaccttcgacattaaaacaggtaatggctgttgccggtattatttcccggccgcacttcagggaagaagcccggtaagcaatcttgtctgcttggttcacggctgcccaaagcccgatctggaaagtatagtattcattgggggctgcttctccccgaaacagttttccctgtttgtctgccagccatttggtggggaggttgctgcgcatccggatggggaacctgcgatcttcggcaaagaggtagagggaggctttgtgccggttgatgtagttctctttctcccggaccgttgcggcaacttccatcgggtaaaaactgtcgaaagcctgccgcgactctactctgaccactttggcccgagtgcttttcagggttgacacgccttgagcctgccaagctgcatccggttcgttttctttcggaaggtatccgccactgtagaatccgtatcccttttgcacttggtaggggaggtagtagaagtagtaagtgcctttttgttccactggaccgaactgcaaacggcagtgttcgtcgttcacctctatccggcggatattccggatggtatctcccgttgcagcgtggatgataagaaatcgtctgtgtcctgcatctttgtccggacgccgccattggaagtcgaggttcgcgatttgtgccggcttttctatttgcagtaccgcccgatgatttccgaaagattcctcccagggttcggaaggaacaccgtacggatagttttgtggcttttgggctgcgaccgaccctgtgcctcctactgtaagcagcaggcatgtgagtgatagtacatgtagtctcatacttataaaaaatatctgttaaacgttctattttattatgcgtgttccccttcccgggatctcccgtgagcaaagtgtcactttgattatcggacctcctcagaatcgtttctttcggaccgactggcagtccgggcgaaaaaaacgcgccctgcgtgtaaagtccgatatcacatttcccgtctttgggcttgtttgcttttactttgaaggtggaatgacgcttctgccggtaaatggttcctttcccggtctccttcctgcttttctgtcagtgtacaacgctttgtctgcaatggtcaacgggaggaaaaattcttccgccaagacccgtttcggatagcaataggagatattccggacaacaataggagatatttccggaacataaggacattttaggaaaatgcttacttctttccgggtaaatgcttactcctttcggagtaaatacttactcctttcggagtaaatacttacttctttttccgaaaagcaaggctcttttacccccggagcccggcttttcactgccgaaagctgccgttcggccctttttttctcctgaagcatccgaaacgaataggagctctgttagcgaaaagtgctattcggtttctttttgcgctatgattctgcagatggctgacacttccgatctttccactcagatcttcaggaatatcttctgcctgtacatgatccgtaagataaggaatacaatcagatagttggcaaagcttaaccacacctgataataaccacccaggtattgctccagtccgtaactgacggatgctgctatgcaacggaagttaatgacctctcccaagatataagccgtaatggagttcatgccgtatattttcaaccagttcagcccgcggctgtgtcctttgtagtctatccggtagtagaaggcacccatcagcaggaagcaaagtccgccggaaaaaagcgtcatgctgcttgtccacaaccgtttgatgatgggcatttgcaggctccatatcagcgagaaggctatcagggatatgccgattatcagcaaggtctgtaccactttccggcgattatccttacctgctttcattatctttccggcaaaagctcccagcatcacggtagccccgaaagtgaggcagctccagatccaggtgtagttgtagtgagcagagaagctccaactgccgtcttcattccagaacactccgtcgcggaaatgccccagtaccagcctgtccaccttctcggcaaagtttccttccggagtgaagtcgcccaggaaggtcatcggtatccagtagatcagtaatagcagggctgtgacgatcagctgccagcggaagttgcaatgcaactgtatgatggcggcaatcagatagcctgtggcaatggcttgaagggtgttggagtataaatacagatgtttcgggtcgaggcccagcagattgccctgtacaatcattccgaagatgaacagaaggatgaagcgtttgatgattttgcggtaaacgggtcctttgtccggattgtctttaaacttggagagcgagaacggcatggaggctcctgtcatgaagaggaaaagaggcattaccagatcccagaaacggaacccttcccatacttcatgatcgaactggaaaagaatactgttcagccatgggaggttgagctgatgtgccaatgtccacaataccggctggaagaagaccagcaggaaaaggtcgaaaccgcgcaggatgtccagtgaggccaggcggggagaaggagttgatgaaggctttttcataagcgtaagggattatttgatcgttgttttcaggtcttttcttttcatattctctgtttttatactctgccggggagtctctccttcgaatacggtgccttctatcactgccttcttgcagccgttcagatagaaaacgtacggattgccggatgcggcaggaaaagtttccgtgcggacgatggtgttgttcctgaacaagagtcctgccgtactcttggcgtagagcaccgggtagtcgaatgttctgaacgtgttatcctctatgcggatgttctggtgtaccgggcgttcggcatcgatgattttgttggaaggatgtatggcgatcacagcatggccggggcctccattataggcacagtctataaaggtattgcctttgatcaatacatctttgactggtcccgattcgtaccagccttcggcgtcggcctcaatcagtatggcgctcatgcccgttttgtaatacgtattgttctctatcaccacctttctcggagtggtgaccagagttcctcttgtactggttcgtgtgaagtagctgttacgtatttccacttcgggggtacaggtcatgttctctacgcaatcgtgattgagctccaggcttgtcggaatgtcccggtcgaaacgtacttccactattctgtccgatattcgccttacgtccctgaccgttgccgaggcaaagcgttccatggtggctgcccggacaaaggcgacggtatctcccttgaagtaagcattgaatccatagctctgtccgtgcatgaagcgtaacttcagggtttgcgcatctattttctcaagggcgcgcaggttggttccgtgcacattgaccggatcgtcttgtgctccggcaaaataacaactgtctatgattacttttcctttacatcccgaaaagtgcatcatatccgctgaggctgccaataacctgccgctatcggggcggggagcacacttgactcggtccatcgttatgttttcggtatactggctgacgatgcccaacccgtgcatgtagtgcatctgtagcctgctcagcgtgatgtttttgctttcaagaatgaaaagccccacctggtcgcggataatatcgcggacggtcagtgtgtttcctgctttgggcataaattccgtcggggtattgaagcggacgatgcccggagcaatctctctggcatcggatgccgacagtgtattccacccctggctgtaggtgaaagattccgtatccgggtcgtactcgatgcagtgattcctgttggaacgccatccctcgccatacagccggatctttccgttcacaatctcataacgcgtatcgcggtgcagggttacttctgtttctcctccggtcactttccggtattgaatctcagatcctgcgggacgttcaaagtcgatgtgcaggttgtttattctcaccccgttgcaatgttccagggcgatggtcgtcattttcccatgatacattagggtggctccgtttccttcgatggtcaggtcatcgatttcatggagcatcagtcccacggtctttacttttgagggacattcctgttcggtggatgtattcgatatgtagtattctttgcgggtggctccttcgggccagatgtcatagcggccttcgggcagtgatagcactttggctcccgtgcgtttacattcgtcgatggcagcctgtatttgtgtaacacagttctcgtacgagtaggggactgctccgaagtcggtgacgtagacagtatctttctgctgtgcatgggcggcagcgtaaaataaaaagcaggcgggtaggatgtgcagatactttttcatggtatgtagtctcttgctttaaatgtattattgaataagatgaattgggtatccaaaggtatatgatttttttgtattagtggatcacttgaggctaaatagaagccgccggattactatttatttccataaatatgtttacccgacggcttcagagaacatctgataattaagcaatacttacctattgaatctgtgacttctacgagtcataatcgagtggggacttatttattcagagtaactttcactgtccagattttctttgtaccgtcggcagccattacgctgtatttatgctcccgggtccaatcggcaggaacaccgaatttgggtgaaccgtccaatggggtgacgcgggcggcggtagatacattgacgtaaaccacgaggttactcaatgacactttagcgcgttcggcctctgtgaatttgccccctgcggcaggaattgtaaatacggcagtggctacaccgtgctccgagtcgatattgtttgtacggtccagctctttttcggctacaatgttttctcccgtgatggcatccttatcaccggagtagaagcggtgataagcacctactttggttatttccgcctcttcgtaggcgggcagatcttctttactgcaagaactgatgatggggacacacatcagcagcagtaacataaaccatttagtatctgataatttgattctcttcatattattttcttcttaatttatttaatgaatgaactgttaggtttaccatcccaggttctggtcgctgtcattgatggcggagttggcattgatgatgctttgtgtgatcgggaacaggtagcgtttcttggagaatgtacggtcggcattggtatatcctacagtacctacaaacatgcgatgtctgtcttggctgatctcaacaaaggtggccggtgaactcaattccggaatgatgtctcctgcgggtttcccgtgattggcttcgccgccgtacatgccccagcgtaacagactccagtagtaatcgccttccagagccagatctacgtgacgttcaatcttataatcgtgccatgcgtcggccagtgaagtggcgatggaaggaggcagattgccgtgagtggtacgtgtccggttgaatgtggctaccgcactgcttactttggaggcatcgtatttggccagtccgagcaaggcttcggccttattcaacaatgcacgtccgtagcggaagatgacataatggtagtcggtcggattgttccagaagatgcgttcggcattgacatagatatatttgcgccagatgtagttcgttatggggatgtatccgttgcccggtgtcttaccgtctacggctgtcctatgcaggtttccgcccttatgaagagtgatcagctcattgtagaacatgcacgaatcatactggatggagtgatagaagcgttggtcacggttcttgtacataaagtcattgatctgcacgtccggagcgttgctgtttgtctgatatgccaggctgttgtcatccagctccttggcatctacagccatgtcggctacgtcggcattggataatggtgtcgtgttgttcacgaactgggtcgactcattccatttcactccttggttggtaatctggtctattactaaataatcgtccaccagattctgggaaggtgagtgttccagccagcattcaaacaccaggtcctgattgaagaacggacgtcctccgtagtcttccaggcgtttgttgctctggttgggaagcatctcctgcataagtgtacctgcgccgttggtgttatccttgctgtaatattgtgccagaatgatttcgggagatgtcctggcaccatcctgattgaacatactgccgtaattgctgtccagtgtgtatccttgtataccgtctactgcagctacggcctgttcgaagagtgacttcttgcgggtgtcgtctgtgctgtaggcagcagctgtcaggcatacttctgatttcagcgcacgggctgcattggcattgatacgcccttgcagggaggtttcgggcagtcctgcgatggcatcatctatatctttcaggatcaggtcgtacgttttgtcgatagattctgtgagcggtaagttgaattcatccgtttcagccaatacatggtctacccagatcacacgtccgcaatgcttggcaatataataataggtcattgcacgcagcatctttccttcggctaccaatgcttttttatctgcatcggacaaacctgtagatgcttgcgatttttcgatgatcaggttacatcggcggatggtgccgaactggttgaatccccatgaccagtcacggttcataagatctctggcttcattcgggcagttctggcgcatgaccgaattcaaggtccattgctcctccgtgcggatatcgtgatagaaggggaggacattgttgtaggtttgcaatacaaaagcgtccgctgtcgattttaggctccagacgaggtcttccgaataagattccataggcttcgtatccaggaagtgttcacagctctggagtgtcagtgctgcgcaaaagagcgcaggagtgatgtattttatgaatttcatatattgtcttctttttaagttcatactatttagaatcctacgttgacactgatggagtatactcttgaaaccggataggtgtagaggttgccgtcgccgatttccgggtcgatgtcgaacttattcgctttgctgaaagtcagtaagttataaccattcagagaaacgttgcatttattcatccatgccactcttttgagtagtttatgtttgaagtcgtagccgatggataatgtcttcaggcgaagatagcctgtgttgatcagccagaagtctgagctgccgtagttgttactgccgttgtagcttgccgtacttctcaaacgtggatagcgggctcccgtattattcggagtccatacgtcggtctggaagtcatagataacaggaggataaccgctgccgctttggcttccctgaatcataccgcccatataaaggtcggccggagtagctccctgccacagcatgttcatgaaccagcctttgtagttcaagtcggcactgaagccgtattggccgcggggcatactgtttttgccgatgcggtgctggtcggaaccgtcaatgataccgtcgccgttgaagtcattgtatttcaggtcgcctgcacctaagttgacggaactctgacgtttgggtgagttcatgatgtcttcctgattctgataatagcccaggcagtcgtatccgataccccaatatcctttggcttgtgtagtacgtttgtatgggttcttggtatcggtttccgcttcgttcggattgatgttccagtattggtcgaagtaggtgaagttgcccgaaagtgtgtattcaaaatcacctcttttctctttccattgcaggatgaactcggcaccttggcggatgaactcgccatttgactttacttggggtaatgcgatacccaacgggtcggtataagctactgccgacggagaggtcagataacctttggtgctcttgcggaaatagtctacagaacccgaaagacggttgttgagcgatccgaaatcgaatccgatgttaaagtcgcgggtagtataccaggtaatgtctttgctgaccaaggcaccttcggaaaatcccggataccaacttccgttaagcaggtagccacggtcgttcagtccgtatgattgcaggtaagcatagcgtccgatggcgtctgaaccgatctcgccataagaagctcttaccttgaactggtcgaagatatgacggtcttttaatgtctgccagaagctttcttccgaaatgacccatgcaagagagccggcatagaatgttccccagcgtttacctcgcgggaaattgtcgctaccgtcgtaacggaggctggcctcggccacatatttgctggtatagtcatatttcagtcgggctactacaccggcacgcgcttcttcaccttccgaagaactgtttttggctgtagatacaggacctgcaccgatctggtctacgtccagcaaatattcttcgcgggataacgaggcatcgtctttaaagagtttataggcttcgataccggctgtggcgctgattgtgtgtacctgattgaaagtacggtcataattggcaaagccttgcacggtgtacgatgaccagtttgaataagacttgctcagtgaaggtttgccgggatcgttggggttgccatcccaatcgtatgctaaaggtgattttttccaactttttgacttgtcgttgttgatgcggtagttacccagtgctttcaatcgtaggcccggtacataaggtacgctccactccagtgcgaggtttgctatggcactgaggttttcgtttttagtgtatccggcgtcgggggagatctccatcaatgggttatccggtgtgttgaatatttgtccgttcggattgtatgctatttcccagggggctttattctggatgtgtccccaggtgtgataatagctgtctcccgatttggcattaggcgatcttaagtccgttttgtaagcttcgatgctggaagttactttcaaacctatttctttgaaatctgctacgatatttgtgcggaagttgtagcgtttgaaactgtttacatcgaacttatagagtgacttctgatcgtagaaccccaaagaggtatatgcttttatcttttcgctaccaccggtgacagtcagggtatgttgcatttccggtgcgaagttcttcaaacagagtttttgccagtccgtattaggatatctgcgtggatctgatccgttgcggaacagttccagttcatcgtccgtataggccggtgccaatccgtcattggtcatactcatgttcttgtagaaggctgcatcgtgggcatccaacttattgggcatattggcaggttggctccagttatagttaaagttataattgacgctcattttccctgctttgccttgcttggttactatcattacgataccgttggcggcacgtgctccgtaaacggcggtagaagcggcgtccttcaggattgtgatctgatcgatgtcttcagcattcagattgcggaaatcccgctcttcggaaatcacatcgtctattacataaagcggagtgccccctccacggatagagacactggaaaagttattcagaccgcctccgctggttgtgaccaacagaccgggagcacgtcctgccaggctttgggtgatgtttgccgtcggtgctttgataatgtcttctgtattgacactggcaatggcggcggttgttttacgtttagaagtcgtaccgtaacctactacgatgacttcatccagcgttttagtgtcttcttccatcgtgatgcgtaaatctttggattttccgacagcgacttctaagggcttgtatccgatgtagctgatttcgagtacggccttgttggggacattcggtatcataaactctccttccatattggtgatggtaccgatagtgcttccttgtacttttaccgaggcaccgatgatggcctctccgctctcatcgactattttacctgttattttctctgttttactctgctgtgtggctgtgacagcatttttttcataactgtctgctacggcaatttgtgatgtcgtgcagaatagcaggagactgatacctgctatcttcaaaaagttgatttctcgaaggcatgtgtgcttcggaaattggcaagttctttttgtcatacattaaattattcggttaaacataaaatgtgatttggaggatatagatcagactgtctaatctacatcggtttgaggggattttttcaggttctcataggcattagcttttggtttataatattaagtctgttcaataaccttgctgaactatgctgattgctatctggaaaaaatagagctacatgagataggttctttcagtacttttaccatctgtattagattgattattaatggtgtactaaacggagtgtaaaacggtgaagatgcttggtcgaatattttaatgcttctgagtgggaggtataatacttattttctaccttttacttatatatgcatctgaaatatagttgattattgtttatgggaagagttgtgaacgctatccgcatgtttcttctgccatctcagtgctaaccggataaatgaaaatcttaatgccattaaatctttattatataaattatgttggtataaaaaaatatagtaaaaagttgcggggatattaacttcttattatctttggccccataataaatactaataattgcaaatgcaatggttaactggtcctaagagctatctgttgtcttttcgtataattcctaagtactgaaagaacttagccgacttttccgttgaaatgtttatcactacttttattatatcgtttatcaggttgttgattttgccaatgggctgattgtattctgggaaattaaataattccattctttacgcaaatttcattctttgtatgatttatttcgtctccgtaccggggaattatatcgttcggttgatattttcttttgatctcgaagcgagaggtacttatcagaatgataattatgtctttgaagagcaaatggatgatatctttcaggaatagggctcttttctatctgtcatattgaaaatcagcaagatgaagaatgtacattgggttgttgaaatacttgttttaacatggtcttaaaataagtgttttgatgacagataacaaatcttttaggcgcaaaagacttgttgtttgcatataggaagaaagtgatatgcaagcggcattaacaatgttaattgagaagagattttttagtcggtaggttcttgtgcggtacaggacaaaaaaagaaaggcgaccctttgcagagtcgcctttcgattatttaaagttgttaactttgtctgattagagtttcggaccagcagcaaccaacttcttaccagcttcgtttccagtgaacttagcgaagttcttgatgaagcgaccggcaaggtcttttgctttttcattccactgtgcaggatcagcgtaagtatcacgaggatcaaggattttcggatcaacacccggaagttctgtaggaacaacaaagtcgaagaaaggaataaccttagtaggagctttgtcgatagaaccgtcaaggatagcgtcgatgataccacgagtatctttgatagaaatacgtttgccgcttccgttccatccagtgttaaccaagtatgctttagcaccggtcatttccatcttcttaaccaattcttctgcatatttagttgggtgcaatgataagaatgcagcaccgaagcaagcagagaatgtcggagtcggttcagtgataccacgttctgtaccagccaatttagctgtaaatccagacaggaagtagtactgagcttgttccgggttcaagatagataccggaggcaatacaccgaaggcatcagctgacaagaagataacttgtttagcgtgaggacctttagacaccggtttaacgatgttttcgatgtggtagataggataagaaacacgagtgttttctgttactgatttgtcagcgaaattgattttgccatcagcagctactgttacgttctccaacagagcgtcacgtttgatagcgttgaagatatccggttcgctttctttatccaggttgataaccttagcgtagcaaccaccttcgtagttgaatacaccttcgttgtcccatccgtgttcgtcgtcaccgatcaatttacgtttcgggtcagtagacaaagtagtcttacctgtaccagacaaaccgaagaagatagcagagctagttccttccatatctgtgttagcagagcagtgcatagaagcgataccacgaagcgggttcatgtagttcatgattgagaacatacctttcttcatttcaccaccgtaccaagtattcaggataacttgttctttagtcttcaggttgaaaactgtagcagtttctgagttcagacccagttctttgtagttatcaacttttgctttagaagcgttgaagcatacgaaatcaggttctccgtagttagcaagttcttcagctgtcgggcggatgaacatgttagttacgaagtgtgcctgccaagctacttccatgatgaaacgtactttcatgcgagtaccttcgttagcaccacagaaagtatcaacaacgaacaggcgtttgttagaaagttctttaacggctttagctttcaggtcagcccaagcttcttctgaacaaggtttgttgtcgttcttgtattcttcagaagtccaccatactgaattttcagaagcttcattcttaacgaagaatttatctttaggagaacggcctgtgtaaacgccagtcattacgtttacagcacccaattctgttacttgacctttttcaaagccttccagacctggttttgtttcttcagcgaacaaaacatcgtaagacgggttgtgcaggatttcagttacacctgtaataccgtacttgcttaaatctaaatttgccattttcttttgaattaattaaaattggtatattgtttattatctctttctggcgttcggaatggaatgtttttaaacatccccttgtaaatcgactacaaaagtaatgctttctttggaaacaaagaatatattagagaaatttttctttaatagaaaccgttttatgtttacgtaacaatatctgcaaactgaacgttgcaaattgaaagattatcacttactttgcaccgtataaaacctgaatattaaaacgcagttgaaaagatgaagattattaatttaagtgagacagactcaatattgaatcagtatgtatcagagataaggaacgttgaggttcagaacgaccgtttgcgttttcgtcgcaacattgaacgtatcggcgaggtgatggcttatgaaatgagcaagacgtttgcttattcggtgaaggagatacaaactccattggggatagcacctgtcagaacaccggacaatccattggttattagtacgattcttcgtgccgggttgcctttccaccaaggattcctgagctatttcgattatgccgagaacgcttttgtttctgcttatcgtaagtacaaagatacgttgaaattcgacatacatattgaatacatcgcttcaccgcgtatcgatgggaaaactcttatcattacagatccgatgcttgccaccggcggaagtatggaactgagttatcaggccatgttgacgaagggacatccgtctgaaattcatgttgcttcgattattgccagccaaagggctgtcgatcatatagccagtattctgccggaggataaaactacaatctggtgtgcagctatcgatcctgagataaatgaacactcttatattgttcccggattgggtgatgcgggtgatcttgcttttggcgagaaagaataaaccggtcagataactgattgtaagacaacctgtctttttgctcccggaatgtggattggggagaaaaaaggcaggttgttttttataaaatgctttctgaaggtaaacaagctaggagagatttgtgtatctttgccgctactattataaaacattgatagagtatagtcagagtggaaaaaagattttctaagatattttcaatagtcgtttacgcattcttagctttatggatgggagcatgtaagagtgaacctgtccgcttgccggaactgagcggacaccggggagcggactgtattgctccggagaatacgctggcttcggcggattcatgtataaagtataagattgacttcatggaatgtgatatttgtatcagtaaggacagcgtattctatttattgcatgattctaccttggatcgtacgacgaatggaaccgggctgattagagagtggctttcggcagacatcgatacattggatgcaggttcatggtttggcgaaaagttcagcggacagtgtgttccccggttggacgttttattgcggaaggctaaacagaacggtctgaagctgacgctcgattatcgtacgggagactttggacagttgctggatctggttcgcagggaaggaatgttagagaattgtacatttactttctggtcggacaaggaggcaaaagcttttcgccaagtggctcctgaaattcggacattacaggcgtatgtaggaggtggtgccgaacttgataaggttatagctgaaataaatcccaatattgcggttattcggatcgattcactggataagctcctggtggaacggtgccataagaaaggattgaaggtgcttgcattggcactgggtactgacgatgtagaagagtctgaccggaaagctattgaactcggggtggatgtgctggccacggacagaccggagctgtttgtaaagaaatacagaccagagtatacatggacaaaatgatccgggtattccggcatataaaataagaggcatcttgaaggagacgcctcttactttatagggattaacagggggattttattttacttcccatgtttcattggtcatcagcaattcctggaagttatgatacttctttttggctttcacttcatcaatctgctcggcgactgcatcgttataggtaggagcttccacatcacggatcacaccgagtgcgattgggaaatccggtccttccattaatgccagtttcagttgcaacgtattatccatgctgtgagcattgtggataagaatgtctttttctgtcacgccgttctcacctaattttaccactttcaagccgaaaccttcctgcatcaggccgaactctttgttttcgccgaataacatcggtttgccgtgttccagatagattgcgtttttagaacgtccttctttcgttgcgaccgattcgtgtgtgccgtcattaaagatgacgcagttttgcagaacttccacaaccgatgctcctttatggttggctgcggctttcaatacttcgacagaagccggtccgtctaccgcaacacaacgtgcgaagaaacggccacgcgcgccgaaacagagttctgccgggtggaatggatcttctacagtgccgtaaggagatgatttgctgacgaatccacggtcggaagtcggggaatactgacctttggtcaacccgtagatgcggttgttcaataagatcatattcaagtcgatgttacggcgtaccgcatggatgaaatgattaccgccaatggccagaccatcaccgtcaccggagatttgccagatggttaaatccggattagctaccttggcacctgtcgcaacagcggcggcacgcccgtggatggtgtggaagccgtatgtgttgacataataaggtaggcgggaagaacagccgataccggagatcacggcaatgttgtgcggagctactcccagttcggccatagccttgtgcaaggagttcaggaaagcatggtcaccgcatcccggacaccagcgaggctgacctgatttataatcttttgctgtatatactgtttcgctcatctcttattcctccaataatttagtgaatgcttctacaagttctctcgtaacgaacggctggccttttacctggttgaactggctgatattcagtccgggtactttcatgcgcagatatcctgcgaattgtcccaagttctgttcggctactacaatctttttatactttttcagtatttcggctgtgttcttaggcagcgggttgatgtactggaagtgagcgagtgccactttctttccatttttgcgcatatgctctacagccgaataaagatggccgtaagtaccaccccagcctactaccagcaggtcggcatcagcatcgccttgtacttcctgttcaggaatactgtcggctatcttgtcgactttggcctgacgcagaagtgtcattttctggtgattttccggttctgtggaaataacgcctgtttcactgctcttctcgagcccaccgatgcgatgcatgaatccttcggtcccgggaacggcccaatagcgtacgccggtcttttcgttacgttggaacggggtccatgtgccaatcatatccggtgttacatacggcggatttatagccggatactcatccatgttgggtaatttccatgcggcagaaccgttggcgataaaggcatcggtcagcagtactaccggagtcatgtgttcaagagctattttagcagccatataagcagcatcaaaacagttggtgggtgaagtagctgcaatgacaggcatcggactttcaccgttacgtccataaagggcttgcaacaggtctgtttgttccgacttggtcggcataccggtagaagggcctccacgctgtacgttgaccacaaccagtggtaattcggcaatgacagccaggttcatggcttcacttttcaggcagacacccggtcctgaagtagtcgttacagccagatcgcctgcaaatgctgcacctacagctgaagcgcatccggcgatttcatcttcacattgaacggttttcacgcccagcgatttatgtttggcgagctcgtgcaggatatcggtagccggagtgatggggtaagatcccagataaagttccaatcccgctttttcggcagtagcgatcaaaccgtatgaagtggctttgttaccattaatatcggtatagagtcctgcggctttcggcgttttactttcaatcttgtaagtggaagtagaggcatgtgtgttggctccatagttgtagccgtcatttagcactttgatgttggcagcggcaatttccggtttttttgcgaatttctcgttcagcattttttcggcagcagacaggttgcggttgaataaccagcataccaaaccgagagcgaacatgtttttgcaacgcaacatggctttgttgtccagccctgaatctttgaggctttctttacacatcgacgagatggggacttcaagcacttgctgtgtgattcccatttcttcgaaaggattgcctgtcttgaactgtgctttttccaagtctttttctccgaaagagtcggaatctgtgatgaccagcccctgcggtttgcagaatttaatttgtgttttcagtgcggcgggattcatagctaccaatacgtggcaatgatcacccggagtgaatatcttacttgcaccgacgtgtacctgaaaacctgatacgcccgtcagtgacccttgcggagcacggatatctgccggataatcgggaaatgtacagatgtcatttccaaccgtagccgacacgttcgagaagatgttgccggccaactgcataccgtcgccggaatcgccggagaagcggacaaccacttcttccaattctttaaccatcatttcgtctgccataattctatttatatatttaaatttaggattaacatgaaccggtgttagtgtgttctttgaatattaaccaccagcgtgtcttttttgtttgtcactttcctgtatatgtggcaggcaaagttcgcaaagttaagtgacttaacaaaatcttttctgatttatctgtggggctttgttaaaagagagctgttttattgcaattttgttctctggagtaagcaaattgtctacattttgttcagatatgggctctgactacaacagtttgatatctctgtttagatcgttttttgacttattgctttctaattcgtttaatagatagatatctgtctgtattttatttgaattttctttcacttttggcgtctcttaccctattctactatctctcttctatcttatggattaaatgaatgtgtttgcttcttcttcttttataaatctgttctttcgggtttgccaaatcaggagaatacgctatctttgcagccgatatctatcatggccctgtagttcaacggatagaatagatgtttcctaaacattagataggggttcgattctcctcggggctacaatgatagaaacgcagttaatcaatagcgattaactgcgttttttgtttggattcactttcctttttgtgatgacggactggatgtgatttataccttattatatatatagccgatttatattgatgtgtgtcgtgttctacaatacaagggtattctcagtttggagatttctcaacttttcaaatgataataaggatgatacatatcattccttagattcgatacccgattatgatatgctatttattcattttatgttaattcagttcttatctataattctaattcatctattttcttttttatttgttatagggacgttgagaatttctatttttgcattttatatttaatataatgaatctataaataataatttattttggagaagaaaattggaaagttaagtatcagggtgttgttgaatacccatcgtagaaatgattgtgagatttatcctctgattatccgtgtggtttatcacaggcgtaaaagtgagtattctcttgggtggaagattcatacttctaatttctctgcagatcgtgagcgtgttgtctattcatcaaccggtaatcttaagcgcaaggatctgggacttatcaatgatgccatttctcaggagcgtgaacgattgctgaagatttttgcttttcttcaacagaatatgccggggttcagcttatctcagttgatggataagtatcgtatggagcgcaatttgcgttatgtcgatgcttttattgtgcgtgagatagagaggcttcggcaggaggggcgttctggtactgccggcctgtaccttagcggattgtactctttacgacgttttttgcgtggtcagaagattacgtttcgcgagttgacttattgttttcttacggattatattcattttctacgtatgcgcggtatctctgaaaatactgtgaatatgtatattcgcaatctccgcgctgtctataacaaagcccaaaagcaggggataaatatgggttgtgagtctcccttccgggagcttaagcttcaaactcaggagactgcgaagcgtgcgttgtgtaagcatgatattgcccgtatagtatctgttgatctttcctccgaacctttattggatcgtgcccgggatctttttatgtttagtttctatgcccgtggtatgccttttgtcgatattgtctttcttaaacatgactcgataatcaatggaatcatttattatgagcgtaataaaacggggcaacgcatgcaagtccgtgtgattcctcctctcgcagctctgattgagaagtatcggagttcttatccgtatgtattgccgtatataacgtctttttcggaccgtacgtcttatatgcaatatcgctatgcattgggtaatgttaaccgcctactcaaacggttgggcaggcgattgcacctgcctcttgtactgactacctatgttgctcgccatagctgggcgactattgccaaagaggagggattttctatcgcatctatcagcgaagggcttgggcatacttctgaggcaacgacccagatttatcttcagtcttttaatagtgaggtcattgataagattaacgagcaagtcgtagcctccataggaaggcatatctgattgctttttgaaaaggtatatcgtgtgtaagcaggtattttaaatgatttgtcccgtttgggacttctgctgttccatctatctcaataggatagataacaagggtaaaaccctgacaaaacatgctttctgctctttcaactacaaaactctactttagtgattcttgtttgacagggcaaagataatgcacctgcaaaaagaatcacttatccaaagcaaccatttacttcaccttttccgagattatattttaagattctgattatcaatatatttatctttgagctgcctggccaactctcttggggaattaccgaaattctttttgcagtatttattgaaactggccgctgaagagaagccgaattcatacacaatctcttttacactggctccgggttgcgccaaccgataaatgattttcttgtttttttgtttcagcaaccatgaatatactgattcgccaaattctaccttgaactttctggcaagatcggtaatactcattcccattgcctgtgctaattcctcacgattgttcacgcgatcaacatgcagtaaaacagcagctttgaagctcatattcgttcctatgatttcatgaaataaatttactatttcctgtttgctatagcttgttctcaaaataataaagagttctttctccttaatggagtgcaaatgcttacagttgactccggctctcaggtaggcatccattaattccagaaataagttcagcgggtggcgtaccgatagtattccgacctcttcagatgcttctctcacttcttttagatagctctctaacatgtgtttctcacatagtttaatgtcattgtataggaagctcatataaatgtagcgtccggggactcgtacctgtatctcgtaagtggataatgccgagatgaaaaagaattcctgggctattaccctttttattttgccttctttgggaataatctccacttcaccttcaagaatgaagatcaggaaattagttttaacagataaggtctgactattgaagttactgccgcttgtaagcgttccaatcccgaatccctcatacgattcacttttataattggtgcatgagatgtgctcttttttgtaatgtagtttcatttttagttttgtaaattatagcttgatatatttatgtttttattaaaatgtttcataatatgtttcgccggattttgatataatatattattatacagcgatctatttaaaatcgacatgtgcctatcgcatagaaaaacatttgctgaaacaatattatgtatataacgctgataatcaggagtactttctatcactatctatcctattgagatagatgaacttgatctgtgtaagaagattaaaatagatgttctatggtttttgtaaccgtaacaattgaatcttgatgtggttcggtggaggagtataagatattgcggattttatgtatccgataagtttaatgttttttttaagcaaaacaagttgaataatagttatggcgtttaagcgatctgtgtttctctttctgttggttgtttcttctacgtttttaggggtcgaaatagctcgtgggcaggtttattctttgcaaactaatgttttgggttggggtactaccaatatgaatcttgagttcgggctgaagttttcccatcgttggaccttccactttcctcttcaatataatcccttctcttttggagatgcgaggcttcgcaatttgtctgcttctcccggagtgcgttattggatccgtgaatcttatgggcgttcttattttcttggaattcacggagtgagcaccatgtataatgtcggtggagtttttggcgataaatatcgttacgaaggctacggttttggaggcggactttctttggggtacaatcgtcctctttctcctcattggaatttagagtttgaggcaggtcttggggtcttgtggacccattatgataaatatgtttgtaaggcatgcgggcagaaagtggctacttttaagggagcacgtctgattccgaccaagttggcagtgaatatagtctatttattctaattctattaatctcatttcttattctgttgtaagatgatacatcaaaaaaagttcgtcactatatcgatagggtatcgtatctataaaatgttagggatgctctgtctctgtgtgctggtatattcatgcggttcaaaatctcctttgactatgcgtttgtttatgcaggctggcggagctactgtcgagctgccgaatacttcttctgcggatagcgtttttacagtctccgaaactgtcggtttccgggatagtgtggttgttgaaaatcccgtttcttcggttgattctcttgaagaagatatctggaaatcaattgatatggatcgcattgatattgttgctcagcgtaaaagtatagagcgaatcttggaacgtaatggcgaggtcaccctgatgttttatgtaaaagctcctaaagtcctattggacagttgctggaagttgacaatgtacccggaactgatagaaaaagactcttctgttttgctgtctcctgttattctgcggggaaaagaatttatccgtacacaggaaagccagtataaagcatacgatgatttcctaaggggtattataccggagagtaaatatgacagtgcttttgtggatcgtgaaggtatccgcaaagatatttttgcacggcagaggcttttctggaaggtctatgaagcagagcgacgtagacgtctggcttatctgaggtggaaggcacttatggataagcgtcatggatggatcagtacgaaagcagagggaaaccgtaatactttgaagcaacgtatgcagcgtaatgtcttggaacgcagcgtggaaaaattcatcgccggttatgatacggttggtatacgtgcttcgtaccagaaaaaatacgatcgccgtacggatttttggccggcttatcgtttgcctcgtgcaatgacagttaaagatgttccttcccgctttcaggaactttatctgtccggtgggcgtcttgaggatattcgtaactacagtttcactcgccgggattctattgagatcgcttcccatcgctacttccgaaaagcgattgcagagaatgaatataaccgggatcatcaggatttgattcgtgaccgtattatccgcttcccttatgctgacagtgcaatggtcaatcaaacagctgatccttcggaagacttctcctatctgtatatgtatcgcatcccggtacgtgagggaatgaagaaattacatataactcttcggggaaacgtgctcgctacggaccatagcgtatggagtcttcctccggcggatacattgacattcgtaattgcgtctgttgccgacttggctgatgctactctggcgcgtcgttttgatatagcgggtgacagtgtgaaccatcttactcctgagcgtgaggagtatgcccaaggacttgaggccctgtccaatcgtgaatatcagagagctttgggtatcctggagaaatatccggactacaatacagctgttgccttgacttgtttgggctatcatgcaaagtcggaagatttgttaaagcaactgcctcaaacagctgcggttgaatatctccgagcgattgtgaatgtgcgcttggaagactaccaagcggcagcagaacttctgttggaggcatgccgtaaagatactaaatatgtataccgtacagaaatggactctgatattgcagcacttcttcccagatttatgggcttgaaggaggagctggagcgaatagcttctgaagagtaaagtacactatacttataccttaatactataagaagtttaatgattctttatttattgttgaatttaaatttttattaaaatgagaattacaaaatcgattctggccttaatggctgcaaccatgacgttcgctgcatgtagcaacgatgagaaaattacggagagtactcctaagacggtagctttgactgtgaagctgccagagttcggcggagcttcgagtagagctattgatcctgagactactacaggtaataaagtgactatcaatggtaatgtaactattattgcgcgtgtctcacaaggtggtgcaataaccaatacgatca

SEQ ID NO: 5056 - DNA, 297 bp, Unknown
  gut microbiota DNA sequence
ggagaatgtccttttctgaaataatcgtataatggaagtggaaaaagagaccgaaatatggttcgctatgcgtgccacttatcgtcgagagactgacgctatgcggttgcttgcgaaagagaacttgggctgttttgttcctatgcaatataagataagtataaagaaagggaaaaaagtccgtgttttggttcctatcattcacaatctaatttttattcgtgcttgtccttccgaagtgaagcgtgtcaagtctatggttgcttatttgcaatatatcaccgatacccgtagcgg

SEQ ID NO: 5057 - DNA, 1370 bp, Unknown
  gut microbiota DNA sequence
ttgctcacagccctgcaagaacgtatctattacaatccgctcgtaaccggttacgagattaaggaccgctttattgccggaaacgtgatagagaaggcggaacgcatagaggcttggatgggcgaaaaccccgaaagtgaacgtatgccggaggtgaagcaggcgttggaggctctgaaagaagccgaaccgccgcgcatcgccttcgaggatctggacttcaatttcggggaacgctggattccgacgggtgtctatgccgcctacatgagccggctgtttgacacagaggtgaaaatcgcctactccgccagcatggacgagttttcggtggcgtgcggctaccgcaccatgaaaatcacggacgagtttctggtgaaggggtattaccggaactatgacggtatgcaccttctgaaacacgccctgcacaacacctgccccgacatgatgaagtccatcggcaaggacgagcatggcaacgacatcaaggtgcgcgacagcgagggaatacagctcgccaacgccaagattgacgagatacgaaacggattctccgaatggctcgaagagcagtcgccacagttcaaggagcggctgacgacgatgtataaccgcaagttcaactgtttcgtgcgcccgaagtatgacggctcgcaccagactttccccgacctcaatctgaaaggcttggcaagccggggcatcaggagcgtctatccctcgcagatggattgtgtctggatgctgaaacagaacggcggcggaatttgtgaccatgaggtgggaaccggcaagacgctgattatgtgtatcgccgcacatgaaatgaagcgtctgaatctggcgcacaagccgatgattatcgggctgaaagccaatgtcgcggagattgccgccacctatcaggcggcatatcccaacgcacgtattctgtacgcttcggaaaaggacttttcgaccgccaaccgcgtgcgtttcttcaacaatatcaagaacaacgactacgattgtgtcatcatgtcgcacgaccagttcggcaagataccgcagtcgccggagttgcagcagcgcatcctgcaagcggagcttgacacggtggaggaaaacctcgaagtgctgcgccagcagggaaagaacgtgtcgcgggcgatgctgaaaggattggagaagcgcaagcacaaccttgaagcgaagctggagaaggtggaacacgccataaagtcacgcacggacgacgtggtggatttcaagcagatgggcatcgaccacatcttcatagatgagagccaccagttcaaaaatctgactttcaatacacgacacgaccgtgtggcggggctgggaaacagcgagggaagccagaaggc

SEQ ID NO: 5058 - DNA, 248 bp, Unknown
  gut microbiota DNA sequence
atcacacctgtcttgagatattcaatccactcctcaaggggcgtgacagccactttgttgaactcgttcacacgaataaggaaatactcaggaaagatctcggcaggcaatttacggacgatggcgttcttctctttggtgctcacctccagaaggtcgcccgtgtggacacccacgaaagagttctgaccgtggtaaaggtaatcagtaccacgaccgatatcaaagtagaggatactgatggaata

SEQ ID NO: 5059 - DNA, 186 bp, Unknown
  gut microbiota DNA sequence
cctcccgttctcactactctgaattctaaacctttttataattatgaacataaaatatatttttcgaatccttatcaaaatgaagtatatgaagtaaggacagatagcttacgggttgcataccgttgggattttggaaaagataatcttgatttgaaggagtatggattcactttattagaggat

SEQ ID NO: 5060 - DNA, 3046 bp, Unknown
  gut microbiota DNA sequence
tcaggtttagtagatctattaatttaaactatgtccctttttaaagacaagatccttttaattaccggtggaacaggttctttcggtaatgctgtattgaaaagatttttggattccgatatcaaagagatccgtatcttttcccgtgatgaaaagaagcaagacgatatgcgccatcaccttcaaaataagaaggtgaaattctacattggtgatgtacgtgataaacgttctgtggatggagtgatgaatggggtggactatattttccatgctgctgcactgaaacaggttccctcttgtgagtttttccctgttcaagctgttcggacaaatgtattaggtactgagaatgtgcttgactcagccatcgagcatggagtcaagaatgtagttgtgctctcgacggataaggcttgttatcctatcaatgccatggggatcagtaaggccatgatggaaaaggtcgctattgctaaaggacgtcaaatgggagagggtggtcaaactaccatctgctgtacccgttatggcaatgtgatggcaagccgcggatcagtgatccctttgtgggtggagcaaatgaaggccggcaaggatatcacaataaccgatccgaacatgactcgttttatgatgacactggatgatgcagttgatctggtgatttatgcttttcagcatgggcataatggcgacttgtttgtccaaaaagcacctgcagctactcttgatacgctagcccgttctttaaaggaactttacaaaatggatacccccgtacgtgttatcggtacacgccatggtgagaaactttatgaatcattagtgactcgtgaggaaatggccaaggcggaagatatgggtaattattatcggataccttgtgatgcccgtgatcttaattatgataaatattttgtggaaggacaagagaaggtctctaaattcgaggactaccattcacataatacccatcgtttggatgtggacggaatgaaacagttgttattgaaacttgatatgataaaggaggatgtatgcttaaagtaatgacgattgtcggaactcgtcctgagatcataaagttgagtcgtgtgatggctgagttggacaaatacactgaacatattatggtccataccggtcagaatttcgattatgaactgaatgaaatcttttttcaggaacttcgcatccgtaagccggactattttctggatgctgccggaaagaatgccgcagagacgatagccaatgtaatccgtaaatcggatgaattgatggaccaagtgaaaccggatgctttattgttgtatggtgatactaatagctgtatttccgtgatttccgcaaaacggcgtaagattcctatttttcatatggaggctggtaaccgctgttttgaccagcgtgttcctgaagagatcaatcgtaagattgtggatcatttgagtgatatcaatatgcctctttcagagcatgcacgtaaatacttgctggctgaagggttacgtccggagaccgtgatcaaaaccggatcgccaatgacagaggttttgatctatcataaggcggaaatagaagagaatgatgttttagaaaaagaggggttgaaaaaaggtgattactttattgtaagtacgcatcgtgaggaaaatgtggattccgagaagaacttttccgacctgctttcttctctgaacgccattgtggacaaatatcataaaaaggtgattgtttccacccacccccgtacccgcaaaaagttggaatctattggctttattaattccaatccgatgattgagtttatgaaaccttttggcttcatggagtatatcaaacttcaacagaatgctttttgtgttatttctgacagtggtacgatcacggaggaatcttctattcttcattttccggctataactatccgtcaggcacacgagcgacctgaaggtatggatgaagggacgctgatcatgaccggattgaatagtgaccgtattctggagtctatcgaaattgtaacctcccagtatgcagaaggtgcagacgtaattcactctattcctgattatgcttcggataatgtatctaaaaaagtagtccgtatcattctttcctatacagattatatcaaccgtacggtttggcataaagaaatctagttcctgttttttattttttatggttaaaaagaagattctgttgttcggcgccacaggtatggccgggcatatggcttattattatctgcaatgtacggggaaatacgatcttgtgaatgtagtttatcgtacccaattgactgatgatagtattgttgtggatgtgacggatggggatgctgtcagtcggctcgttcgtgaagtccgtcctgattttatcctgaattgtattggcgtattgataagaggttccagagaacatccggacaatgctattctgataaatgcatggttccctcatttgctcaagaaactatcggatgaagtgggagcaaagttgattcatatcagtacggattgtgttttctccggtaaaaaaggtaactattcagaaactgatttccgggacgctgacgatgtttatggtcgtagcaaagcactcggtgagataatcaatgacaaagatctgacaatccgtacttctatcataggtcctgaattgaaggagaatggcgaaggcttgtttcattggtttatgcatcagcatggttgtgtgaatggtttccagactgctatttggggaggtgtgaccactctggaattggcgaaagccattgatgtggccatcgatcagggagtaaccggtttaatacaactgagtaatggccttggtataagtaaatatgatttgttacatctgttttcccgtatatggcacaaacaagatgttgagatcctgccatttgatggaaatggaatagacaagtcgatcgcaaagtccgcaagatttagttatgttgtacccggatatgaagagatgcttcgggaacaatatgattggatgcaggaaaatgaatcattgtattcattttatt

SEQ ID NO: 5061 - DNA, 6472 bp, Unknown
  gut microbiota DNA sequence
cgctgatatttaagtgattaacttagattttccttcttaatactcctcttcgttaaagaagaagtcctctttactggggtaatccggccaaatatcttctatgctttcatagatttcgccttcatcttccatttcctgaaggttttcaatcacttcaagaggagcacccgaccgcatggcataatcaatcagttcatccttagttgccggccaaggagcatcttccagtttagatgctaattccaatgtccaatacataagctttcgtatttaaaatgtgaatattaatcctactctctatttttcggcaaaagtataataaaatatttcacttgcaactattattccaaaatatttcgtcttttccttcattaaaattcattttacgggacaagacaaataaataatccgataaacggttgatataggccagtaaatcggctgagattgtacagctttcggataatgcaagaatccggcgttcggccctccggcaaacggtacggcaaacgtggcaaaccgcagagccacgactccctcccggaataataaaagaatgtaaaggtggaagaatttcgtcggcggcatcgatttcgcgctcaatagcttccacctcagcgggagtaataatactgacatcattcaattgcaccttctcctgatcagtggccagatgcgacccgatggcaaacaatttatcctgcacggactgcacaaaattcaaatcatgctcgtccatcaaataagttgccagcaagcccagattcgaattcagttcatcgaccgttccatacgcttccagacggatatgggttttcggaacacgtgtcccgcctatcaggccggtcgttcccttatcacccgtttttgtatatacaagactctttttcataatgatagtatgtttattatttctgtaaaggttaacacatcaaaggattcagaagttgacgagatagtgctgttttatcttggtacggtcgaaaaagacaattcccaaatcatacaaatcgaatgtaatgcctgtccggtcgtcctgctgtatctttttccagagtgctttcatcttcttcgtatagcggatgccctcaataacaaagagtcctcgtccggtggttctcgatgcacaaaggtcaaacacctgctccacaaactcctcattccgataatggtgcaaatacaaaaaatcgacaggcgtatctttctccagaaagagctccgacaaatcggaagcacccacataatcggctttagcatgtccggcctgcaaatacaaagacgatgccgataatgttccggcatccacaatcgtatcgggctgaatatagttaaccagccgaaacagcaaccggttcaccttcttcgattcatgcttccatttcctaccggagtttgccgacatttttttctgttcggcttccaacgaactgtaggcatagtaaggggtacgctcataaatgacgttggttatcaagtcgaaagcaaatggtgaatgaaccccatatccacaacggtggcgaaagcgggccaaccagataaaaggacgtttcaaaagaaaaaatccgttcataataaattgaaatatatcgcgttcaacgcacaaagatatataaaaccatttgagaagtaaagtgttatatgcaagtaattaaaaacccaaacctggagatttatgaagaagttaatgttactgttccttttgagtacctttatattttacagttgctcggatgatgattcatgcacaacctgtaaggaggataatggaaatttggtcacccccgatttgagcgttaccctatccgatacacagagtccgatgacgggtgtattagaagcctacccttgccagacaggaggtgccatttattacggcaattatatcgaaggcaaactgacctcctttccgggaatgtattacctccagaacggagagatctatgaagataagaacagggaaatatctctcccggtgggcacttacaacatgatatactggggtaccccgaaatatgaagagccgatttacagcaacccggtcgtcgtcgacccccaaatcactatcggaggagacctttcacaacagtatttcgggctccggaaagtttcggcggatacgacctattatccagtattcgacttagtgtataccgtgaaaccggcacatatcggcacggaagaactgagtgcagccatgcagcgtgttgttgccggtctgaaagtaatcgtcaaaaacaaaaacaacggtatcctaaattccagtattgccggcatggaagtacatgtaggaggcattgccgagaagctgaacatgtatacagccgctccggtcaaccaaaccaaaacagtatctttcccgcttgtactgtcggcagacggcacacagatgagcaatgccacggtcatgctttttccatcatccgccaaaccaatgttcaagctgatcatcaagcttaaaaacggaaataccaaagtctaccagcaaccactcgatgctccgttaaaagctaataacaaattgactctgacattaaccttgggtgatatcttctcggaagaaacttccgggagattcaccattgataactggcaagaagagaacgaaacaatagatataccgacactggaataaccatcagactggcttcaccggcatccggactccacccgattggagatcagactgatctctcttttagcgcacattcatgccggaaataccaaaaaaccggaaacctcctcacggagccttccggtgtaacactaaaagtaccggacaggcagaagcactaggtaaaactcccgcctgcatgtgttccggtatgtcttccctaaccgatgccgagcgttttccgtgcctcggtctgttgattttcgcttagtttgttctgataggcttcgtacagatagtttcctacgggactgccggcatgtttcacaatctgttccagcacgaatccgccgaaagcctctttaatttcatttatctctttcccggtaaagtcccgccctctgaattcgtcgagagccatcaaggtttgcatcatctcctcgttcagtccggttccttccaccagtacgatatctcctatttttgcgttgatctctcccggttccaaaaccacgggcagagtaacgggaaagcggtcactgtcagtctcctgaataaagagctccctcacttgcgggacagtcacttttccattgaacacaaagcgtccttcactgactgtagtgctgtcatatctcaatgtgcccaccgctgcatttttcaccgcatcttgcagataaatggttctgccttccagtttcgggttggtcaccatccctctgaggtggtaagttccctcttggggtgcatgattacaagcccccatcatcaaggccgtcagcaatactcctgtcaaattccttttcatcttctttatcatcctactatgggttataaaaaaatcaccccatgcgtacccgagggcagaacggggtgatcttttcgtaatattctggacttatttaaaatctaaatccgagtttcaggttgggcaacgcaaacaagttgatgttgtgatgccccaccttgtagacgggtgttcctttcgggataatctgaatcatgtcatagcggtaagccaccggctgaatttcaaatcccagaatcagtcccttgcccatactatactcgatgcccgcgacggttgccgcacgcaaaccgaatatctgtccggctttactgttggggatataaacctccagaggtgtgccggtgacgtctttatcgtctacaaccggaccattgtcctggcggtcctgatcgggagtcggctgtaaatcggtatccgtcccatctgtgttcatatccttatcagataccatgattccggtatacggaagcgtggtttctattcttcccatttgccagcccaacaggccgcctacatacagattgatgcgttcgttcttcgtattgaagtaatagtttgagccaatattaaccgaccagttgtttttgattctgccttccagatattgaagggccggaatctgcatatcggtaaccgtcttgtctccctcgatataatcctttttgggcgttacgccgatattcatgctgaacatcaggttgacatcccaacggtctgtcaggaaatattttccctgtataccgatgatattgaccaaattattagaattcaaatctcccagttgaaggtaagtagccggatcggaggattggtttccggacgtattattgcccaatcccacattcggaaagctaaagtttcgtccgttccagtaggtaggcaacagatagttctccgtattgttattgaacatttgcgaactacccattaccatggatacttgccactgaccttttttaggagcaaacgacgcatcatcgctgctgctgtattgttgcgccatgacaggcgcaacagtacatacagacagaaggattatgcatagtttctttatcatactatattcttctttagttttttattattcagctgcataagcatccaagagtttcttcaaggtagcgttcaaaccgtccactgctgcttgcttttcatctacagttctttgggctttctcgatatcctggtcaagcaagtcaagatactcttcctgaccttcaatattagtatatccgtatttatcgaacaaggcgattttgttgtcgatatcttctacggttttcttagcgctggtaatagcttcttcctgagtctcaagtaaacttgtcaaattaaggctcttctcgcttaccttataggtatggctgttggcatcataatacgtatagtagaagtttccatcttccatagctctttgaacgagggcgatttctgcttcaagtttagaatattcagttacgacattacccaaaagtggttcttgctcgttagaagtatagtagtttttgtaagggttgctttctgagaaaatctcgttttggtgtttcgacttatcgcctttaatcagataacaagccaattctgcctgccacaatgctgcgttttcatctttaatttgcgattccaaagtagcgattttctcgttgatagcatccacttctgcaagtacaggatctgcttccgccttgatcttggcatacaaagcctgccatttgtcgaggttaaccagataattagattcctgagccaaataggtatatttaacaaatgaacctgaattattttcgggattatcaatcaactgagaaacatttttgggcatatcatatttatttgctgatatttctttaggttcgatactcttttcaagattgagttctgaaccaccgaacaatgcttgattagcctccaagaaggcaaagagtgtgctaccttcaactttatcattgaatgatgttgcaagagtttcattgccgattaatgaacttataccgtcacttactgcagttgcaattgcttcattgaaagtagccagattagcgtcagttaaagcgtctttataagtagtagcgaattctgcgttaaagccgtccaccgcttttctctttccaaggtatcccaatatggaggtacgcaatgcgttggctgtttccaatttcttatcttcagcttttaagctgttataagttgtgacctctttcgtaatcgcttggtaggtgttggttcctttatagttattataagccttcagggctgctacataagcaacgtatgcattaatccaagcggtagagtccgatttgaactggtcgtaagctggtttcttatcaatttctaaacgcttaagttcattctcaaattttgttttgtatgcatctaataattttccgcttgcatcgaatgcttcgctattctccccttgataatatgctttgatagcatcggcaatagctcctattttagttgctttgttattaaggctaagatcattaatcaccacatctttcttcatggtgtattggtaattcagcaattctgcgttccagctatcctggacaaagattttatcaagatccccaacgagtgcctcttcattttctccggttgacaatgcactgtataatccgtttactaaagcaggatctacatctgctttggccaatgtataagcagaggatgttgcgtccaactttattttctcttcaataatttgctgattaatcgggaagatgggctttctcatttcttcgattttagtataggcctcgtcttctttagcgtcaagggcttgcaaatcggttttatagcctttcagcttatctgccaaagccttgctatcagtgcctgtcgcatccaatactttgtattcttccatcagagccatctggatttccaacgttttggcagcatgcgttctctccagctgcaattcttccggatagtatttgttcttagataagaaattaattctggcaacctcagccttcattaaacttgatttcgcatcggctaaatcgtccaatgcccccctatttctgtattcctcttcc

SEQ ID NO: 5062 - DNA, 4122 bp, Unknown
  gut microbiota DNA sequence
aatgtccattaaagcttttttattgttatactcagcctgtgcagtaagtgtctgtagatcgagcatttttgctttgaactcttcagttctcttttgagcttcagcttcccaaaaagctttttgttctgctgttttagcttgttctacttccagactgcatttttttagttccaagttaacctgatctttttcaagtttaactttctctctttctaccttgactaattggatttgggtcagtgcgtcttcataggcagcctttgccttaatgaattccgctttcgctccgcgaagttgttcgattcccgccggttcatcgttatcgatacatccggtgaatgttgtagttgctcctcccactaagagcgcagctacgagataagtccattttctcatacctctgtttttaagtgttaataaaaaaaatgttatgtaagtaaatcaatgttttctcttgccgatgacggccttgcctctatcttatgtaatacctctatctacagttactttgtaggtaactccaaacagactattgaaggatgcaaatggcgttttgccaaaaggaatagcagtaaaagggaatccttatttataataaggtataaaaaagaatagttctttgtttctgtgtgaagcaaggaagggagaagtatgcaattctctggataacttcccaacaaaccgaagtctgtagaagctattatctgtctatgaatgaattattttctctctgtctttgaaaaagatgttttttaatttgcttttttgtgaaaaatggtttatgtttgtcggacacttacaataaagttacctacaaagtaactccacagaaatcagcactttatccctcaaaagatcgtttggcataaccgataatacttaaatttgtttcatccagtttctttatattgaatggtttcagataagtctctgttactttgatagacgagtgccccatcgcctcccggataatacccgggtgcacttccaaataataggctaaagtggcccaagtatggcgggctgtatatgaagtcaattcggtagtcagtcccaacagttctcccaattttgtcagttgataattgaagatgcgcaatgcctgctgatactcccgatagatggtatcctctcctccctctgcactcagaatagggaataaatagggagactctgtagtagtatccatatattcccgaatgatattcatggcatctttagtaactgtaatggtgatctgacgtccggttttcctgcgatgataggtcaggatattcccattcaggtccttcttttgtatataagccaagtcgacaaaaggaagcccccttaaaagaaacatcagcacgaacaggtgatgagttttctgcaatagttccgattgcttccgggtgcacttcgtgtcgagcaactgccccatttcttcggctttcaaagctcgtttgatatcggcctgagtaccggtatatacagctttgaacagatgtggcacgtgaggtgccagacgccggtcgaccgcccggttatagacagccctgagtacccgcatataagtagacaccgtgttccagctgtttccccgccgtctgagaaaccgttcgaactgcttcaataactcaggccttactcttttgaacggaatgtcgtgtgctttcagaaaagcagaaagggcatttctgctcgcttgataaatgtgagccgtacctaatgcatattccgcttttcgctcttcaatcatgcgatccataaaacggattaaatctttttctttcatcttatttttgttttacctagtttatccgatcaagatattgattttcgtacacaaagaaaaattatccgcagggtttgtatgtaaccacagtactacgattgagtacgttttattatagtctcattcgatatactttcctaatattgccatcacgaatcattaatcgaattatggcatgaacacaaaatcaaaacaacccttactatcgttcccgaaacccaagtttacaacaggaatgataagattgagcatcaccttgctcttttccactctatgcattggttcatttggacagaagaagtcatcgatcaccgtagaaaccctcttggaagagatgacttcatacgacgaaatgacccgctatcccgccctgccctaccgcagcatgcagcagagcagttacgatcgcagatccgtttctcccgatcggcccggctggtttgccaatgacgatggcgaaggatttatccgccttgaagaacacaacggacggaaagaaaaagttcttttcgaagacgaaggtcccggcgccattacccgtatatggctcacgacctttggcagcatacatacaatcttgcgcttctactttgacggaaaagacgaaccaggctgggtggtaccctcttatgatctccagaagttcggtgtacgaggactcaagaaaggattaatcgaaccggacgataaatggatcaggggcagcctgatttatctacccgtcacctatgccgacggttgcaaggtaaccatggaggaactcactcccgaacggacaaacagacattttctattcaattaccgcaaatatcccacaggcactccggtcgaaaccttctcccggaaagttgcagaacgtatccctcaatcggtcgaaaagacatcggctacattgtatagaaatatagataaggggtttgatccacaggcccgctatggaaaaggtgcactgatccaccggcaaaatctgtcattaaacaaaggagaaaagcagcaactaaacctccacaaagggaaaagagcgatcagccttctccaattcaacgtgaaaacggatccggatctgaaacccggaacagatgatttcgcccggttgatgcgcagtctgatcatatccataagcttcgacggacagcaaaccgtatgggcaccattatccgattttgcaggctccggtatgggagcatttgcatcccggagttttttcttctattctgatggtaaaggaatcgtttgcagtaaatggctgatgccctatcgacagaattgtgagatctctgttttaaacctctcaccctacaaaaccgatgtacatatcgatattgtatcacaaccttacaagtgggacaaccgttccctctatttccatacagcctggaaacaagaacgcagactgcccgttgtcacttggatggaacatgaaaaatgcatggactggaatttcaccactatctccggcagaggagtctatcgaggagacctactgtctcttttcaatcatacgacagagtggtatggagaaggcgatgaaaaaataacaatagatcacgaagcgtttccctcccatttcgggacaggtaccgaagactattacagcttcgacggatactttaaaagccagactccatttgccggacagccccgacaagatatgaaggacttttatggttataacagtttcttcagagtcagatgtttggacggcatacctttcaaccagcaactaaaattcgattttgaattactaggttgggaaaatggcacagtagactattcctcgactgtattctggtatggagacttaaactctcaggcagcgggttcttccggtatagaagaaatagaagcaggtttgctacccacccccacccagtcccccgtctgtagcatagccaatgctatcgacttctgccaaatccaaccaacctccaaatctgaaaggctgcgttatgacagacaaaggctcagcggacatccgggcaagtggaatttaaaagaccatctggtgtgtcatggcggtaaaaaaggtgactacatcgaattcgaattctccggttttgaggaccgtgaatacagtttgaatctattctgtaccaaagcagccgactacggtaatataaagttttacgtaaatcgtcaggaaaacggtaaacagctggactgttacagccaggaagtcgaggccacaggtgccataaacctcggaatgcacaaacccatagatggtaagtttatcctaaggatagaattgaccggacagaatgcattatcgacgggcactttattcggactggattgtatacggattgaataaatatcaatgcagttataatgcacaaatacgttca

SEQ ID NO: 5063 - DNA, 1670 bp, Unknown
  gut microbiota DNA sequence
aggaaatgccgaatgcgttgtcctacctgattgagtccgtagaagcactgcaatccaaagtaaatgccttgcaacataagcaggcaagtaattcatctaagtggatggatatagacgagctttgcgcttatcttccatcacatccagccaagcaaacggtttatggatgggtatcaactaaacagattcccgtacataaaataaataaggcattggctttcttgcaatcggaaattgacgattggttgaagaataaatcgcataagacacaggatgacttaatggaagaagccagacgatttgtcgaatctaaaaagattatcagatgatggaaacgacagactattgcttttcgttctttcgcaagcctattcaaaacatcgaaccgataagggcggtaggtattgtggatgtgtatcgttatatcatcgggcattatgcccaaccacaaaccgaagccctgcgtttgatgctatcttcttccgaagccaaaagatacaaagccactcattttgactattgtactttttcgggattatttcgcaagcgtaatgagaaggaactgattatacactcaggattgatgtgtttggatttcgatcatgtggataacataggggagttaaaacagcaactgctcaaccatgagtattttgatacggaactgttatttgtcagtccatccggtaatggattaaagtggataatacctgttgacttgaaaggctgggaacattcccggtactttaaggctgttgccaactgcatcaaagcaacaggtttgtcattagtggatatgtccggcagtgatgtggctcgttcatgcttcttatcctacgacccacaagcatatattaaccataaatacaaagatgatgtcgaagaaaatattttccgcccaagattgggagaatgtcccttctgaaatacaacaggcacatacaccaagtattgcccctatatataataaggtggaggatgatgtggaaagtgttgttcgggagatagaacagtgtgccattgatatagcccctcattataaagattgggtggagttgggctttgcgcttgtggatggattgggagagaacggacgggagtattaccaccgcatcagtaggttttaccctacctatcaaagggaagaaacggataaacaatatacgcattgtctgcaatccaaaggacaaggcattaccatccgttctttcttccatttggcaaatcaagccggaatctcattggctccgttcagtaaagagcatttatccattttaccaaatatccaaaatggtaaaacgggtaaatggataaaatcagaagaagaacttcctgcatttcctgaatgtgtgtttgagcatcttcctccttttctaaatgaggttgtcaataattccatttcggtagatgaccgtgatacgatattaatcggggctattgtgtgtttgtcggtatgctttcataatgtttgtggcgtgtacgatgaacgcattgtttatccgaatctatatctgttcgtggtggcagatgccggtatgggaaaaggagcattgaccttatgccgagaattggtagctcccattaaccgtaatttgcatgaactttcaaagcggatggaacaggaatacaaagaagcgatgagcacttatatcaaaggtaagaaaactgat

SEQ ID NO: 5064 - DNA, 1345 bp, Unknown
  gut microbiota DNA sequence
ctctttcttgaagatattgggagataatgacggaatcggactgttgtttgaatcggaaggagacacattaagccagactttgaagtctgactatggtaactattccgatgtgctgcgaaaggcatttcaccatgagttggtaagtttgagtcggcgcaaggatagggaatactgtgaagtcagtaatccaagagtatcagtcgctttggctggaactcccgaacaggtaagaagattgatacctgatgcggagaacggattgatgagtcgcttttgtttctatattatccgcttcaagcgaggtataagaaatgtgtttgccacaagcgacatttctcaatccaagaatgccatgttcaaactgttgggagataaattctgccatttgcatgaggaatttgtacggcagggtaattattccttttctcttccctctgatttgcaggaacagtttattgaatatctcagtcgtgtgaatgaggaatgttgtgacgaagtgaataacaagatgcaaggagtagtcagacggatgggactaattgcttatcgtataatgatggtgttgaccgctgtccgacatctggataatgtgattcacaaatcttcttctgacgagactatacaattggtttgccatgagtttgactattccatagccatgagtatttgcgacaccctgctttatcatgccgtattcatttatcagaatttgtcaggaaatcagtcaaaacgattcaataccgattcgcaagagacaggcgtttatgcacgaaggaacaccctttataatatgttgcctgacattttcacaaagaaagattgtgatgcggcggttttaactttaggcgagaatggaagtacggcaaacaagtggatagaagcctttattaaagatggcaagctatgccggatagagcaggggaaatataggaagattttttgagtggcaagtttgtgttttagtgtcactaaaacctatgccgcaagcgatagaactgccactctcaaaaaacaatttatcaatatcgagaatcaatatgagtataaaggaaaagaaacttggtggccgcccaaagttggcgagctatcagaaacgtaccaaatgttttcgggtaatgtttactgagaacgactacatttatatccaatccaaagcggaacaggcaggattgtctgtcaatgaattttgccatcaggcggcaatggattgtcaggtctgtcagcgtatcagtccggaaatggtatcggcaattcgtgacctttccggtatcgccaataacgtcaatcagattgcccaccagatgcacatctatggattggaaacagtcaaacaacagtgtttttc

SEQ ID NO: 5065 - DNA, 620 bp, Unknown
  gut microbiota DNA sequence
ttggaaagcggatgcaaaagtaaggcattaggagataagagacaaatataaaaggggatttttttgaaaatattttgaataaaaacgtaaagacctgagggagaggacggttctgataattgattatggaaaagggaaaggtcgggaaaggaaagggacacattattatattatataggggaaatttataggggagagggaaaaggggatttgccgagaaagggagaaggagaagtgtttgcgggaggaaattgaggagaaaatagagattttaacagggggtaaacagaaaatacgacgggattgtgacaaggattgaacgggaatcaaacggaagtcagataagagtcagatggtagtcaaacagggttaaactgaaaagtcggtaggaatcaggcgaggattggaccggaatcaaatggagagtgaacggaaattaaacgaaaatcagacggggagtgaatggaaattgagcagaaatcagccaaggatcaaataagaatcagacgggaattgaacgggaattgaacgggaattgaacggaatcctgcgttaacattgttaatgcggttggggaaacatttatttccaggacgaaaataacaaggcttctgcttcta

SEQ ID NO: 5066 - DNA, 892 bp, Unknown
  gut microbiota DNA sequence
tagaagcagaagccttgttattttcgtcctggaaataaatgtttccccaaccgcattaacaatgttaacgcaggattccgttcaattcccgtctgattcttatttgatccttggctgatttctgctcaatttccattcactccccgtctgattttcgtttaatttccgttcactctccatttgattccggtccaatcctcgcctgattcctaccgacttttcagtttaaccctgtttgactaccatctgactcttatctgacttccgtttgattcccgttcaatccttgtcacaatcccgtcgtattttctgtttacctcccgttaaattccctattttctcctcaatttcctcccgcaaacacttctccttctccctttctcggcaaatccccttttccctctctccgataaatttccccttatataatataataatgtgtccctttccttccccggccttttccttttccataatcaattatcagaaccctcctcttcctcagccctttacgtttttattcaattttttttcaaaaaaatccccttttatatttgtctcttatctcctaatgccttacttttgcatccgctttccaagagacggatagcatttaattttgacatgttgcaacggcgtaggacctgccttacagaataacaaaaataatttcctttttatttggatcattattataaaagttgttatctttgcagtccgattcgcagagcgagggtctttgtccgacacttctttccctttcgcacagagaggcttggaaataaaagacgggcattgagaaaaaaaacttcccaaaacatttggcagtttaaaataaaccccttacctttgcacccgcttttgaaacgaagcagaatttaaaaaaaagaag

SEQ ID NO: 5067 - DNA, 5308 bp, Unknown
  gut microbiota DNA sequence
aacccgcttacgccacccttaatgttagcatcgtagttcatttgaagagtagcacttcctctattatgacagatacaacagttactcccccctaaaaggcgatttaattctctttcactaagttcaactttattaagctgccccagtttgatttcacttaactttctcatgattagataaaattaattgtaaatactaatattgataaactctcaagccataaaaatggccttataatgttctgccatctccgaaaaattgtacttctccttcagaatacgacgtgcactattctttgtttttctttgttctgccgaattactcaataactttaaggtgcaatccaccaaattctgtacaaactcctttggatttctcctgttcccaataggagcaacgtaagcattcaacccatctggaaacatacgcttcacccccaaaccatcggatgcaattatcggaagtccatagctcatcatctccagacctacatagcagcattgctctgcatatgaaggtattaccccaatgtcagccatccgataccaataggatagaagttccttgtccagtctcccggtcaatgtcactttcgatacagccttgcctgctgctgctaatagatccggcgcattacacagatctccaataacaactaaacggcaattagaatcatatttcaagacattcttgaaagcctccaaataagcaaacatccccttagacttacagatacgccctaccattacgattaacttttcatcaggattcaaataatatttttgtttccattttcgcttcgtcatttctgaaaaagactttcttatcgttctcataccatgagagattaatgcaattttttctttaggaacctgataacattcgtacaagatatcataggtatcttctgacaggcaaaccacccggtcagccatttgacattgttctgcttcacgtcgatataattctattatcccctcataacagaaagaaatcttttctttcgtcttagatatcaatttcctgaataatgtaacatcacccagcaatggagtagtccaactaaattcatgtataacacaaatttgtttcgacagtgaaaaatagttgcgtgtcatgcgcatcaacttatcacagggaacatagttaaatagaaaaaaagtattatctgaatcaggaatatattgtttcagcaatgaacaaatctcttcacattcttcgaagggattgacacaaaatgttttagggaatagaaaatattctaactctccacgcatacagatactaaattcctctacattagtgcgaaacataatcatgcagatatgcgtatctttccattgcgtagcacattgtgcaaaatccttcaagaaggtccccactccacttccggatgatatagaataatcatcgtatatgcacaccgtcttcataactcttgctctaaaagtttaaaacaatgaaactctaatgatttcctacactctgaatattgagctatttgttgtagttgtgaatccatatctttattagatttgtttgcaaggtatgcccaccttacttcatatccaaatattatcagaaaagatgtaccgaacgtagcctttttttataccgaacgtcatatacctatagaaataatccttataaacagaaatatatctaaaaaacagatatatttgcctctgacaaataatcctttttaaccacacaagcatgaaaaacacaataccaatcttctttgcaatcaatgaagaatacattgaccattgctgtacctctatagtatctattcttgagaataatagatatttgaatataagcatatacattctgacagattatatttcgttagaaagcaaagagctccttcaggaaatagaaaatgtatttacctgtgtaactatccaatgggagataatagattcagaatcattcaagcaactcaagaaaaaaggaggatacatcaccgaacacactctttatcgttatgccatcgcagatctttttcccaatctggataaagccctatacctggatgcagatttagtaatcaatggcagcatagagccattgtgggaactggatttggaaggttattattgtgcaggagtggatgatatctttataagacgaatcaattatagaaagatactggaactagcggaaaaggatgtatacatcaatgcaggcgtactactgttgaatctgaaagaccttagaaaagataaaatacaggaaaagctattgcaacacacatcaatttatataaaccgggatcgatatcaggatcaagatgcaattaattgtatatgtaaaggcaaaataaagctaattcccaatatctataatttcactaccagtgaaactttgcatacccctgaaatgttatccgacatcatcatcattcattataccggaagtataaagccatggcatcaagagtacacttggcaagttttaaaagagctatattgcaaatacaatagctctatgaacaaaatcaaaaatcgacttttatcaaggtggatggaacgaacgattgagctttttcaattaagccaaaaaacgaacgatacagaattagaagaggaggcagataaattactgaacaagataatagaccactgctctctggctgttcctatcacttacgagaatgggttatgtggcattggaacgggaattgaatatttactgcaaaagaaactggtcgaaggcaatagtgatgaaatactacatcaaatagactccgctgtatattcagtcattgaacaaaagtctttgactgacctcggattaggaaaaggagtttcgggcttagcttactatttctattcacgtctatgtacaagagaaaacttcaacactcccacagccttaaaaataaaagaatatctcttccacctgataaattggatagcagagttgcttccggatacaaataatcggcctgtattatgcgaagtttatctggttcttagcctgttacacgaactaaacatccctcaagcaccaatagagacattaatgcgcaatagcctgtcccaaataacaggctattagttccgcagctactaatacttatataaaaatcagaaatctatcagtgtcaggccatattcattatttcagcttcactacaatcaacgcaggattcaattcttcttttaaaggttgagttctgacagaaatcaaataattgccatcttgggaaatatactccgggaaaaaagtatcaccctccagataaggaggaagcttacctgtaggttcaccaaaataatccatctctttttttgataattttagttcgaaaagatccgcctgatgatttgccttatcatagaatgcagttaagtaatattgcttcttctgatctatgtctactgtaatagcccctaagactaatccattagcagtcatactgaacaaaggaacgtatggcatgtgcaaaaacaattcttcgtccggattttccaaagagtagcgcaatctatcgttagatctcaactttccccagtcgattatatattcaggagaaagagagtgctttaccgtatccacagagaaaatagtgtcattaagcaactgcttaaagtacaatttatcatgtaaagatgaaaattgggcttcatgagggaagaaacaaactttttttgcctgatagttttgttgatatggaatagcccccctcttttcatcccgtcgatagaacacaagacgttctttttcatctcctccactctgagctttaaagcctataaagttcttgtccgacattggataaatggcagaaaacatgtccggaagtgcctgataggattcaataaacttcccatttaaggagtaaacattaactttattatttaagtctgtaatcaaaacacgattgtttatataaagcaaattcatcaacattgtatattcctccggaccacttcctttctgagctatatcacaaacaaattttccggaatgagaaaaaagagagcacttcttaccatatcctatgataaaatactgatcggtcattattaactggctcacgtatggaatcagtaacgaatcattcgtctctaattgcacgacctctacactttccgcaacatcatatacagatttctccaccggattctcgatagcatcggctaagtctattacaggataaagactattttctttcttactacacgagtaaaagagaaatgtacttaaacaaaaaaataaaagtgatttcataatatcgataactttaaatgattaatgtgatatagaaccgaacaatcggacaatcagatggcacctgagctaacaaatcaatcttctctgaatgaaaagaagagcaaccgatcagatgcaccaatatacccaaatacaaggccaatcgaactttattcataccaatttatatttaaaacaacaatccaacattctagatttcgataaacagacaaatctattttttcaaatgagctattataagaaccggattatcatcttctcgcacgcgctgcatcaagttcagtatttgcggagccacagcccgtccggcagactgttcctcttctataaattctttcaacttataaggccatacagtggctaaaagcttttcattacacgctccccaagaaggagagaaggtcttcattccacccagatcatctacaaactgcttcacggcaaatgtctcacccgtacgtttattgtaaatggctgttaatggaggagcctcaggcagtttacgcagctccctgaatggcatgcattcatatacagataaaaaaacaaaacgctctgtttcaaaaacaccggatactatatatttatgatccagcagtttaatcatttttgcgttttccaaattacccgattcccaacatttaaaagcttcagacaacaatccatcttcatatagataccgggtaggaaaccgtaattcttcatctaactccaccacccagcgaggcatcagggaagtgggggtaacagtaaaaactgtatccgtataaaaattataaaataaggtcgtatctttatagtaactcgtgtacttaaaacgaggatctccgccactcatggacggaacgccccctttcctgccccacggcatcatactgcgtttggctacaaactcgtaatccgtatttatgaaataaaccgtatccggagaattataaaacatcaggttttctcctgccggagcaaagcaaacctgattgaccaaatgtccaaccggtgcagtgtccattgttttctgggtaaaccagctaagctctttccccgtacacttcccccggtcatc

SEQ ID NO: 5068 - DNA, 1108 bp, Unknown
  gut microbiota DNA sequence
tcggattatcatcttctcgcacgtgctgcatcaagttcactatttgcggagccacagcccgtccggcagactgttcctcttctataaattctttcaacttataaggccatacggtggctaaaagcttttcattacacgctccccaagaaggaaagaaggtcttcataccacccagatcatctataatctgtttcaccgcaaatgtctcacccgtacgtttattgtaaatggctgttaatagaggaggcttaggcagtttacgcagctcccagtatgccatatattcatagacagataaaaaaacaaaatgctctgtttcaaaaacaccggatactatatatttgtgatccagcattttaatcatttttgcattttccaagttgcccgattcccaacatttaaaagcatcagaaaataatccatcttcatatagatactgggtaggaaaccgtaattcttcatccaactccaccacccagcgaggtatcagggaagtgggggtaacagtaaaaactgtatccgtataaaaattataaaataaggtcgtatctttatagtagctcgtatacttcacactccccatggacggagcgatccctttcctgttccacggcatcatactgcgtttggctacaaactcgtaatctgtatttatgaaataaaccgtatccggagaattataaaacatcaggttttctcctgccggagcaaagcagacctgattgaccaaatgtccaaccggtgcagtgtccattgttttctgggtaaaccagctaagctctttccccgtacacttcccccggtcatcatattctattattttagaggcattcccatagaaatgattattcaaatatactatttcggccacatgcgcatagatatcttcacaagccccttgaccctggctcccaatacggaacaagaactgcccattccaatcaaaacaatagtttaagtaaaatatgtattggggagaaaaggtcaaacgctgataattacctaacatacaattaggattcgtttccaaaggaatataactgacactatccaccagctccgaaagcatcatttcctctcgaacattctttatcgcagttgacaaatg

SEQ ID NO: 5069 - DNA, 28083 bp, Unknown
  gut microbiota DNA sequence
gagtaaaatatgtattggggagaaaaggtcaaacgctgataattgcctaacatacaattcggattcgtttccaaaggaatataactgacactatccaccagctccgaaagcatcatttcctctcgaacattctttatcgcagttgacaaatgaataatattatcccgaacaacaggattaggatccactgtttttttgttactacaagccgtgaagcccaataccataacacccagtatcaatatcattcgcataaaaaattccatatccacctattctttaaattagcaattacaagaaccggattttgctcctcatccagtgaatcggtaagcataaccaaacgctcactcacaattcctcccttttctttcttctcttgaatatattccttcaactcaaacggccaaaccgaagaaaaaaaactttagattcaaaataataattcttctattttaaagttgcaatcatcaaaatcggattgctatcctcagtcgcactttccaaaactcggattagctcctttttcttggattcatctattacagtagatgattttatttggtctatatcaatccagttttcatcaccgccaggttctaatatatctatccagtatttaccggaagaacggctgtcaacagtaaaatcacctccacctaaatcattatctaacacaaaatcacgtttcatttggcgcaaaggaaagctgaaccagggcacatcacgctcggttattgtgctttgtcgtttctgcaatctaacacttccatcttttttattatagcaataggtatatacctcctcgcctttactaccaatcagataaacaaaatccttagtcgggtaataagaaaaaatggaaaaataatcgaaagcctttctgtctttaaaccataaatgagtagcttcataatcccctttttcttcatctgtaaagattgcatattgaggcaaaagttggtttgtcgcatcatcataacaataaatagtatcagtatccggatatttaagggtcaattgaccattgtaaatatctacactggttagatactccatccaataattaaccatccgatccatattggcacggttagctataatctgctcttctttacccacatgaaccggatttttaaatagtctctttttctgaaagttatcgtccaaagaaacaaaagaccacaatgaatctttatccacagatctatataaaccaaaattctggatagcaaaaaatttatggtcatttaagatatattgcttatatatagacgaaaacattccaaccatagtttggaaatctgaaatttgctttttaaacccaccttcaaaatcatatactaaaacaccgttattagtggaaaaaatatatacttcttttttatcttcatcgacaagaaaagttaaataattgacatattctcccggcccttggcctatactccctattctattcagaaattttcccgtacgggaaaaacgataaatgtagaattcgcgtccatgatctatccatatattatgatcagttacttgcatttccgtaatatcactcaatacagattcatctgtcatttccaaaggaacaatttccaatttctccgccgcctcactcaaaagaagtgaaggtacagtcgatacattctcagaaagattaatcacaggtactcctgacctggatataggctcttgcttcttattggaactgcaccccaatagcgtaattattagtaataataatatagacttcatcacaatttatttattagaaacaacatatttttccatcataggaacctactctattattttaaagttgcaatcatcaaaaccggattgctatcctcagtcgcactttccaaaacctgaattagctcctttttcttggattcatctattacagtagatgattttatttgattcaaatcaaccctatttccatcattgccaagatataatacatctacccagtatttaccagaagagcgaaaatctataataaaatcgccgccacatagatcattgcttaggacaaacggacattccattcgacggaaaggaatactaaaccaagacacatcacgctcggttatctctccttgttgtttttgcaaccttacattcttttcttgtttattgtaacaatatatatatacctcctctcctttactgcctaccaaataaatattttctttagtagagtagtaagagtgtatcgaaaaataatcaaaagctttcctgtcacgaaaccataaatgtgtatattcgtaatctcctttttcttcgtctacaaaaattgcatactgaggcactaattcctctttaatactgtcatagctataaattgtatcagtgtcaggaaacttaagagttagttgattattatatgtatcgatgttagtagaagattccagccaataattaaacatataattcatctggacacgattctttataatttgatcttctttacctatatgtactgggtttttaaatatcttttttttcttgtaagaactatcaaccaaggcaagagaccataacgaatctttaggtatttctcggtataaaggtaaattttgaagaataaaaaagtgattattgtatatcataaattgattaaaaatagaaccgaacatagtttctactattgttctggtaggctgcctcttgaaattaccatcaaaatcatatacgaaaatgcctcttgatgcagatacaatatagatttctctatgtttctcatctataaaaaaatcagataattgaataaattcaccaggcccttgacctatttttccgactttattcagaaattttccggaacgggaaaaacggcaaatacatttatctttataatggtgtacccatatatcgttctcggttatttgaagatgatagatttcccccaatagagattcatccgtcacttctaacggtactatatcgacctttgaggcagcctcactcaaaagaagtgaaggtacaatcgatacatcctcagaaagattaatgacaggtattcctgacttggatataggttcttgcttcttattggaactgcatcccaataatacaaatacaccgattagcaataaggacatgtgtttcatagccacaattgaattaagatttattgtttgtgcataaggtccccactatccaatattagagacgagaatctccctgcaaatgttttcacggctacaatatactacattttcgtagtatataatctttttttgcagtttttttctcctatacatcttttatgacctaaacctaaatagtatcattttgtaccataaaatatttcttaactgtagccagcttacgagtgctaatcctataaattttattattatccatctttatatgatatgccccgtcctgaagtacacaatctacaatacgctctttatttactataattcctctatttatcagcagaaaatcggcaggcaatttttccagaatcacacgtaggcttattaaaaacagaatactgttcctacctcctatttgtaatatacagtaaggcttgctatattccacagcaattaaatcctgatacaaacattctccataagatttcttatatgaaaacgttatcttatcttctctaaactctattttatccatggctaacagatttgaattacatcactcaaaaagggacctccctccttggttcaaagttaaatcatgttgaaccaattcgcaaattatctacccggacaaattcatgaaaaataatgcgatataaaccactgtatataaacacaatagacataaagcgcacgattttaaccctaaatacccggacagttacaagtttgtaatacaagtcaattttaccattatacctacttttgccctctatatcccccaatataacgccaacagttcttccaaaaaccttcttatggtccactcctataaaagacaatatttagtctataccttcttttgaattttataaaaaaacatttgttcttttactccaatattaccactataggattgtcttcttctttacttcccgttttctttttcacttcatcacacaactcatcaggttgcagcagagctataaaacagccatcagaacttactcccctaactctgagagattgtctattaactgtatccaacagtctatctccgcacatcaacacaactctatgatcagctttataatatagtccacaaaaagcctgcctatttttagtatagaaccctgtatgaaaatgaaaataaatacatctctcattttccaaagcataatcaatcatgattttcttttcacatccaccttcttccaaccgatcttgatattgccaagcccaatcccctagctcgaaaattaaataaggtttaattttactatccgacagcgtatagatcgtatcgttgaatgtttgttttaatctaatatcattctcaaaccgccataaggaaggactattaatggctgtgtaaaactttccaccattggcaaatgaagccattgtcaaatcaccgccataagatacataatcccctaaaagttccgatacagattgcaaatcatccataggaagtaaatctaccggtaaacctactatatctgtaatgtgattagagttttcgtctatacaaaacaagggtgacgtccgattggaaatataaagtttattatgtccccatagtttaccataagtaacatatagatagctttgctgcaaattatagcgtacattatcatctatacaaattctatctttataattaccagctaaatcatacaatattaaatcattaccccaacctaaaacatatattatgttttggtcataatcaacccaatagttcacttttccccaagcatctttagcatatccctgcgggtctgttccgacatgacctatatcccgaataaatttaccggtagatcgatcaaaaagtttcaggcattgatttacggaagatacaagtatggcatgctctaacacccgcatatccggcatttctcccacaaggctactatcatttgtttccaatgctacatatctcacattagaagatattgtctgtgccgttatctttcccaaagcattcattgctgcacccacatttatcttattatccggctcaacattttgcatacatgaatacaaaacacatataaaaattacatacaaaactttcatacagaattcattttaagatgtcattattatatcacaacctttgatctgtattatacagatcaaattcagcagaccacataaagtacaatgacgaaataaacagtttcataccctatgaaattaaattaattaacgggaacgcctccaagcagtcctttccacaactactattctctatattgcagtccataaaagcacatattgttttcaccgattttatcacctcccgtatacggcaacaagatcaaagaatctgtaaaagccaaatcgggatagatagatgcaccggcaggaatcacatactctgcactattcaaaaaatcaggtgatatacacatgacggaaaagggctttcctcccactccatgaccatctaaaggcccctgttgaatacgccagaacacattatgataggcatcgtaacacaatgggaaataataaccggttttgaggcatccgaaaccgggctccgacccatttatatccggtaaatggaaaaaaggatctgtaaaggtagaaggaaaatcatattctttactcttttttgcagacagatcgtaaacataaactttggaagacgcagggaaattataaatcaaccggtcaccgtagggaagcacgttgacacaacccagtaattgcatatctccctctttccttatcacatcaggacaatgtatctccacttcatcccgtatattccaatcgtcacacgaaacaatcagcactttcttcggatattctcccgtagtatctttctcataaaagtagaggggtaaagccactcttccattcgcagcatcaaatccgaagaagctatacacgctaaagtaaacagtaagatcgggaacggctattccatacccttcttccttaatctgcggaaaatcattgagaagtttcttagacaccacttttccatcctgaccaacccgatacaaaccaccggtattcagtatgataaacgaatctttataatagccgatccctttgggagcaagtatctgatccggaccatccttagccagagctatttgctttaatggccggcgatcagccagattcaggatgtcaatggaatgaagttttccattataaacaatcagacactctttaccatcgatccgggctgaagtagaatagcaaaaagtaccggcatagctttgtaaataatcatcattaacatcaaatgcaaaagcttctattctctgaagttctgttttcacctgcgtttttttctctccacaagcaataagacccagaatcagcatcaaggtccatacattaacaaaaaaggtgttctgtttcatattagtcgttttagtcgttttgcaacaaagctttgggttcatgagcaacgtatcaatcccctaaggcatcaagtaaaaacatatattccgcttcattcttctgcctgtttatcaaaaaataaggcttaaaattatttctccaaaaataaggattgcatttaataaaagcaaacttttcagcgagaaacaatacacatatttatttgcgaatcaataaaatacgagcatatcgtaatttagtgttgataatcagacgggtattaaacaaaccatagagacgaccacacactcaatagacaaagctcgaccaaagaaatagagaaacgtaaggaaacagagtgtttctatgacaaatagttgcaatataccgttcccagctaaccgatcattggtagaagcggcaagaaatagaaatgaaaatgaataaaaaaagcaatgatatacaacaaaagcgaataaatccagagaaatggcataatcatgcaagcaggatatgaataaacagaatatggtaagttaacttcatgaaaggagtaagttaacttcctgtcggtagaaaactaattctttgccaacaggatgttaacttactaaaaacggaggataaatcagtgacccaattggggaagaaagaggctggttgcatactgaaaaagaaaaaccaccgatagaagaaagaaagcaaacagcaagcacaggagacaagtagacagacagatcaaggaatatcatatccaaacatccgccaatcagcaaaacagctacaatatagacaaacacagaagccaaatgcagcgcattttttgcgctgcatgaatcttcatccgaatttatccggttacagacagagcttaccggacaaattgtaaatttgacaaaatgaaattaactcgtcatttaggagggaaatcgactacaataacgaatttacttctgaccggtattttcttatctgtcattccgggtaaaagtttagcctgccggatcagccttaaggcttcttcatccaactctttcagcccacaagttccctcgctcttattcttcatagccccgctctgaggatcgagatcccatccataactgatgcctatacctgtaattgttccgtctttttctgcgatgccacgcacaaggacgcgcttgccctttttcggatcccaatctttatatttattatgagtacggaaataatcaatggcatcaggaagtatagctgaatatggagatacactccacactgtatccgcctccgatgctacttcggactgaacggcagtctttaccggttcctcttttgccggttgttgttcctgctccgttattttctgaaccggattagcagaaagtatcagactttctccttttgacttaagcttaccgaccagaatatagttattatcgtcaacggaaatcgaattctttaattttgtaagtcgatctgattcttctttagaaaaacgttcgggtctagcaaggactttttccaattcatcaatcaaatctcccggatcgagattcatcagaaaacgtccgtcctgaaaacagtcgtacggatactcgaccggaatacccccaagttcatcaatcaccaatgtacaataggtccctttcaggctatgcttatctatcaaaacattcattggaggcataccctgcccattaacaacctctgttatgatgttgacccaataatgtccgggaaactccgtatacgtatgcttgggaatatcctgagtcccgaaattggcggtaaaaacaggaaccaaacgattctctttcgcatcatagtgatacaaggaatcttgtacggcagaccaattaaagatgaagaagtcaaaagaaccggcattccggttactgctcacttcattgctgtaatcatcataagtataataaggagtcgaactgatggattgaaacacatttcctttgagatcttgttgccaaagcacaaacttattttctaaatcctggaaaggcaagatgcccatagtcaatagattctttttcgtatctacccggaacactcctttaggaactcgggccggcaaaggtatcggaggaagtatatttccatccaagtcaaaaaccaatagttgatttgaagtccacggaagcatataaatccgattattcacttcatcgatctgagcatcataaatattggtatactcaccgggaccttgcccaagcccgccaatttgacgcaggaaagtcccattcttatcaaataacttacaaggcattaaataacttcccaaaagcatgtaccggtcagagaccgccatatatccggacttgactaatgccgtatcccgggtttcaagcttgataatctccaggtcgtctaccaactggctgagccgtatctgcatggtatcttttatcaacccgacgtccaataccactatactgtcagtaccggcctgtttccaggtcgctaccaaaggacaatcatccaaagatttctcatctgatgtttttattcccgaacaagaagcatgcaaaagaagtactccgcaaaataaaagagaatgaagtgatttcatagtttgtgtattaataaataaatcaatggcaaaggtagagaaagaaaaaggaaaagaagaaaaaggaagcggacattacagtagtcatttcccattctttatcaacactttatattatcaaacatacaatactggcggacatatcacctgaaactgcttctttttcgttatttttgcctgcacaaaaacaaatagaatgatggaacatccacttaatcaatttaaatactgtccgaaatgcggttctgccgcttttgagattcacaacgagaagtctaaacaatgtaccgattgcgggttcgtttattatttcaacccgtcatcggctacagtggcactgatcttaaacgaaaaagacgagttactggtatgccgccgtgccaaagagccggcgaaagggacgctggaccttccgggtggcttcatcgacatgaacgaaacgggtgaagaaggagtaagccgggaagtagaagaggagaccggactaaaagtgaaaaaggcaacctacctgttttcccttccgaacatttatatctattccgggtttcctgtacatacgctcgacatgtttttcctttgccaagtggaagatacaagtcactttgaagcaatggatgatgtggcggactcgtttttcgtcccattgtgccaaattaatcccgaagagttcgggctgggctctatcaaaaaagggttaaaaagattcctgaaagagaggtaaaatacataaaaacaagtacttttgtcaaaactctgaattatgaaaaaaaagatatcacgattgatatgtgccgtggcatgttgtgtgcctgtcgccttgcaggcacaaaccagcgagaaaataacgtctcccgtaaatctgtataaagaagggaaagagttgttcctgcaaaagaactatgcagccgcaatgcctcccctgcgcacatttgtccgccagaaagcggacgtgaacctgaaagaagaggctgaatacatgttggtatgttcggcgtatgaattgaaagaccgtaatgccatcgcgcaactacgcaactatctggacacctatccggatactcctcacgcaaaccgtatttatgcactgattgcctctgcttatttttatcagggcaactatgatgaagctctcgccttgttcaactcttcccgccttgatttgctgggcaacgaggaacgggatgacatgacctatcagttggctacctgctacctgaaagtcggcaatgtcaaagaggccgccatctggttcgaaaccctgaaagcaagcagtcccaaatatgcgaatgactgttcttactatatctcatacatacgttatacgcaaaaacggtatgaagaagcactgaaaggctttctccccctgcaggatgacgcaaaatacaaggcattggtgccctattatatcgccgagatttacgccgtcaaaaagaattatgacaaggcacagatcgtagcacaaaattatctgtctgcctatccgcaaaacgaacacgccgcggaaatgtatcggattctgggagatgcctattatcattttggagattatcacaaggcggtcgcctctttccggaattatctggaaaaggaaaatactccacgaagagacgcactttatatgctgggactgtcttactttcagaccggcgtattttccaaagctgccgaaacactcggagaggtcactaccgagagcgatgcactcactcaaaacgcatacctgcacatgggactcgcctatctgcatctggctgaaaaaaacaaagcccgcatggcattcgagcaggctgccgcctcgaacgcaaacctgaaaattaaagaacaggccgcctacaactatgcattgtgcatccacgaaacatcttattcggctttcggcgagtcggtaactgtttttgaaaaattcctcaatgaattcccgaactcagaatatgcggagatggtaagtagctatctggtagaagtgtatatgaacacacggagctatgaggcggccctgaagtcaatcgaccgcatcgcacatcccggtaaacgcattctggaagcaaagcaacgtatcttattccaactgggcacacaagcattcgccaatacacaattcgaacaagccatcggttatttcgaccgctcgctcggactcggacaatacaaccgccagaccaaagccgacgccctctactggagaggcgaagcttattaccgcttgaaccgtatggaggaagctaaacggaacttcaccgattatctgcaattgacccagcagacccataacgagatgtatgccctggcacattataacttaggctatattgcatttcaccagaaagactatacacaggcacaaaactggttccggaaatatatcagcctggaaaaaggggaaaacaaaacggcactggccgatgcttataaccgcatcggagactgttatctggatgtgcgcaactttgacgaagccaaacattattactcacaggcagaagcgatgaatactccttcgggagactattcattctatcaactcgcacttgtatcgggcctgcaaaaagattattcaggcaaaatcactttgttgaatcgcctggcaggtaaatatcccgcttccccctatgccatcagcgccctgtacgaaaaaggccgttcttatgtattgatggacaacaatcaacaggccatcgcttcgttcaaggaactattggctaaatatcccgaaagtcctgtcagccgcaaagcagcggcagagatcggattgctctattaccaaaacgaggactacgaccaggccattaacgcttacaagcaagtcgtacaaaaatatccgggaagcgacgaagcgcgtctggccatgcgtgacctgaagtcgatctatgtggatatgaaccgtatcgatgaatttgcggcgctggcttcggctatgccgggcaacatccgcttcgatgcgagcgagcaggactcactgacttatatggcagctgagaagatttacatccggggacgagtggagcaggccaaagagagcttcggaaagtacctgcaaactttcccggatggagcattcggactgaacgcacactattatctctgcctgataggcaaagaacaaaagaactacgacatgattctggaacattcgggcaagttgcttgagtatccggacaatcctttctcggaagaggcattgattatgcgtgcggaagtacaattcaataaagtacagtttgccgatgcactggcaagctacaaaatgctgaaagaaaaagcaactaccgccgaacgcagactgctggccgaaaccggtatgctccgtgcggcttatctgctaaaagacgatacggaaaccattcatgcggcaactgccttattatcggaagccaaactaagcccggaacttaagaacgaagccctgtattaccgtgccaaagcttatctgaatcagaaagcagacaaagccgccatgggcgacttgaaagaactggccaaggatacacgtaacctatacggtgcagaagcaaaattcctggtagcccaggaactgtataactcacagaactatgccgctgccgagaaagagttgctgaacttcatcgatcaaagcacaccgcatgcctactggctggcgcgtggcttcatcctcctgtccgatgtatatgtggctatggataaaaagttggatgcccgccagtatctgctgagcctgcaacaaaactaccatgctgacgatgacattgagagtatgattgaaagcagactgaacaaccttaataagtaacagagtatgaaatataataattatatccttttaggaattgcttttactgcactgcccgtttcgatacaggctcagacgcagcccaaagatacgactgtaaaccgcaccgtaatagtggagcagcaatataatccggacataatggatgctgccaaggtaaatgtcctccccaaagttgaagagccctccgtaagcaaaaaggaggtggaatacgctacattcacaactcccgccacttcgattccggcagggactataggcgcttacaccggcaaagagatacaaccgggattcatcccgggttatgttcgcctgggatatggcaactacggtaacctggacgttttagccaattatctgttccgtctctcggacagggacaaactgaacgtgaacttcaaaatggacggaatggacggtacgctggatatgcccttcggtgatacccgaaaatggaacgctttctattaccgtacacgggccaatgtagactatgtacaccagtttgcaaaactggatttgaacgtagccggtaatttcggcctgagcaatttcaattatgaaccttacggattcaaaaagcagaaattcacctccggtgacgtacacttcggagtaaaatcaacagacgaaaccctgcccttgcaataccgggcggaaaccaatctgatgctatacggacggcagcaatgtcaactcttcggaggggtaaacgaaacaatggtacgtactctggcaaccgtaagcggttcagtcagtgacgagcagacagtagctatcggatttgccatgaacaacctgatctacgggaacgaactgaaagaaaataaagaccggataaaggatattttcaaaaatcgtacaacacttgatctgaatccttactacgaattgaataatgacagttggagagtacatgtaggcgccaacgtagacctctctttcggaaacgggaaagctgtccgcgtgtctccggacgtgaaagcccaatatgtattctcggacagttacgtactatatgccaaagcaacaggaggcagacaattaaatgacttccgccggctggaaacttataatccgtacctcgatccgggacaggaggtaaaagacacttatgaacaactgaatgccggactgggattcaaagccagtccgacacccggactttggttcgacatcttcggcggataccaaaatctgaaagatgatttataccaatcggcagacgcctgggagggtggagacggagcaaactacattggtttgggacagacccatacagataacttttacgcaggtatcaaagccagctatgagtacaaagacttatttgctatttcagcaggcggaacttattatcattggaatgcggacgctcaaacaaccggttcaaaatcctccgattataatgaagcgttactgatgaaaccggagtttgacctcggaattcacacggaaattcatccgatagccgcgctttggctaaacgcaggctaccaatatacccgcagggccgaacgttataccggactttacgcgaaaagtattcctgccgtcagcaacctgagcttgggagccacctacagaatctttaaaggaatttcggcatatgtaaaggctgacaatctgctgaataagaaatatcagtactacttatactatccggttgaaggaatcaattttgtggggggactgagcttccagttttaaaagatcctcaaaaccagatccggttatttagtaaaactcaggagttaaagaagtcatcggtctgaccggaggtaaaaaggccgaagtgaattattaccgggaatttacttccgattaaaggctttcactcctctaactcctgagtacaaaaaatttaaaagattcttataaaaaaggtctttttttgcaaaaaaaatcagattctctctatattataaggtaaagaaaacgtttttttctacttttgcgggcaatttatatgttttaatatcacagatatgcagaaaaaccttgtcattgtcgaatctccagcaaaagcaaaaacgattgaaaagtttcttgggaaagattttaaagtcctctcaagttacggacatattcgcgacctgaagaaaaaagaattttctatcgatatagaaaagaatttcaaacccaaatacgaaatacccgcagagaaacaagagctggttaataaactgaaagaagaagcaagcaaagcagaaaccgtatggctcgcatccgatgaggaccgggagggagaagccatttcatggcacctttacgaagtcctgaaattaaaacctgaaaatacgaaacgtatcgtttttcacgaaatcaccaaaacagctatactgaaggctatcgaacagccacgcgacattgacatcaacctggtgaatgctcagcaggcacgccgtatcttagaccgtatcgtgggtttcgaactttcacctgttttgtggaaaaaggtaaaacctgcactttctgccggtcgggtacaatcggttgccgtacgtctgatcgtagaacgcgaacgtgagatacaggctttcaagagcgaagcttcttatcgtgtcacagctgttttcctcgtaccggatgctgacggcaagctggtagagatgaaagcagaactggcacgccgcctgaagacaaagaaggaagcccaaaaattccttgaatcatgcaaggcagccacattctctatcgaagatatcgtaacccgcccggtaaagaaaagcccggcagccccatttaccacctcaaccctacaacaggaagctgcccgcaaactcggcttcactgtagcgcaaaccatgatggttgcacagaagctttacgaatcgggattaatcacctatatgcgtaccgactcggtaaatctgtctgaatacgccacagagggaagcaaagttgccatcgcacagatgatgggcgaccaatatgtgcatccacgccatttcgctacgaagaccaaaggagctcaggaagcgcacgaagctatccgcccgacttacatggaaaaccagaccatcgaaggatcggctcaggaaagaaaactatacgacctggtttggaaacgtaccatagcctcacaaatggcagacgccgaactggaaaagacaacggcaaccatcggtatcagcaacggtaacgataaatttaccgctaccggagaggtgatcaaattcgatggttttctgcgtgtatacaaagaatcgtatgatgacgacaatgaacaagaagacgaaagccacctgctgccacccctgaagaaaggacaaatgctggaacatcagggaatcgtagctaccgaacgtttcacacaacgtccgtcacgctataccgaagccagcctggtgcgcaagctggaggaactgggaatcggacgtccgtcaacctacgcaccgaccatctctaccatccagcaacgcgaatatgtggagaagggggataaaccgggagaagagcgctcgttcgatatactgaccttgaaagataatcagattacggatatcaaacatacggaaattgtcggagcagagaaatcaaaactattgccaacggacatcggcactgtagtcaatgacttcctgaccgaatacttccccaatatcctggattataactttacggcaaacgttgaaaaacaattcgacgagatagctgaaggcgataagaaatggacaagcatcatgaaggatttctataaggacttccatccttcagtagaaacgacactggctaccaaaaccgaacacaaagtaggtgaacggattctgggagaggaacctaaaaccggaaagcccgtatcggtgaagatcggacgtttcggcccggtagtacagatcggtacggccgatgacacagacaagccacgctttgcacagatgaagaaaggacagtctatggagaccatcactctggaagaggcactggacttattcaaactgccgcgcaaagtcggagaatttgaagataaaaccgtaacaatcggtaccggacgcttcggaccttatgtatatcataattctaaatatgtgtctttgcccaaaacttatgacccgctggaggtcacactggacgaagctatcgagctaatcctggctaaacgtgaagcggaagcgaaaaagcacatcaagaagtttgatgaagatgcagaaatggaaatcctcaacggcagatacggaccatacatcgcttacaaaggaaataactacaaaatacccaaagacgtggtaccggtcgatctgaattaccagacctgcctggaaatcataaaactgcaaagcgaaaaagcagaaaacgctccgaaacgcggacgctacgctaagaaaaaatagccacattcgggcatcccgactgaaaagtacaaataatacagattatacttactttctctaaaaagtagataaggtctgtattgtttgtactttttttgtttttcaaactattattcagcaagttatcattttaattgtttatctttgtagaacaaacaaaacgaacagtctatgaagaaagtcattttagcagtcgcctccattgcattgtgggcttcttgtatcgaggatgagaaagattattctcagattatcgaaacacgtgtagcaaattgcgaaacatccaaagatttcagcgtacctgtcaaagaggggtataccacctttgtcacctccggagaagataccctggcaatggctaatgaacctatcaccatccgtatccccaaaaacgccacaatatcgactcgtgccgaaggagacggtatcaacatcagttatgatgttctaaaagaaggtgccgagaccacttacgccaaaacctggcaggcagtcatgtttgaagatacgcaaaacggtgattacgattacaacgacttaatcattcacgtgaaacatcagactgatctcccttgggctaaagaggaaagccttgaaacaatagagatacaacctattgcattgggaagtaccaagacgatcaaactgggatgtatcctatccgatggctcaacgcacatgatcagcgatgatgtcagaaccgatttattcggtggaagacagggattcatcaatacggtcaatgacaatgacccgatacgttacaaactggcttcaaccaatataaaaaactatgccatccccagaactgagaaaaaagcagcgtgggtagcctggttcattgaggtagacggaaaacggatgtacgctgccagctcagacatcgattacaaatcctacgatatggtaaataaggaaaatatgccttatggcctggccgtttcgaataataatggcatattcagctatccacaggaaaagaacagtctttttgagacgtatccgggctttagcgattggatcaacggtaaagtaagctccatcggcagtttccaaaaagaacttgtctacaaatattgctccggcggcattatcggcgaagacggtaaatcacataagatctgggattatctggatttaaactaacctgaaataaccggtcattattggcagtggcgatccatggcataaaaagtgcttggatcgccactgtctgttttatcccctaccttatggcaagactcccccgtaatacaacatacgggatctctttagcagttgtgtcccggctaaagaaaccccgtagtttctatttttgttcaaagaacttcttacattctatccggcacctcaatgcccagcaatcccatacctaaacggacaaccttggcaatattggcagacagagcaatacggaataacttcacgtcttcattttcttcacgcaagatactgaagtcatgatagaactgattgtactctttcaccaggtcgtaaacgtagttggcgatacccgacgggctataatcttcacctgcctggcgcactaccgcagcaaaatcggcaaccatctgaatcaatccctcttccttctcgctgagttcgatattggccggaagtacttccggaatcacgatacccgcttcggcggctttgcgcaacacagaccggatacgtgcatacgtatactggataaaaggtcctgtattaccgttaaagtcgatagactctttcggattgaaagtcatatttttacgggcatccactttcaggataaagtatttcagtgcacccaatccaacgatacgtgcaatatcgtccgcctcttcttgtgtcaagccgtccagtttgcccaattcctgagaggtttctttggctgtcgcaatcatttcggccatcaggtcatcagcatctaccaccgtaccttcacgtgacttcatcttgccttcaggcagttcgaccataccataagagaaatgcaccaggctcttgccccactcaaatccgagtttatccagcaagatagacaatacctggaagtgatagttttgctcgttacctaccacgtagatcattttgtcgatgggataatcggcaaaacgcagcttagccgtaccgatgtcctgagtcatgtataccgaagttccatcgccgcgaagcaacagtttgtgatccaatccttcggctgtcaggtcagcccagacagaaccgtcttccttcttgaagaagaaacctttctcaaggccttccatcactttctctttaccttccaggtatgtattggattcataatagattttatcgaaaccgactcccatcttacggtacgtttcatcaaaaccggcgtatacccagttattcatcatctgccaaagcgcacgcacttccggatcaccggcttcccatttcaccaacatctcacgcgcttcattcatcaacggggaggcagcttccgcctcttccttcgacatgcctttctccatcagttcagctacttcagctttgtaatgcttatcgaaagcgacataataatcacctaccagatgatcgccttttttgcctgatgattcgggagtttcacccttgccatacttttgccatgccagcatcgacttacagatatggataccgcgatcgttgacaatattggttttaaccaccttattgccgttcgccatgacgatattggccaacgcattacccaacaggttattacgaacgtggcccaagtgaaggggtttattggtgttgggagaagagtactcaatcatcaccagcggggcattttcatctgccgatacaatgccatattgcgcatcggcatgaatttcattaagcagttcgatccacgtagccgacgcaacggtcagattcaggaaacctttgatcacattaaaagctgccacagccggttcattggctttcagatactcaccgatttcctgtgcggtttgctccgggcccttcttcgacattttcaggaaggggaataccacaagggtgaggtgtccttcaaactcttttttcgtcttttgcagctgcacctgcgcggcaggtacatcctgtccgtaaagtgctttgagtccgctgattacggacgtcacaagtttatcttctatcttcatatccaagttattattctgcgcgcaaagatacaaaaaaaggagacgccaaagcgcctcctctcttaatttcttttcaactataaatgcttattttatagcatctgtcagctcagcacccggtttaaatttagcaactttctttgcaggaatctcaattgccttcttggtagaaggattgattcccattcttgctgatctttcagctacagagaatgtaccaaatccaaccaaggaaattttgtcaccagccgacaaagcttttgtaaccgaagaaaagaaagcttcaagcgctttcttagaatccactttactcaagccggattccgctgccattgcattaataagttcagccttattcataatacgtaaatgattaattaatatatgttacacaaaagatatccttaaaatcctcacaaatataaagtaacaaaacaatatatcaaataaaaacatcaaaaaaacacatcaaattgttgaaaaagaactaatagtagattatttttctgttgtagaacagaatttattcgtatttttgcgttcattatgatgcgcgaagaagctaatacgcacattatcacattaattacattaacaaataagaaggatgcctactgtaacaaaaaacctgataattatcaatgttctcctgttcctcgcacaatttgtagcacaaagctatgggatcaacttatccgactatctgggtctgcactttttccttgccgacaattttaatccggcacagctattcacttacatgtttatgcacgggggattcacccacatcttctttaatatgtttgcggtatggatgttcggacggattctcgaacaagtatggggcccgaaacgttttttattttattatatcctctgcggcgtgggcgcaggcttacttcaggaaggagtacaatacatacaatacgtgaccgaactgtcgcaatataccagtgtaaacatcggtacgggtatcatccctatgagtgaatacctgaacatgatgactacagtgggagcttcgggagccgtgtacgccatcttgctggctttcggaatgctgttccccaaccagcagttgttcatcttcccgctgcctttccctatcaaggcaaaattcttcgttatcggatatgccctgatagaactgtatgcaggttttgccaataatccgggcgacaacgtggcgcacttcgcgcatctcggaggaatgatattcggattcatcctgatcatgtactggagaaaaaagaacagaaacaatgggacatattataactgacctgaaagaagcgtttcgtagagggaacgtctatattcaactgatattcatcaacgttggggtatttgtcattacaacgctgatcggtatcttactgcagttgttcaaccggagtgccgccggtatcttcgagctgctggctttgccggcttcttttacccgatttgcatggcagccatggtctatcttcacctacatgttcatgcatgcgggatttctgcacatcctgttcaacatgctatggctctattggttcggggcactgtttctgtatttcttctcgggcaagcacctgagaggcctttatatagtaggaggaatctgcggcggactgctttatatgatttcttataatgttttcccgtatttccgtcccatgaccgcctactccaccatggtaggcgcatcggcttcggtgctggctatcgtcgtggcaacagcctaccgggagccgaactatcccgtacgccttctcttcttcggcaatgtacggttgaaatatctggccctgatcgtggtgctgaccgatctgctgttcatcacatcgagcaatgcgggcggacacatcgcccacctgggcggagcactggcaggactctggtttgcagcaagcctgaacaaagggaaagacatcacttcatgggtcaacaaggcgctcgatgctatcgccgccctgttcagcgccaaaacctggaagcggaaacccaagatgaaggtgcattacggaaacaatacccgtcagaacgactacgattacaacgcccgcaagaaggcacaatcggacgagatagaccggattctcgacaagctgaagaagtcgggatacgagagtctgacaacagaagaaaaaaagagcttgttcgacgcaagcaaaagatagcacatgaagcatataggcagattagccctattcttatgtctggctgtcaacgcattcttcatcggaatgttactgttgacagcttacagcccgtatatcaatcccgaagtgcatccggtgcagtcatgcctgggactgacttttcccatttttctcgtcatcaacttctgctttctgatcttttggctcatcgtgcgttaccgtttcgcactggtacccctactgggattcctcctttgctatccgcagttgcgcacctatatgcctgtcaacccgggaacggccggacaaccggaaaacagcatcaaactcctttcgtacaacatcatgtcctttgggaacatgaagaaagagaacggacaaaaccccatcctgaattatataaaaaacagcaacgccgacatcgtctgcatgcaggagtatgccggctccgaaaccgccaagatacatctcagcaataaagagatcaggcaggcattaaaggattatccgtatcacaacatcaagcaagtgggaaaaaccggagcaggcagtcaactggcctgttactcgaagtttccgattctatcggcacgcatgctcgactaccggagcaactacaacggcagcatggtttacgagatcaagataggaaaagacaccgtgctgctgataaacaatcaccttgagtcgaataaacttacccgagaagacaaagtggtgtatgaagacatgctgaaagatccgaaggcgggaaaagtgaaaagcggtgtacggcaactcgtcaataaactggcagaagcttcggccatccgctcggcacaggcgcgcaccatcgctcaggaaatagcccattcaccttatccgtcggtcatcgtttgcggcgactttaacgactccccgatttcgtatgcccaccgggtcatctcgcaagatatggacgatgcttttactgaatcgggatgcgggctgggcatctcatacaaccagaataaattctatttccggattgacaatattttggtcagtaaaaacctgaaagcgtccggatgcacggtggacaattccatcaaagactcagaccattatcccatctggtgctatattacgctccccgattaatcgcaaacgacaatccctttcagaagaatctgaatagcttcgcccgttacggctcttccccaaagcacgcaaaggaagaattgttcttttgttcatgattcatcagccttgcaagcaaaaagacaggaaaaagaccgatccgctaactcgtctttacaaaaagaatgcccaaccggaggccgaacaggaagaaaaccgggtcattgaagggtcaaagccggggattaagtaagaataagtccggattcgatactaaaagcctcttcgttttccgaaaaagaagtaagcattttcttcaaaagacggttacattttctaaaaacgcttacttctttgcactgacatctccatacgttttgaaaactacgtttactgctccggaaaacacgacttattccggctcttcatgctctaaccggttgctctccgaatcacctaccggagtatcaaaaagcctaaaattcccctccctgaagagcaccgggaatatttacttccagatcgctttctttctgacggaaaataaaaaccggacaaagcaaaacgataaaccgggaaacgaaatagagacgtttttccggcccctcctgtcccgagagtcgaaaaaaagaaaactgggaggtttcatttgacatattgccaaaaagacaaacgatacttccgccaatatctgtcgaagcgtcccaaaaatccccttcacattcaaatatttgcctcctaattacttctgaatgtaaaaaaaaactatatttgcagccttgtatgcgacagaaatcaattaaaatgtaatcataataaattaaaagtaaaatgcaaaacaaaggatttgtaaaggtttttgcggtattactcacgctggtatgcgtgttctacctctctttctccttcgtgactcgccattataccaataaggcaaaagagtttgcgaaaggcgacgtgaaggtagagcaggattacctcgactctctctccaacgagaaagtatggttgggtaactatacgctgaaacagtgtcgtgaaatggaaatcagtttaggtctggaccttaagggaggtatgaacgttatcctcgaagtgtctgtacccgatgttatcaaagcattggctgacaacaagcccgacgaagctttcaacaaagcactggccgaagctgccaaacaggcaaccaccagccaggacgacgtgatcacactgtttattaaagagtatcacaaagttgcaccgggtgccaaactctctgaactcttcgcgacacaacagctcaaagacaaagtaaaccagaaatcatcagacgccgaagttgaaaaggtgctgagagaagaagtaaaagctgccgtaacgaactcatacaacgtgcttcgtacacgtatcgaccgctttggtgtggttcagcccaacatccagagcctcgaagacaaaatgggacgtatcatggtggaacttccgggtatcaaagaacccgaacgtgtaagaaagctgcttcagggatcggctaacctcgaattctgggaaacatacaacgccaaggaagtagctccttacttgcaggctgccgactctaaactccgcgcagtcctggcacacgaagctaccgtcaacgatacagttgccgcagtagattcaaccgccttggctgcagcagaagctactcccgataaagcagtcagcgctgccgacagccttgctgccgcactgaaaggcggagaaaagaaacagcaggcttcttctgccgatctggaacaactgaagaaagagcatccgctactggctatcctgagtgtaaatccgaacggaggccctgtggtaggttatgcaaactataaagatacagcgactgtcaattcatacctcgctatgaaagaagtggctgccgagttgccgaaagatcttcgcctgaaatggggtgtttctccgttcgaatacgatccgaaaggacagacttttgaattgtatgccatcaaatcaaccgaacgtaacggtaaagcaccgctcgaaggtgacgttgtaaccgatgctaaagacgactatgaccaatacggcaaaccgtctgtaagcatgtcgatgaactctgacggcgcacgtcgctgggcattgctgaccaagcagaacatcaataagtccatcgccatcgtattggataattatgtatattccgctccgaacgtaagtaacgaaattacaggtggtaactcacagatcaccggccactttactccggaacaggcaaaggacttggctaacgtattgaagtccggtaagatgccggctcctgcacacatcgttcaggaagacatcgtcggtccgtcactgggtcaggaatctatcaatgcaggtatcttctcattcgttgtcgctctgatcctgttgatgatctatatgtgctctatgtacggattcatcccgggtatgattgccaacggcgctttggtactgaacttcttcttcacactgggtatcctttcatctttccaggctgcgctgaccatgtcaggtattgccggtatggtgttgtcactcggtatggcggtggatgcgaacgtgttgatctacgaacgtaccaaagaagagcttcgtagcggcaaaggcgtgaagaaagcattggcggacggttactcaaatgccttctctgctatcttcgactccaacttgacttctatcatcaccggtatcatcctgttctatttcggtacaggtccgatccgtggtttcgccacgactctgatcatcggtatcctctgttcattctttacagccgtgttcatgacccgtctggtttacgaacacttcatgagcaaagacaaactgctgaatctgacatttacttcacctatctctaagaagatgctggtaaatacacacttcgactttatgggtggcaacaagaaatggctgactatcacaggcgtgattttgctgatctgtatcggttcgctggtaacccgcggtttgagccagagtatcgacttcaccggtggacgtaacttcaaggttcagttcgaaaatccgatcgaaccggaacaggtacgtgagctgatctctaacaagttcggtgatgccaacgtaagcgttatctctatcggtaccgataagaagactgtacgtatcagtaccaactaccgtattcaggacgaaggtaacaatgtagactctgaaatcgaatcttacctgtacgaagcattgaaaccgatgctgactcagaacatcacactggctacattcatcgaccgcgataaccatacgggcggcagtatcatcagttcacagaaagtaggtccgagtatcgctgacgatatcaagacttcagccatctggtcggttgtattcgctctggttgctatcggtctttatatcctgatccgcttccgtaacatcgcttacagtgcgggttctgtagcagcactgaccagtgatacactgatgatcttaggtgcttattcactgtgctggggctggatgccgttctctctggagatcgaccagactttcatcggcgctatcctgactgctatcggttactcaatcaacgataaggtggtaatcttcgaccgtgtgcgtgaattcttcggcctgtatccgaaacgcaacgtaaaacagttgtttgatgactctctgaacacaactctggcacgtaccatcaacacctctttgagtacattgatcgtgttgctgtgtatcttcatcctgggtggtgactctatccgcagcttcgccttcgcaatgatcctgggtgttgtcatcggtacactgtcatctctgttcgttgcttctccgattgcatatatgatgctgaaaaacaaaaaaggttcggcacctgcaactactacagaagaataaagcctaatatataaggtataaaaaagcctcctccgcgtaattgcggaggaggctttttattttctgacagaccttcccttcacagagacacgatcgaatgaaaaagaaataaaggggcgtgaatacaggtgcagtttactcaatcttcctcatggtcatttgaccaaggtgatcacatcgcatacaaaaagtaagtgcattcttgccccgccgggaagaatgcacttgcacacaaacaaaacaaacaataagccgatctgtcacagatgggcattggccttaattagaactttcacaatctcaccgggaggtatcctgatgcttcttctcaagattcatctttgcacccggtttgaatctcaccgtcttttttcccggaatagtcattatctctcccgtagacagattataacctttacgggctttgcgctcttttacttcaaaggttccgaaacctaccaatgtgacggattctccctgatgtagcgcctcggcaatagcctccatcacaccttccaccacaatggcaatctgctctttctttaaattgcttttaacagcaatacttctaattaaatcaatcttcttcatgtttagctttttatcaattattaaataaacgtttcaaaaactactgtctcacacatcgaatctggaagccagatgcagaatgatgagctgatctatgggttactccatcc

SEQ ID NO: 5070 - DNA, 201 bp, Unknown
  gut microbiota DNA sequence
aaaaatccccgacagccgtcacggacaccggggaggtataaataaatggacttatttatttataaaatcgtccacccggccgatggcctatcagccggatggagatagaggtcaaaacttaaatccgatcttaaatgtcggagcggccagcacactgtagttgtggctgtctgccgacagatcgccaagacctgcttgcgg

SEQ ID NO: 5071 - DNA, 548 bp, Unknown
  gut microbiota DNA sequence
tcaatcctttttctccttttgtttttcctcttcctataacttgatttaaccctctgttaaatcaagccttttgtttccaaataacaagtcttttcgaagccaaagctttgttctttccgcccctgaaataaatgtctctccaactgcattaacaatgttaacgcggtcttccgttcaatttttgtttgattcctgtctgattcccgttcaattcccgccaaggtcccaccgagttttttgcttaaaccccgtttaatttccgtcaagttcccgttaaattccctattttctcctcaatttcctccccgaaacacttctccttctccctttttcggcaaatacccttttccctctccccgataaatttcccctatataatataataatgtgtccctttccttccccggccttttccttttccataatcaattatcagaaccttcctctccctcaggactttacgtttttattcaaaatattttcaaaaaaatccccttttatatttgtctcttatctcctaatgccttacttttgcatccgctttccaa

SEQ ID NO: 5072 - DNA, 309 bp, Unknown
  gut microbiota DNA sequence
cgattcacggtactcgaaaagctcacgggagagcttgcccgtggtggaaaccacaatgtcattgtccccgaggtggtcgacaacctgcattaacgcctcctcgcgggacagaggatagtcattcaaggcttcctgacgcaatttatattttccaaacgtatctttacggatgacaatcacatggggaatcgaccggctcttcgccgagacaaccgcatcatggatctgcgccagggcctcgtcttcatccgtatccagaattataaaaggaattttcatggctttcagaagatcaagggtaacctcgcc

SEQ ID NO: 5073 - DNA, 414 bp, Unknown
  gut microbiota DNA sequence
ccaagttcgtttagaacttataccaaacatcaattttaaacctaaataagaaagaaaagaatgagagagaaaccgtaaatgacgttaacctggtacagtgatacttcagaagtatcctgtgcttactttatcaatctaaattacaatctaataattaatcgtatttatgagaaaatgcaacatgcggtggtttagtccgcaaagaatgaaaaagcatctggcttttgctttagcagttagcctggtggctatggtacctgtgagtgccttcgctcaagtactaaagatttcaatgacaaagaccaatgtatccattgaaaatgtacttcgtgaacttgaaaaacaaagcgattacactttcttctacaatgacaatcaggtaaaactgaacaagaaagtatccatcaacgtatc

SEQ ID NO: 5074 - DNA, 2053 bp, Unknown
  gut microbiota DNA sequence
tttcactcacccgatcgtacgatcggtcggatttaccgcatggagggttcaaccgagcaagattgcgctaaaaaaagaaccgatgccaataatataaggtatttcataaccgaatatttttataaattttctatccgcttctgtatctcctttattttttcctgtctttgttttattttcattataagcctatcagaagctttctcaaaagagatttctttttcatccttatgggtacaatccgtactttttatgaaaaacacacctttaaatctttgatataagttaaatggataaaattcttgtgggatatggtgactcccctgaagtcgagacagtgttaattcattaaaatcgacagttaagggggtgtaaaaaacattgtcatcaataagacttaaaaaatattccatactgttttcaggaggcctactcaaccaattatctttcctgttataatgctcatcatatgccatggcttctccactccctatcagaaatagcaaaggagagtaactttcaccatacgctttgcgcatatacctcccgaaaggaatacaaggtacggcaggataactcgaaataggattaatatgtcccgcatgcccgtagattaccgtttttacgttttcgtctttggcgaacttgtcaattaagaatcttgcatttacgaacataatggaatcccgccgtatgaatctttctattccggcatctccggcttgctttgaaaccctcagaatatgcaagatacattctatttcttcagcagtaagaagtttttttatcttatctcgatgagtatcaagaaagtttatcgcacagttacgatcttttttcattaataacagagataattgatcaacttccggaatctgcgatttttggttcagcacggtaataaaatcaaaaatatccatagcagaactttgagtggaagaaaggattgaattgtaatccatgccatataatttaactttagaatctttcgttttaccagaattaaagctccgcaacctatttaaaaaattaattgtagcatggttgataaccaaggaagaatcaagttcataattgtcatcttgtataaacctattgtaagcaaatgattgttcgaggggcatttcctgcagtactaatttgcaatttaacctttccactgcctggataatcaattgatacgctaaattttttataccgtcattcccgtggactgactcccctaagccgataatctttttatcattgatttcattgatttgctccaatcctatttttctatcaacatttatacccgtatagttaatttttttatctactatcaacggggaaagggttcgaacaggaaattcgtcgataggtttaccgtcaatcagtatgtccaatcgagagaaagcaatataagcatccttatcaatttctccttccacattaattcgtacgtttaacatctccgcattattcaaattaatgttttgggtaaataagcttaatatactgtcaggcctgaatcttaaagtgtcagaaaaaagaatgttttcctgcttacctatcgcatccaagatgatggaaacaagttttatattatcgcctttaccttcaaatccgattacagcttcttttatgttattattgggaagtaaaattctctgttcgtactctgatcttaaccgcttagaaaaaggaaatcctttaaaatatttcttagcgaacaaatttcgatttgaatcttgtatataggcagggatagtataattgctatatgctccattttcacgccacggataaaccaccgcagaatcgaaacgcatagcaaaatgtaaatcatatacattcgtatatgtttgtttctctaatttagcggtacatgatacggcatagaatataaatacaaagaaaaacaatacatggagttttgttattgaattcatgtttaatattatttataaagattatcaatacttagtttcctctgacttctcgtcctttcgccaaaccatctctcagccctttagaataccataacatttcataatcggcattatgccactat

SEQ ID NO: 5075 - DNA, 1539 bp, Unknown
  gut microbiota DNA sequence
tcttttcttttcatacaaatacataagagcaaataaagtttggacatgatagtctaagttcattttaaaaaactcttccctcttatttatggcggatgcgttttttgtgaacagcactccgtccatcatacattttggaaaaacccactggaattgtccaattttcgattctgtatttcctatatatctcattttcaaaacatccgcatcggacagtttatccatcgacagataacacggactgatacccgaacgttcgatacagtattccaatccggcagacgacgaagactgcaatcgccttattcccattttaccaggaaatacccatgtcaaataacttccccctccggcaagcagtcccacggcggagtagtcatcaccgtatgaacccttcatatattctccgaaagggcgcatgtccgatcccagccatccagcgatacttgtataattcgcatgccccaaatgacaatatacggtagtcgtttcatcttttttaagcattgttttcattaagaacttcgcattctcgtacatgccggaatccctaccccgaaaacgattcagttcatcaacggtcgcttcctcctccgcattcaggcaataactcattatttccgcttctcgccgggtaagtatgcccttgaagccatgattggcatgcaacacagagtccgcccctttaaaagggaacttctcgtccgacaacagaagagaattgcatatcgctttcaagccttcgtcgcctttacctctgcggagcgtgtaaaagaagtaaaacaggtcgatactgctttgtaagcggtaaatattccggtcaatgccaaagaagctcaccttttcttccgaatgccggttgtattctttaatccatcgcataagagacacaaaggatgaagaagaaaataagaccttgtcaaaagaggaagcgatactgtccggcttgaaccgctcgtccccctccaaataccggttgatatggaaagacaatgtcaggggcatttctaacaagacgagcctgcattttccgtgttcgatcctattcttgattatttcaacacccatgtcattcatcgttccggtgccatgcacgctctctccgatggcaagtatcctcttatcggaaaaggacagagacttaagatcgtcaccgttcacgggtatcacatccaattcccgaacggaagccgttgcaccgttattcaatgatgggggttcaaccgcatattttccatcaattaagatatccaaagagtcaatccatattttagagtattccccgggcttaaaggaattatccgccgatcctaaaggatcgaccggaaaatcctttttcctgggcttctccccttgggcttcaagagccactcccagcaacagaggagaagctatatccacactccggcgggctaccctccatgtgttggcagcagacaaccgaaacgtgtccacggaagtgacctccctgcattcactaatcccactcagcttcaaatacaggtcattgcagttttctgttttatactttatcctcac

SEQ ID NO: 5076 - DNA, 2078 bp, Unknown
  gut microbiota DNA sequence
tacaaaccccttatcggctccttgcgtattataattactcatattcatattattagtcgacttatccggcaactccccgctataattctcaggactgaacaaagagtaatactcctccgccttcgctacccgccatccggccggacacggatcatgcacagtcttaacggtagcccaggcaccggatatcgagctggtgacatcccccgtgaaccaatactcacccgacggtttataggcagtcaaaggattccggtatgccgtctgataactagcttgtccgctgtatgccggatcgaatggtaaaaacttcaccccgtccgacccatataaactcatgatacccactatcggttccgttatctttgccggtaaattcaccgttttaatcggcttattcgaataactgctcggatacgggtcttttctcccccactgatattgaaagccatgcgctttaaacttctctacatccgaaggaggaactcctgcatatcctgccatcgcccccaaatcccggtccatcatcggccgttgatccggatggttgccatacgtaaacttcagttttcttttagtcaacggttcctgcacatccacattacccgtagcgtccggatgataatccgtcacccacacatgccagctccacagtatgttatcactactatcataagccgcaatcacaccgcttccgcccgtcgtgcccggagccacccggcaataaatgcggcattgccccttatcggtaacgggattctgtcccactgccgttccgtccgtacgcttgatgtctacaatgttcgtatggtcctcagcagagttgacgatacccatcaccggctcaccgatgtccccgtcctctttcgtctgccaaagaagtttcaccttaacgatgcctcccccttgctgttggcaccagcccttcaaggtttcattcgttttctctgttccgtcactctgataagccaacgggtcgaagcagaaacctccaccgggagccaccataaagcaattggccgtcggaaccggattgtcattgttctccgaagcgggcacgggatcgatgtaggtcacacgtttgtcattcgtcgggatacccgtatggctaaaactcaccgcatagctgtactccgtattattgttcaggctgaaatccgaggacgttttcccgccgatgtacacacgataatccagtttctttttgggatccgtggtattcacggctacaaagttcagaaaagagcttcccttcggtgcattcgctttcgtgcgctgcagatcggagtttgccgcgggagattcgccgcgtacattggccgggatccagcaagaataagaattgcctttactcatatcgatctctactgtatgaaactggtccagaatagagggataagtgccattcgagtctgctgtgggaaccagcgtatagttcaacgggacgctctgcaacaggacttgtttcagttcataaccgctcacggtgtagttccagttcaccgtcagtcgtgcagccaggcgcttcagcaacaggcgggtatcataactgccctccggactctgaatgacagccttaccgtcagttcccgtcaccacgtttacatgttccagatggagcacataaggcatggcgtcgatagcgtctgctgtcgaaggatcgatctgattgattatcgaagcatctatatccatactctttaccccctttgtactttctgtatcttccagattcttaccaactaaagtttttaccgcatccttgtttccacgtgccaccaccagcaattgacagtcattcatcacattcagcgtcacatccaggtgggtgccgagttctacagtgccataactgttaccattctgataggtcccgtttctattgtattggagtatctccagattatacagcttagtgggaacggccgggacgccacgggtaactgcgtccactgcctgagttacatcaaaagcggcagcacctgtttttaacggcgagccgttgaggcgagccgttgaggcgagccgttgaggcgagccgttgaggcgagccgttgaggcgagccgttgaggcgagc

SEQ ID NO: 5077 - DNA, 594 bp, Unknown
  gut microbiota DNA sequence
actttggtacgcaactgttttcctccatagcctgtaactactacttcatccaacatttcagagtcttctttcaatttaatattgaaagaattcctaccctttacatcgagtacctgaggctgatacccgatataagaaactttgatctttccgttaggatcgaccattaacgtaaatttgcctgagatgtcagtaattacaccattggtggtaccgacctcgacaacactcgctccgatgattgattcaccgctagcatccataaccacacctgtgattgatttcttttgtgccatggctccaagagaacataaaatgcacaaaatcaagaagatggttttcttcataagtattgcttttttgagttaataataaagatgtttatatgtgtttaaaaatactaactaagttctatcgggacggtaggcgaaaatggagaaaaaatacgtaataaaattatcgcataacgcatttataatcaatagattgaatctgtaaaaatcaaaaacaaatgaagatttcaatacttatttcagctaaaaagcgatggtatcataacagtataaaataataaagaaatactccatgaaaaag

SEQ ID NO: 5078 - DNA, 5470 bp, Unknown
  gut microbiota DNA sequence
gttatttggaaacaaaaggcttgatttaacagagggttaaatcaagttataggaagaggaaaaacaaaaggagaaaaaggattgaaaatgaatgaaatagagaaaagagggggacttttctgggaaaagggataagtgccggtccgaaagggatagttgcgattaaggcaagtatgggggcagggaattttaaaaagcaaggctgggagtggaagcaggaggagtttactgttaaagaccaaaggacattgcttaaaaactaaccttaggaaaacaaactgtgtacactggcactgtccaccattttgtgtagctagatggagagtcccgatccctttttgaaagccactaatattcagttccacccaaagtcatattcaagctacacaccattctaaagtggcttggacacctccttaacagaagcttcaaaatgaaaatctctcataacttataaaatatgcgcttatgtttttatacttttgcattcatattcagaaaagaaattatatgcgactcggacttttaaccgctttcatcctactcctgtcttttactacttcctgtcaatataaggaagcacagccccaccctgcatttaaagattccattgtcctcataactccagtggaaccgcaaccgattgcaagtaaaagccaaaccgccttttatctggattccatcggtctgatgaatatcgccgaacttgattctacattcattatccggctcatgtacgccactccggacaattttaccggtcaacttctttatactgatttgaaagaagcatatcttcacccggacgcagctaaagctcttttagaagcacatctgttacttaaagcccaatatcccagctaccgcctgataatttatgatgcggcacgcccgatgtccgtacagaaaaaaatgtgggatgtggtaaaagggacctccaagtatatgtatgtatctaacccctcacgaggtggaggtctgcataattatggattggcagtagatatcagcatagccgattcactaggacatccgttacccatggggacagaagtggactatatggatgcagcatcacacataacaaatgaagcaaaattagtaagagaaggaaaaataacccaacaagaacgggaaaaccgaattctactaagacaagttatgaaaagtgcaggatttcgtgcacttcccagtgaatggtggcactttaacctatgcagccgagacgaagccaaacagaagtacaaactcataaactaaagtaagatatgtatctttctccggaaaccatcttgtttatccgggagcatcgcaatgacgatgtacactccctggcattacaagcaaaaagatatcctcaagtggacatgcctctggctatcgttcagatagccggatggcaagctaccgtttctaaaataccaagttggcatgcaacagaaggacttttatatccgcgccatctatcattagagcaatgttcatcggaagttaccgcactctacaaagcttcactggtacatggagaagggttagtcgatctgaccggcggattcggcattgattgtgcctttctcgctactcagttcaaaacagtcacctacatagaacgccaggaggaactttgtgaacttgccatgcacaatttcccattactggggctgaaacacattcgggtacaaaatggcgacggagtggaatatctacaacagatgccggctgtagactgtattttcctggacccggcacgccgcaatgaacatggtggaaaaacagtagccatatccgactgtgaacccaacgtagccacattggaaaagttactactcgaaaagggtaagcaggtaatgattaaactttcacccatgctcgatctttccttggctatacgagatatgcagcacgtatccgaagcccatatcgtctcagtcaacaacgagtgcaaggagcttctgttactactccggcccggtgatgattctccggagattccatctgcaatgtctcagcccatcgtctgcatcaattttgcaaaccaggaaatacaacgttttgttttcacccgcgaatcagaacaagccaccgagtgttcatacacccacgaaataggaacttacctgtatgaacccaatgcctctattctcaaagccggtgctttccgcagcatcgcttcttcgtttcatctgagtaaacttcacgccaacagccatctctacacctcaaacgaacgaatagaaaagtttccgggacgcatcttccggataaccggttactcgagcctcaacaagaaagaattaaaaaatattttaaacggattagataaagcgaatatcaccacccgcaattttccacaatccgtagccgaattacggaaacgactgaaactaaccgacggaggtgatatctatctgtttgctactactttgaacgatgaaagaaaaatcatcatccggtgtgagaaagcataaaatgaggagaggcaacgtcgtcccgacgctgcctctttctctcaatcaatttatagaaactgtttgtcccaacgaatatatttcatctgattgtccatagggcttttctttcaacatcccctggaccttaaccacaatcctatatttggattcaggttctttcagtgtatattcccacgaagtaggttcaccttccaaagaaatctgatgctccagcaccgcccctttgtaaacctgaacataaacggataaaggacgttgtatctcttccggaatcgctgaaggtagtttccactccaacaccgcatcattatcaggtgtcagtgacgatttcaaatcggtcaccggaggtaaggaaactccatctttaaaatcaatgatatcgcgatcctggcaacctgtgacggcaagtatacaaagcatcacagaaaaaaagtataatattcttttcataatcgtctgttttttattagtaacccggattctgtatataatttcctttcgcccagttcatctgttgctgaggaataggtttatattcatctcttcccgcaacaaagaccgcattattcatccaagagaaacgggttttctcttttttgaagtaagcattcatcgtaggctccaggattccccatctttgcagatcgaagaagcgtcttccctcacatgctgtttcaagacgattctcaaacatcaatgctttccatgcatagtctttggtccaagcagcctcatcggtatacaagctgaccttataattcatgtaaggagtaccatctgccatcaacaagcgaattctactgttattagcacgttcgcgcagcttattaatgataggacgagcttctttgtgacgatccaactgaatcaggatctcagctttccacagcaagacttcagcataacgaatttgcttcacattcatcgaattacggtttacaatgatacaatcgcaaccggcaggaaccaactctttaacagatttcaaataaccataatcaccggggcttctggaagccttttcctcgtacagcaaatccggattatatttataaggatatcccgggatagccgccgtatgactcaaacgagggtcaaagctattttcatcgaaatactctttgaatcttcctttcatttccgcatcgttaaacgtatcgaacaaaggcaatccgtctgtaccggttctgaaggcatttgccatattaaagctcatcttatggaagtcacaacatgggaaataaggttcccaggaaggagcattcaattctgcaccattgtttgtatttcctccgcttgatgttccgtcgttgatagaatactggatttcccaaattgcttctttggtagcattatcatattccggcaagaagttttcggcaaagtcttcacacaagcctacgtttccaccttcttgatcagtgatctcgttgatataaaccaaggcacgttccagaatcttcttatccacttcgactacctgatgtcttgcatcctgcttgtacgccatgaacaataaagctttggcagccattgcacgtgcggcattcttgttgatacgacctatctcctcttgtttttcaggcaacagtctgacagcctcttccaaatcggcaacaatgtgttcccacaaatatgtatcatcagtaccattggggcggttcgagatattagtcacatcttccaccgttcttccgttctcttcatccacccaaggaatgtatctccacagagtcttcataaagaaataagtagctccgcgcaagaatttcacctcaccggtacgtacacctttcaacggatagttttcatcagtaactttagacaaggcatagagtgccaggttgtatctggatatcgctacatatcctttgaaccaaggtccgtcattgttccctacattggcagttacagaagagaaaacttccatatcgtgccaggccgactggtcacttacacccgatccgcctttgtaagcatcatccgatcggatagaaccatgcatccaccatgcatgagcttccgaccagggcagataaggaatcagcgaatagcacggagtcacaaaatcatcaatatgttcgggctttcctaataataaatcatcagccagcacccctttagggttaatattcaattggtcggcacagctcgtcaccaataaggaaagcaaaagggctgatgacagaaataaactataaaaggttttcatactatttctatttaaaaggttatattaactccgactgtagcggtaaatggaatgacatagccaaagtcacggatttcaggatcgggacctgagaaacgattgctatcccaccatttcttgatagtgaatacattgttagccgaaacataggcacgcaagcggctgatcatggctttcttcaccatactttccgggaaagtgtatcccagctctatcgttctcaacttcaagtacgaaccgtctttgaggaaatacgtagacgtacgcttttcatcattggtgttacgagtagacagagccggaatgttagagtccggattctgaggagaccaagcattaaatacacctttcaagtggttggtattattcacattctgaatgttccagaagtcactgtattcaatccatgaatcccaaacatctccgccatgcacaccctggaagaagagagctaagtctacgttcttatacgaagcctgaagattcaaaccataagtaaagtccgggtcactgacaccaatccatgtacggtcgtagtcctgagtgatacgtccgtctccatcaaggtctttatagcgaatgcgtcccaaaccttttcctgcctgctgcggtgaattgtccacctcttcctgtgtcttgaagattccgtctgccacgtatccgtatatagagttacgggggcgtccgatgatatcatccaacataccgtttccaccatatacacttctcacattgtccggcaattcagtaatctgtatttataaccatagaacaaccaaaactaatc

SEQ ID NO: 5079 - DNA, 2161 bp, Unknown
  gut microbiota DNA sequence
gcagaaaagggttatgatgttactattgtaacatacaacaacattccagaccattatgtcctagataaaagaataaagagaattctcctcaatgttgatgggaagaacaatatcattaagcaattgattatctcaaaattcttttttacacataagactgattgtatcatcagttataggtctgtgccaaatttcatattgttgctccccctttttataacaagaaagcctaagattattgtgagtgaaagaaatacgacgatagttcctagctttcgcgagataatcaattacaacatactatacaacagggctgaccatgttgtcccaaatagtcacacacaggcaaaatatcttaaaggactaaataaaaaatggaaagaccgtataacaacaatcacaaactatacagatgtagaagagtattcggtaaagcctgttcctaaaagcactgaagttatcaaaataggtgtatttgcacgactttttcctcaaaagaactacgagagattctgttttatgctctcaaaattaaagactttttcagataggcaattttgcgtatattggtatggtgataagaaagagggagaattcataaaaggctctattcacatacatcaattgattgaagagtatcatattgcagatgtgtttaaagtaaaggaagctgtgagtaacgtcgctgattatatgaatcagttccatgcaatgtgcttaccatctttatacgaaggattttcaaattccatttcagaatatatatgttgtggaaaggctgttttgtgtagtgatgtgagtgacaatcacataatggtacatgatggggttaatggtttcctgtttgccccaacagatgtaaattccatgtgtgacgctttttgtaaattctttcagttaacacaaaaccaaattattgaaatgggtgtaaatagcagacaaattgctgaaacattatttgataaagataattttattaactcatatgttagacttatagaagactgattatgaaggtattacaggtcataacttcccttcaaataggtggagcggagaaacttatttctgaaatatctccattgctgcgagacaaggggcatgaagtggatgtgctggctttcgatggagtggaaacacatttcaagagatctctcgaagaggctggcattaaggtctatagcttcagtaaaaactgtaatgtctataatccccttgtgattctcaagttggtaaagataatgagaaactatgatatagtacatacacataacactgctccacagctatttgctgccataggcagcatgttatgctcggtgctgctcgttaccaccgagcataccacttccaatcgcagacgcgattggaagtggtatgctcctatcgacagatggatgtataaacgatataacaaagtgatttgtatatccaatcaagcagaggaaaaccttaaggcatttcatccttcgttgaaaaacgtatgtactatttacaatggtgtagatgtacaaaaattccatgacgcaaagcctcttgaatgcatacgaagtgagaaaacgactgttgtgatggtggctggatttaggtatcaaaaggatcaagatacgctcatcaaatcattcagtcatcttgacgaaaataaatttgaattatggcttgttggaaatggagaacgctgtccagagttagagtgtttggttaaagaactcaatcttgaatcaactgttaagcttatgggaataagagctgacatacctgaagtcttacagtcagcagatatagtagtgatgtcttcacattttgaaggtctttctctgtcaaacgtggaggggatgtctgtcggcaagccattcatcgcaagtgatgttgacggtttaagggaggtcgtaagcggatatggactacttttcccacatggagatgacaaagaactcgcttctattattaaaaggcttgcagaagataaggatttttataaacagatagcagataaatgttgggaacgcgctcagatgtatgacataaagaagatggttgattcttataatgacttatttgtcagtctgaaaagggatttaacatgctctctgcccgcacaagtgaagccttgatggctaatggagcgataccatcggtggcgggacggattatgcgtcac

SEQ ID NO: 5080 - DNA, 417 bp, Unknown
  gut microbiota DNA sequence
aatcaaagtagctaaactttctccatgtttcatttcatagatcatcggtctcttcacctttcccgatataccaaccaaattttcataaggggataccaaaatcacatctccttccgacaaacgtatatcatctgtaagttttcctttcataatatactcatacacatccacatcagctactttcataccacttcgtacgacttgaatggttcgtaaactgcctatacgattaactcctccggcacgatacaaagcatgaaacaccgatgcaaaagccgataaccgatacgtaccgggaacttccacctctcccatcacattgaccataatggaacgtatttttcctaacgtcaccttgatatgtgccgattctccggagatagctgcataaatcttactaaattcatgccgcaaata

SEQ ID NO: 5081 - DNA, 1230 bp, Unknown
  gut microbiota DNA sequence
aggaaggttatacccgtcctcttcatcggcaaagccgaaacacagggatacctccacgggcttcgtgtcggcatcgaccggcacgacatccgcccgctcttcacaagccgccatgcccaacaggcagacaagcaccggtagcttccacagatttttagaagtatgtttcatattggtatgtttgttttaagttcaccacagattacacggattttcactgattaattatttatattccaattaattatttatatttcactgataatcaagttcaatcgaatcaaagattcggtgttgatctgtgaagatccagtattaatctgtgaaaatccgtgtaatctgtggtgaatcaagttcatttctgtcttttatttgaaaactacattgttcaccggaagcacctccacagcatcaaacatcactacgttgccgtccgtgatcgtcacacgcacatcggcgctgttggcgccactgacattgacggtgagcttataaaggtaatctctgcggatgttgtagtcagtcatcaggttgccgcccaaatgcaggagatagttcacgccgatagagtcctttgcgcccgcatacacatatttgcccgacagcttgatgtacgtgcagtagtccaatcttccgtccggccctttagccggaatgctcttttccataaacgaggcggctgtccccattccccgtaagttttccggcatatagaattcgaaagaagaagacggccccaaatttgtagtgatctgagttccggttgtggatgtgatagccgtagaaccatccttatccgcaggatacttatctttaatacttccgcctccccgcgtatagagcgccatgtgtgcgggtacattgtagagggagacggacttgacgacaaggttactcggattgtttgcgtctgccaggtctccctttttattccaggacaaggaaatcgtggcgtaagcccgccgcaaaggaaccaccagcggtatcacacccggtttcttgggatcgggcttatattccagcggccccgatgtcaacagggacggcttgttgttataaccggaaaaggccaccgttttcgccttcagttcctcttcggttccggtgaagctgctcaagaacgactgttccacattggcaatgacatagaagcgactctccgcttggacgaaaacaacatcatcattcttggtgttgacctcaatcgtctgaggatcaggattctcctgt

SEQ ID NO: 5082 - DNA, 1027 bp, Unknown
  gut microbiota DNA sequence
gaagtcccggactggttatctctaccatatcatcatagatcgcaatcttaacgtcttttcctgtgagagaataatcccgatgaaccaccgcattacgaatcgcctcacgaattgccttaacaggatactcccaacgagatactgtgtacactccctcaaccgaagcacctttattgatatggcgtaacacaaagttgtatgcttcctctgcttgtgtggcaatattggtcgtaatactcttttggtctatgaaatcatcgatactaacacctttaaaacgagcacactccacctttgcatagtgaaacaacgagttacgcaacgggtcgtccgagaatagaatcaacgcattggtcggatattctgctccttgcatatctttaaccaagtctaatttccttaatgcttggtcggataattcttcccccgttttctccttgaatatagccttaaaaccatctatgttcaaatcatttacaggcttatctggtataacttcgctatcaaaagagatgtttcgtctccgacgttccaattccgagatgatagcttcatccgcaagtcgattggccgagcctacacgaataaatgtcccttgtaacttacctttctctttgagataataaggtggcgtgctacctctgaaaacagtcacctgaatcaagtgtttgttttcttcgcttataaattttatttccggcaatatcgcaggatagcaacggtcaaaaataatattacttattttctcctcgatagtcaccaatttgtcctcatccaatcctaccacttcacgaggatcatctgccacaccaatatacaggtcgccacctgcatcattggcaaatgccacaaccgtcttagccaaatcggaatgctccggcaactctgccttaaattccaatctacgcccttcggattggtttagtatctcttttatgttcatacttctactgttctgctttgtaataaacttgtggcaagttatagaaaatcttttagatgacaaagatcgcaagcgaaaacattc

SEQ ID NO: 5083 - DNA, 50086 bp, Unknown
  gut microbiota DNA sequence
acactttcttaatggagatggctatgggaaatccgatagccttttcttgtcctatataacggttattggaagaggtgggtatctccgcatcccttgggggcacggagccttgcaaaagaggcgattcaagcgaatgaatgggttttatataggaaaaaatgtgtcgtaagagtagagggatgtaaggaaggtacttttgtgagctgttttacactctactgtcagccccccacatcattttggtacgcaaggtatcgaaaaagatgtggttaaagcgtttcaccaccttaatgctatagtctgctctacggatagtgagacgagtagtctctttacaggtttcactgctaccgtctattgctaccagaaagttatgactacggctttctacatctaaagtaatttcccagtcatcacagattactataggccttacatttaaactgtgtggggcgacaggagtgattgcaatcgttttggagtgtggaacgataatagggccacctacgcttaatgaataggcagtagaacctgttggagtagcaataatcaaaccgtctgcttgataagtagtgagatgtgccccgttgattgctgtacggatactgatcattgatgaactgtctcgtttcagaatggctatttcattgagagcataaggcgaattttgtaaatgtttatcgtcacaaagtaactggagtacacttcgttcctcaacagtataatggttctgataaacctcttcaatcgtttcttccatttcttccggagatacatctgccagaaaccctaatcgtccggtattgatgcctaaaatagggattcctttattgcctacacggcgtgctgccttcagaaaagtgccgtcaccgccaatgctgatcaccatgtcggcatcaaaattgttttcatcgaacaaatcatctgccttaacgttcagttttaaatcggacttcagaaaacgatgaaactccctgcatacgcagatttcagctccatgtttctcgagtaatttgaacagggtggcagcatgtgaggacttcttagcttggtatgtatttccgaaaatggcaaatttcatgttgataaaagtttctagtatgtcgcaaatttgggattttttttcggtattgctgttatcttatcgctaatatttgtacttttgcgcaaaacatatgggtaaaagctccgtattatattaagacatagaactatgactaaattaagtgtgaacataaacaaagtggctacccttcggaatgcccgtgggggaaatgttccgaacgtggttaaggtggcgttggattgtgagagtttcggtgctgacggaataacggttcacccccgtccggatgaacgccatatccgtcgttcggatgtgtatgatttgcgtccgttgcttcggaccgaatttaatattgaaggatatccttctcctgagtttattgacttggtgttgaaggtgaaacctcatcaggtgactttggttccggatgatccttctcagataacttctaattcgggatgggataccaaggttaactttgatttcctgacagaagtattggatgaatttaacggggcaggtatccgtacatccgtatttgtggcacccgatgcggaaatgattgaatatgctgcgaaagcaggtgccgatcgggtagaattatataccgagccctatgctactgcctatccgaaagatccggctgcggctgttgctccttttgttgaagcggcaaaagcggcacgtagattggggatcggtctgaatgccggtcatgacttgagtttattgaatctgaattatttttataaaaacataccttggttggacgaagtctctatcggtcatgctttgataagcgatgcactgtatctgggactggaacgtaccatccaagaatataaaaactgtcttcgctaatgaatgcaatgctactattagcccaagtggctaccaatctggctgactccgttgcatcggccaatcctgtattgactcctgtatctgcaccggcagaaatgaatatgcttgatatggctatcaagggtggatggattatgattgtactggccgtactgtctgttgtctgtttctacattctgttcgaacgtaactatatgattcggaaagccggtaaagaagatccgatgtttatggagaagattaaagattatatccatagtggggagataaaatcggccattaattactgtcgtacgataaatactccttcagcccgcatgattgagaaaggtatcagccgtttgggacgtccggtaaatgatgtgcaggttgctattgaaaatgtgggaaatatagaggtggccaagttagagaaaggactgacggtaatggctaccatttccggtggtgcaccgatgcttggcttcctgggtacggtaaccggtatggtgcgggcattttacgaaatggcgaatgccggaagcggtaacatagacataacattgctttcaggaggtatttatgaagccatgattactactgtgggtggtttgattgtgggtattattgctatgtttgcttacaactacctggtgatgttggtagaccgagtggtcaataagatggaatccagaactatggagtttatggatttgcttaatgaacctgcacagaaataaagtgctgagataaaataaagtgcgtagccaattagcacattgacagattggcatcttgaagaattattttatggcattaaagcgtcgagcaaaaatatcacccaactttagtatggcatctatgacggatgtcatattcctgttgcttatcttttttatgataacctcaactgttgtgtcgcccaatgcgattaaagtgttgttgccacaggggaaacagcaaacttcggccaagccgttgacaagggttattattgataaggacctgaactattatgcagcgtttggtaatgaaaaagagcatgttttggggttggaagagttaactccattcctccaaagttgtgcggataaagaacctgagatgtatgttgctctctatgcagatgaaactgtgccttatcgcgaaatcgttaaagtgctgaacatcgctaatgagaatcattttaaaatggtgttggctacacgcccgccggaaacaaagaagaaatgaacataaaaagaaagagtgaatatataggggcgttgggtgcattgttggtgcatgtggctattattgctcttttgattctcgtaagttttgctatcccgcatccggacgaagaagccgggggagtacctgttatgatgggagatgtggatgctgcttatggaaactatgatccttctaccatggtggacgtggaggttttaccggaagaagtgccggctccgcagcccgaaccggaagtggagactgaacaggaaatgattactcagaccgaagaagaaacggttgtggtaaagcctaaggccgaacctaagaaggaaaaaccgaaagtggcaaagaaacctgagaaaactcccgaagaaaaagctgccgaagctaaaaagcttgccgaggaaaaggcggaacgtgaacgtaaggctgcagcggaagctgccagtaaacgagtggccggtgcttttggtaaaggttcgcaaatggggggaagtaaaggtacagctacttcaggagaaggagtcgaaggaagtaaagacggtaattctttgaccggagcaaaatccggagtcggagggtatggaacatttaatcttggaggacgttctataggagaaggtggtttgcctcgtccggtatacaatgttcaggaagaggggcgtgtcgttgtttctatcacggtaaaccctgccggtcatgtgattgctacgagcatcaaccgattgacaaatacggtaaattcgactttacgtaaggcagctgaagatgcggctaagaaggctcgttttaatgctgtggacggagtaaacaaccagacgggaacaattacttattattttaatttgaaataattaatgcttagggtgccgcacccttaaaaggccgggcgctttaagtttgtaacatctaaatgatatagattatgggaactgtttatgcatttttcgcagatggatttgaagaaattgaagcgcttactacaattgatacattgagacgcgcaggtttagatgtcgaaatagtatctgttactccggacgagattgtagtcggagcgcatgacgtatctgtgctttgcgataagaattttgaaaattgtgacttctttgatgctgagttgctgtttttacccggaggtatgccgggagctgccactttggacaaacatgaagggttgcgtaaattaattcttagttttgcagagaaaaacaagcctattgcagccatttgtgctgctccgatggtacttgggaaactgggactcctgaaaggacgcagagttacttgttaccccagtttcgaacaatatctggatggggcggactgcactaacgaaccggttgtaagagatggtaatattattaccgggatgggaccgggagctgccatggagtttgcattgactattgtggatacattgttgggcaaagaaaaagtgaacgaactggtagaggctatgtgcgtaagacgttaagcttatgtgtcggactgctttgattgtagccggagggaagggactccgtatggggagcgaacttcccaaacagtttcttcccatcggtggtaaacctgtattgatgcgtacgctggaagcttttcaccgtttcgatgaaaaaatgcagattattcttgtgttacctcgggagcaacaggacttttggcgtgaactttgtgaagagcatggctttgacattaaacatctgattgccgatggaggtgaaacacgtttccattcggtcaagaatggattggctcttgtgaacggtatcggtgtagtgggaatacatgatggtgtccgtcctttcgtttcacaggaagtgattgcccgctgcttccgggaagcagtagtccgaaaagccgtcatacccgtcattgatgtggtagaaactgtgcgtcatctcaccgaatcgggcagtgaaaccgtaagccgtaatgactataaattagtgcagactccccaggtgttcgatgcagatctgctgaagagagcttatgaacaggaatttactcccctttttacagatgatgcttcggtggtagaagccatgggtgttcctgtctacctggtggaggggaatcgtgaaaatataaaaataactactccttttgatttgaaagtagcttcagccttgttgtaatgttcgatttaactacacgagacataaagtacttatccggtgtcggcccgcagaaagctgcggttttgaataaagagctggagatttattcattgcatgacctgctctattatttcccttataaatatgtagaccggagtcgcatctattacattcatgaaatagatggaaatatgccgtatatacaattgaaagggaagatattaggattcgaatcatttggtgaaggacgtcagaggaggctgttggcgcatttttcggatggtacgggagtggttgacctagtatggtttcaaggtataaagtatgttaccaataaatataaacttcatgaagaatacattgttttcggtaagccaacggtgtttaacggaagaatcaatgtagcccatcccgatatagatagtcccgccgatctgaaattgtcgtcaatgggacttcagccctattataatacgacggagaagatgaagcgcagctttcttaactcccatgcgattgaaaaaatgatggcaaccgttatcggacagattcaggagcctttgtccgaaacactttcacctaaactgattgccgatcatcatttgatgtctttgacggatgcattgcggaatattcattttccttctaatccggaattgttgcgaaaagcacaatatcgtcttaagtttgaagaactcttctacgtacaactcaatattctgcggtatgccaaagaccggcaacgcaaatatcgcggctatgtttttgaaacggtaggagagatttttaatacgttctattcaaagaatctccctttcgaattgacaggcgctcaaaagagagttttaagggagatcagacaagacgtagggtgtggaaagcaaatgaaccggctattgcagggagatgttggaagtggaaaaacattggtggcattgatgagcatgttgatggcactggataatggatttcaggcttgcatgatggcgcctaccgaaattttggctaaccaacattacgataccatcagagaactgttgtttgggatggatgtaagggtggagttgctgacaggctcggtaaaaggcaagaaacgggaagctattcttacgggactcctgaccggagatgtacacatcttgctaggtacccatgccgtgattgaagatactgtaaattttgcttcgctgggattggctgtcatcgacgaacaacaccgctttggagtggcacaacgtgcccgcctgtggagtaaaagtgttcagccacctcatgtgttggttatgactgctactccgatcccacgtacattggctatgacactttatggtgatctggatgtttcggttatagacgaattacctcccggccgtaagccgattgctacgattcaccagtttgataaccgtagagaaagtttgtatcgttcggtacggaaacagatagaggaaggccgtcaggtttatattgtttatccactgattaaagagagtgaaaagattgatttaaagaatcttgaagaaggatatctgcatatctgtgaagagtttcccgactgtaaggtctgcaaagtgcatggcaagatgaagcctgctgagaaggatgcacagatgcaactttttatttcgggtgatgcgcagatcatggtagccaccacagtaattgaagtcggtgtgaatgtgcccaatgcttcggtgatgattatcgagaatgccgaacgtttcggactatcccagttacatcagctacgtgggcgagtggggcgtggagctgatcagtcttattgtattttagttactacgtataaacttaccgaagagactcggaagcggcttgaaattatggtgcgcaccaatgacggatttgaaatagccgaggcagatcttaaactacgcggtcccggggacttggagggtacgcaacaaagtggcattgctttcgacctgaagatcgcggacatagcccgtgacggacagcttttgcaatatgtgcgcactattgctgaagaaataacagatgccgatcctggcggagtattaccggagaatgcgattttgtggcaacagttgagagcattgcgcaagacgaatgttaactgggctgctattagttgaaaaacggttaaacatgtagcttttttacataaacatgttgcataacatgttttctcttattccctttatttacggttgtttggagaaatatttctttaattccatgccttactcttataaaaaatagttaagaacatgccttctgtttcgtctggaaatgctatctttgggggaatttttaaataaatgagcactttaaccttttgaaactgtacgttatgatggaaaaaacattagtcattctgaaaccttgtacccttcagcgggggctggttggcgagatcactcgtcgttttgagcgtaaaggattgcgtttggcaggaatgaagatggtgcagttgactgatgaagtgttaagtgagcattattcacaccttagttcgaaaccattctttcagcgagtgaaagattccatgatgacggctcccgttatcgtttgttgttttgaaggtgtggatgctattcaagccgttcgtgcattggcgggaccaaccaacggacgtctggcagcgccggggaccattcgcggagattacagtatgagttttcaagaaaacattgttcatacctctgattcgcctgaaaccgcagctgtcgaattaaacagattctttaaaccggaagaaatattcgattacaagcaggctacttttgattacctgtatgcgaatgacgaatattgattgaattgaattaacaagacgaatgaatttcaattgcattaaaacagtaatgattgccgctgcggctatggtcagcctgaattctttttctcaggatttgattgcccgtcaggcaccgattgacagaaaattaaaaagtgtagattcattagcattgcagaaacagatccgtgcagaacaatctgaatatcctgcgttgagtctatatcctaattggaacaaccagtacgtacatgcttacggaaaggatgctattattcccgattcttatacgatcgatctgaccggcttccatatgcctactccgagtacccgtattacatctcctttcggtccccgttggagaagaatgcacaacggacttgatatcaaagtgaatattggcgataccattgtcgcagcttttgacggaaaggtacgtattgtgaaatacgagcgtagaggatatggtaaatatgtcgttattcgtcatgacaatggtctggaaactgtatatggccacttatctaaacagttggtagaggaaaatcagttagtgaaagccggggagccgatcgctttgggtggaaacaccggtcgttcgacaggatctcacctccattttgaaacacgtttcctgggtattgccatcaatccggcattgatgtttgacttcccgaaacaggatattgttgcagatacatatacgttcagaaaaacaagaggttacgaacgtaacagagccggttctcacgatactaatatagcatcggacggtgaaatcagatattacaaggtgaagaaaggcgacagtttgtcccgaattgctaaattgcgtggcgtttccgtcagcacactttgtaagttgaatcgtattactacaaagaccacacttcgtccgggtcaagtattgcgctgttcataatagttatactacatagtcggaagagggcactttaatataatttagagtgccctcttttctttttactttaattattgttacctttgcacactatttgtaaggaaatgaaagataccaagcaacaatttgaacatgtcattgctttatgccgtgacctattctctaaaaaactgcatgattacggtcctgcatggcgtattttgcgtcctgcttccgtgaccgaccaaatatttatcaaggccaatcgtattcgcagcattgaagtaaagggggtgactcttgtcgatgagggaatccgttccgagtttatcgctattgtcaactatggtattgtcgggttgatacagttggaactgggatatgcagagtctgctgatattacagtggaagaggcattggctctttatgacaagcatgcgaaggaagcattggaattgatgcttgccaagaatcacgattacgatgaagcatggcggagtatgcgcatcagctcatataccgatttgatattgatgaagatttaccgtaccaagcagattgagagtcttgccggtcagacattggtctcggaaggcattgatgccaattatatggatatgattaactattctgttttcggattgattaagatagaatttgaaggatagagaactacatattattcagaaagtatggactaacctgtgccgctttgcgctggcaggggtgtttatcttttcaggatttgcgaaggcggtcgatccattgggttcggagtataaaatacaagactaccttgatgctttcggtatggggacatggttcccggctttttttccattgctggcgggtattgttttatcagccattgaattttcggtaggtatctttttgttttttggcatccggaaaacgactgctacatggttggctttgttgctgatgatttttatgacaccgctgaccctgtatctggctttagctaatccggtgtctgactgcggctgttttggtgatgcatgggtcttgaccaactggcaaacgttctggaagaacattattttgttgatagctgcaatttccgtttttaggtggaagcatcagatgattcgctttatcagtgccaaaatggaatggctcgtatctctatatacttttctatatgtgtttgcgctttcgttttattgtttgggaaacttgccgatattagatttccgtccttataaaataggaaaaaacattccggaaagtatggatgttccggaaggagcaaagcctacggtgtacgagagtgtgtttgtactggaaaaaaatggcgagaagaaagaattttctttggagaattatccggatagtacctggaaattcattgaagcacggaccattgtaaaagaaaagggctatgaaccttctatccacgatttctcgatgaccaatcttgaaacgggtgaagatattacagaggaggtattgtctgataaaaactatacgttcttattggtggctcatcgcatagaagaggccgatgacagtaatatcgacctgatcaatgagatttacgactatgcggtggaacacggatatcgcttttactgcctgacttcttcgttggatgatcagatagaacaatggaaagataaaacaggtgcggaataccctttctgcctgatggatgatattacgttgaaaacaatgatacgttccaaccccggactgatgttgattaaagaaggtactatccttaataaatggagtgatagtgagctgcccgacgaatatgctttgactgacaaactggagaatctggaattgggaaaacagaaagaagaaagtgatgtgcatacgattgggtatgtgctcctttggtttgctattcctttattgatggttctcggtgtcgatatattggtggtgaagcgtttggaaaagaggcggaaaagagctgctgaaaaagctgtcgaaaattcaaaatcctcttctgaggcgtagatgaataatagaattgaaaatttattaacccttttaataaaaaacaaaatgagaaagaacattgttgcaggaaactggaaaatgaacaaaacccttcaggagggtattgctcttgcaaaagaactgaatgaagctttggctaacgaaaagcctaactgtgatgtcattatctgtactccgtttattcaccttgcttctgttactcccttggtagatgcagctaagatcggtgtaggtgctgagaactgtgctgacaaagaatccggagcttatacaggtgaagtatcggctgctatggtagcttctaccggtgctaaatacgttattctgggtcactcggaacgtcgtgcttactatggtgaaacggttgagatcctgaaggacaaagtgaaactggctttggcaaatggtctgactccgattttctgtatcggtgaggttctggaagaacgcgaggctaacaaacagaacgaggttgttgctgctcagttggcatctgtattcgatctttcggcagaagatttctctaagatcgttctggcttacgaaccggtttgggctatcggtaccggtaaaacagcttctcctgctcaggctcaggaaatccatgcgttcatccgttcggctgttgctgagaaatacggaaaagaaatcgctgacaacacttcaatcctttatggtggtagctgcaaaccttctaatgctaaagaactgtttgctaatcctgatgttgacggtggtctgatcggtggtgctgccctgaaagttgctgacttcaaaggtatcattgacgcattcaattaattaaaattgggggttaaaagccggagaatagtaatttgccggtttttaataccccaattctcaatcttataaatttatgaagaaactgggtttacttttgttcttgtttgtttgtgctgcggttgtccgggctcaaagcaatatcgtgaaaagtctggaacgtaatgtaccggggcaagggaaagtaactattcatcaggattcccgcatcgaagctttgctgggaactgcccgcaccggcacaggagagcagactgttataaagtcgtccggttatcgggtgcaggcttatgccggtaataatacccgccaggccaagaatgaagcccatcaggtaggtacccgtgtcaaggagtactttcccgaactttcggtttatacttctttcaatcctccccggtggttgtgtagagtcggtgattttcgcagcatcgaagaagctgatgccatgatgcgtaagctgaaagcaaccggtgtgtttaaagaagtctctattgttaaagatcaaattaatattcctctgtaatcatgttagaaaaagaagaaatcatttctccggctttggaagatttaaagaatcactatcgcagtataattactttgttgggcgaagatgctgaacgggaaggattattaaaaactcccgaacgtgtagctaaagccatgttgaccttgaccaaaggctaccatatggacccgcatgaagttcttcgttctgccaagtttcaggaagaatacagtcagatggtgattgtgaaggatatagatttcttctcactttgcgaacaccacatgttgcctttctatggcaaagctcatgtagcttatatacctaacggatatatcaccggattaagtaaaatagcccgtgtggtcgatattttctctcatcggctgcaagtgcaggaacggatgacgctgcaaattaaagagtgtattcaggaaacgttgaatccgctgggcgtaatggtcgtggtggaagccaagcatatgtgtatgcagatgcgcggagtggaaaaacagaattccgtaactactacttccgactttacaggagcttttaatcaggctaagacccgtgaagagtttatgaacctgatccgccagagatgataaactcggagttttgatattatacagaataataactatttatttcaattacttatattttagtttggttatatagttatagttatctatttttgccgcagtaagtaatacttcgtagcaaaattctatgtcagctactatcaatgatttagcttcatttaataagttctttaccgagaatcaacatcggtttatccgatttgcatggacttacacccgtgacgaagttgtggcggaagatattgttatggagtctctgatggcttattgggagaatcgggatcatatgactccggaaatcaatccggctgcctatgtacttactgtcgtaaaaaataaatgtctcaattatctgcgccatttacagttggttaatgacgtttctgaccgtgtcgcctcacattctgagtgggagttgtccaatcgtattgccacactggatgcctgtgaacccaatgcattgtttgccagtgaagtgcaggatattatcgatcgtgttatttcccgtttatctgctactaccgcccgaatttttcttttaagccgttacgacaacaagtcccataaagaaattgctgaaattatgggaatgaccgtgaagggagtcgagtttcatatctctaaggctaccaaagagttgcgtgttgctttaaaagattatcttgtcctttttcctttcttatgtgactttctgtcccgaaattaaaaataaaaagaacttttttactagggggattaattgttggcgtgttattataatgaatgcaattaagaccgacttatgaaaatagaaaaagaaatattatatcgatattttaatggagacgctactccggaagaagagcataaaatccggcaatatcttgaagcttcggatgaaaactggaaagagtatttgcgtgagcgaaagtttttcgataccattatattgaaagaacaggttgtgtctgaggagaaacagatgaagcgcaggcagctgattcggaagataagtcttgaatgcctgaaggtggccgccgttttgttgattgcttttggaacggcatttttctggaacaatcagtccgagaagcccgcaactaaaagtgtggtaaatactttgaagggacaaatggccaatataaccttgcccgacggaagccgggtgtggcttaactcgaatacgagaattgagtattcgcagcattttgatgataaaagggaagtgcagattgacggagaggcttatttcgaagtcgtacggaataccggaagaccttttattgtttatactccggatgacgaacaggtagaggtactgggtactaaattttatgtagaagcatactcaggtacaaagaagtttgagactgcactgatagaaggcagtgttcgtgtcagggcagctaactcccagttcatattgcaaccctcttataaggcagtgcagaaaggaggcaagatgagtgtggagaagatcactgattttgatatttatcgttggcgtgagggactgatctgctttaaaaacagacatttttctgaaatactggaagagctcaaaaagtattatggagtccatatccggtttgacgtagctaaaataaataacccggtgctgactgttaagttccgcttgtctgacggcattgaatatgcgttgcgggttttgcagaaagatgtgaaatttaaatatgtgcggaatgatgaagaaaacacattcgttataaaataatttgtttaacccttaaaaatatacatgcagcctatggaaaacacttattaaatctaacctgaaataaaaaagccggcaggtactgcaatacctgccagctaaaaggagaaacattcttcttttccctaaaaagaaaaatattaatcgaatttataaagcaaagatatgaaaaatactcgttgcacggatttttgtgtacctaaaaattcgtctatcaaacaattattaaaaactatgagagtcactatattcttacttttcttttgtgtgttcagcacaatcgcaggtactgtcaattctcaaaatgccagggtatcgatacataaaaccaatgtccctttggaagaaatacttaatgagatcgaacatcagacagattatttatttatgtattcgaataacattgatgtgaaagaacgtacttctatccgcgtttcggagaaaccggtctcggaagttttaaagaagttgcttggaaacaagattgcttatgagatggaaggcatgcacatcattctatcagataagagagagaatcaaactgcaattgcccagcaggcgaataagatccaggtgaaaggtaatgttacagatatggccggtgaacctgtcattggcgccagtatattggagaaggggactaccaatggtatcgtaaccgacttcaacggtgatttctccctgaatgtaaatcccggtgccgtgctggtggtttcgtatatcggttactctgcacaagaagtaaaagtcatccccgggaaggtgttgaaaataaagataaaagaagatgcggagttgttggatgaagttgttgtagtgggttatggaactcagaagaaagtgaatctgacaggtgctgtggagactgtcgatgcggatgtcatcgagaaccgtccgatacgcagcgcgaccgatgccctgcaaggcaccgtatccggattgacggtaacttcgggtacaggcaagcccggagagtttgcctcttttaagatacgaggcaacacttctgtgaacagtgccggcgcattggtgatcattgatggaatgccgggagatatcaatacggtaaacccacaggatattgaaacaatctcggttttgaaggatgccgcttctgccgctatctatggtgcaagggctgcggaaggagtcgtgcttgtcactaccaaaaaaggaacttcggagaaagtgaaggtagagtataccggaaacttctctttcaatactcctacacgtctgcccgaaagcaatacaggactggatcatgcattattatccaatgtcgcgtttaccaatgccggactggccgttcctttttctcaaaaggcaatcgatgccattaaagatccgaatacgattgccatccccaacggtaaggagtggacatatacttcggatatggactggattgacctgatgatggaccatagtttccagcaaactcataatttaaccatttcgaaagcttctgatcgtttgaaataccttttctctatcggttggctcgatcagaacggaatgttctctgagtatgggccggacaattatgaccggattaatctccgttccaatatcagtgtcgagttgatcaaggacaaactgtcactggacagtcgcatcagctattcacgtggagtgaatctttatcatgctgccgagggttcctggtcgattccttatatcacctttatacaagcgggtcccaatatgcctgtttatgatcccaacggaaattattcgcggcatcgtatgcaattgaatccgatacaggctctgaaggaaggtggcgaagggcgtactcgcaatcaacgtatcgagggagtatttactttagagtataaaccggtgaaaggtctttctctccgggccgtaggaggcgccaatattttggatggacagaagaaagaatggcgcagagcttacggaaaatatggagtggatggtttgatttcaacagcttttggccagaaaagcccgaactcggttacgcagaacaactcccatcgacaatatctgaccggacagttgattgccgaatacaaaggggtatttggaaaacatgatatcaatgtcctcggcggatggtcggccgaagaaaacctgtatgaagatcttcagggaaagcgtaccaatattgtcggcaatgaactgcctgcactgaatctgggagataccgacggatggtcgaatgccgctgatgaaaatgaatgggcgttgctctccggatttatgcgtgccagctatgcttttgctgccaaatatctggtagaagtgaatttccgtgcggatgcttcttcccgtttctcaaagaaaaacaggtggggagtgttcccttcggcatctgtcggatggagaatcacagaagagaagtttatgcaaaatcagcacatctttgataatctgaaattgcgtgcttcgtggggacaattgggtaaccagaatggattggggctatacgaccacattgccagctataacatcaatggatattatccttttaagtcggaattgggacaatgggcggttatctcgaaattgccttcagagtccagaacctgggaaactgtagaggtgaaaaatattgctgtcgacatggcattcctcagaaaccgtttgactgtaacgggtgaatattttattaagaagaacaaagatatgttggtcagcatcgagatacccagtataataggtatcgatgtgcccacaggaaactacggagaacttaaagtaaaaggctgggaagttacggtcggatggcaggataagattaaggatttctcttacggagcccgttttaatttgtcggatcagaaagataagctggtggattatggtgtagaatacaatggttttgtggccggtgtcaatcagaaagtgcaggggtattccttggggtctatctttggataccgtacggacgggtattttacttctgaagaagaggtgaagaattcggctgccttcaataaggccattacaggtgtgggagatattaaatacatcgataaagacggcgacggaaagatttcggctcccaatgatctggaatatctgggaactacgactccccgttatacattcgggttgaatctgactgccgcatggaaaggattcgatctgggagtgttattgcagggggtaggcaaaagaaatttttatctgtcgagcgaagtgatgaacccgtactacgctacctggaataacttctcgtataaaatgcataatgactattggactccggagaatcccaatgccgcattcccccgctattacgccggtgccaatcataattaccagatatcggatcattggctgcagaatgccgcttatgttcgtttgaagaatctgcaattgggctatacgataagtccgaagcttactaagtcatgggggattcagcgtttgagagtctactttagcggtgataatctttgtgagtatagtaaactgaacgataatttcgatccggaactgtctgatattaacggatatgtatatcctattatgagaaacttttcttttggaatcaatgtgacactttaattcttggagtaagatgaaaaatatatatctttttttgttaagcgtagtaattctttgcagctgtaacgatttcttggatcgtgaacctaaaacaaatttgtctcccggcagtttctggaagtcggaagaagatttaagattggcagcgaacgtgttttaccagaatatgaaccgttcttatacgctggataatcagagtgccgacggttttgccaatgtaggaaacctggtaagttccggaacacacgctccaggcaatactgatgggatatggaccacagcctataaacagatacgacatgctaataattttctggagaattatgagaaagctgaggtgagtgaggccacaaagaaccgttatgcaggtgaagcccgttttttcagggcatatttctatttcaatctggtgaagcggtttggagatgttccatacgtattgcgtacactcgatatggactcggaagagctgatgggaccgcgtgtacccaaagagcaagtgattgcaggcatcatagaagacctggagtttgccgaaacacatattccactgaaaagtaagttgcctacagatgtaggacgtttgactaaaggagccgctcaagccatgcttgcccgtgtggcgctttatatcggtacctggaataagtttcatggtagcggagagtataagagctatcttcaaatagctaaagaagccagcaagcgactgattgactctaaagaatattcgctgtacgccgattaccgtaatctgtttttgcttccgggcgaagattcgaatgaacatattctgtcatttcgttattctgccgaagccgatacgtacaatccccgtatccgtgctacaatagccgacttgtctcatagtccgacgaaggtattggctgatgcttttctttgcaaagacggacttcctcttgagaagtcggcctaccgggtggaatatcttcctgcgggaaaagagttcgagaatcgtgatcctcgcatggcattgactatctggaaacccggcgatccttttttaggcaaaccgtttgtgcctaatctcacgagccagacacgtaccggatatatgtttaagaagtatggcgacgaggagtcttactctaacatgaagtcgcggattgatgagattctgattcgttatgcagaagtattgctgacctttgccgaagccagtttcgaactggacgaccggatttccgatgaagacttgaacctctctgtcaatgcactccgtaatcgtttcgagggagatcctaaccggctgccggatctgaccaatgcttttgtagcagaacacgggttaagcatgcgtgatgagattcgccgtgagcgcagagtggagcttgccgccgaatcgttccgttatgacgatatcattcgttggaaaacggcagaaacggagttgcctgccgctatcttgggtgccaagttcgatccggaactctatccgtccacagttcccggtaaagatgtcattctggataagaacggtttcatattggtacagaatgccgaaagccgtacgtttgatagttcgaaagattatcttttccctttgccgctgcgcgaagtttcgctgaatccgaatttgaagcagaatcctaattggtaattagtttctggtaaagtgattgtttggagaggagcgttcgtcaagcgctcctcttttgaatggtcttataaaaaaatggaaacatgaaaagactgattttaccaattgcatgtggcatttgcactgttacctctgatgcacagaccgacaaacaaccgcatcccaatgtgatcttcatttatgcagacgatttgggatatacggatttgagttgtaccggaagccgtttctatgaaactcctcatatcgacaagctggcaagagaaggagtttgttttactcaatcctatgccgcatgtccggtttcgtcgccgtcccgggctgctctgttgaccggtaaataccctgcccggatcaacctgaccgactatattcccggagaccgggcgtacggtcctcataagaatcagcggttggcttctttgccgttcaatctccatctgtcgaaagacgaaataacgatggccgaggccttcaggcagaacggatattctacctttatggcaggcaagtggcatctggccgagtctgccgaatactatcctgagcagaatgggtttgatattaatatcggaggaaataatacggggcatccctccaaaggatatttttcgccttatggtaatccacaactgaaagacggtcccgaaggagagtatctgacggatcgcctgactgatgaagtgatccgttatatctcggagcctaaggaaaagccgttctttgtctatctgtcctattatacggttcatctgcccttacaggcaaaagcggaaaagatagccaaataccggagaaagctgagccgggcggttcctgcggattcatcttttgtgaaaaaaggagagacgtatcataaacttgtgcaggacattccggcttatgccgcgatggtcgagagcctggacgaaaacataggacgcctgttagacaccctgcatcggtcgggactcgatgaacgcaccattgttgtgtttacgtccgataatgggggaatggccaccagcaatactactcgtaatatcccgacctccaatctgcctttgcgtgccggaaaaggatatttgtacgaaggaggcatcaaagtgcctgccatcatccgatggagtggacacctgaaaggaagacaggtttcggatactccgatcatcggtacggattattatccgactttgctcgatctttgcggattgcctctactgcccggacaacacgtggacggagtttccatgaaacccgtcttacagggcggacggctgtccagaccttccttattctggcattatcctcattatagcggtggactgggtggtcggccttctgcggctatacgtgagggggattataagcttattgagttttttgaagaccatcacgtcgagttgtacaatgtgattcagggcgaatccgaagagaaagacctgtcacaaatataccctgagatagcagatggactaaggaagaaactatatttgtggtataaggaggtcggtgcccgaatgcctgttgataatccccactatgtttctcctgtgaaggattccgactcttttgaaaataaataatcgtttgtacttaaaatataacagatatgaaattcgttaccttatcattgttagccactgcgttgactgttggcggaaatgccgccgagcaggcacgttcctccaagcagcccaatatcttatttattctggctgatgactttggctggagagatctggcatgtacgggcagccgttattatgaatcgcccaatatcgatggaatcgcccgtaatggcgtgaggtttacccaaggatatgcagcctgtcaggtgtccagtccttcccgtgccagcattatgacaggcaagtttaccgcccgccacggaataaccaattggatcggtgaaggaagtggagaagagtggcgcaagatgggaagacattccaagcttcttccggcccaatacgtatggcaattgcccaaagaagatattactctgcccgaagcattgaaagcccacggttataaaacgtttatggccggcaaatggcatttgggaggtgagggttcttatcccgaagatcatggtttcgatatcaatataggcgggcatgaagcgggaggtccttatcccggcggctattttgctccctatggcaatccgaaaatgaaagaaggaccggatggtgagaatttatccatgcgtctggcacacgagacagcgtcgtttatcgaaacccatacccgccggaataaaaagcagcctttctttgcttttctctctttctatgccgtgcatgcgccgattgagaccactgaagccaagtggaggcatttccggaataaagcggattcgatggggatcgctccggtggggttcgaagtagaccgtacattgcctgtacgtttgcagcaggataatcccatatatgccggactgatacagcagatggacgatgccgtgggagtggtgcttgccaaactgcatgagttgggtttggatgaaaatacgattattgtgttcaccagtgataatggcggagtgtcttcgggcgatgcatacgctacctctaactaccctcttcgcggcggaaaagggcggcagtgggaaggtggaatacgcgtaccgttatttatcgattttccgggtaatactttaaagggagattcgtgcgtggtgcctgtcaccggtgccgatttgtatcctacttttctcgatatggcaggcatccctttaatgcccggccaacatcaggacggtgtaagcctgcttcctctgttacagggcaagagcatccccgagcgtgctttatactggcattatcctcattatggcaatcagggtggcgaaccttcttccatcatacggcaaggcgactggaagctgattcattattacgaagatggcagggatgaactttataatctgcggatagacgaaaccgagtcggaaccgctgaatgtgcaatatcccgaaaaggtggagttcttgagtaagaagctgtctgtatggctgactgaggtaggggccagatatcctgaacccgatcctcaatacaatccggcagcggaggctctctataagaaaaagactcgcgaaagaatgatgaaaaccttggaagctacccgcaagaagcagttaggcaaagatttcaagcctaatgcagactggtgggggagcgaaacgaaagattaaggacgggaaattatgaaagagcggaatcggatggtcagcgcagcaccacccggtcgcctagtcgtttggccatcagattctgtatctccttcatctccttgtaccgttgcatgacagcgtcgcactgggcgttgtcattcgcaatcgaaggatcttgcagggcatacatgatgtgcttcagctcttctgcgacaatggcgttcttgaagttaatcatcagcatcgggaccatctcgtacagccgttcctcatccgtcaccaacttctgtgttttggagtgatacttgctcagttgataccggtcactcgccagttcggtggctatcgtactgattttcggatcggggtgcgccacgaagaagcgttcggaagcgaactcctgatcgtggatatgttcggaggcctccgagaggatacggcggtggaggggattatggaaagccagttcgtcctccttcaggtcattgatgacatactcgacaacggtgaccgggacttcgttgccttcttcatccgttaagttacacatcaccttctctccatagcgcacaatcatctgaataatcaggcgctcgtatttataaaactcttgtccctctttaccttcctgcgggatgaacgattggtaggtgtctgcctccatttcttcgggagggaaaggaggaggcatttcgcccggttgcggcgtcggggcattattggaggctatgggtttattccccttctcggcctgaagttccctgcgcttggccacttcggataccagtaacttatcttctatccgcaacaactgcccgcactccttgatgtacacatcccggacgatggcttcgggaatcaccgcaatgctgcgcacgatgtcgttgatcagctcggcacgtttcatcgggtccttgccggcatcctccatcagcagttgtgccttgaagcgtataaagtccgtctcgtgttcctgtatgaagttctgaaactccgtagcgttgtgcttccgtgcaaaagagtccgggtcgtctccgtcgggtaagaggcatactttgatattcattccctcttcgagcagcatgtcgatcccccggatagaagctttgatgcccgccatatcaccgtcataaagcaccgtgatgttgttggtgaaacggtggatcaaccggatctgccccggtgtaagagaagtaccggacgaggccaccacattctctactcccgactggtgcatcgatataacgtccgtatatccttccacaaggaagcagcggtcctgctttacgatggcctgcttggcaaagtagatgccgtatagttcgttgcttttatgatagatttccgattcgggagagttgacgtacttggcaagtttcttgttctccgtgctgagcacacgtccgccgaaggcaaccactttgcccgaaagcgtgtgaacgggaaacatgacacgtccccaaaagcggtcgcgcaacttatggtcgtccgtttcataacagagtccggtctttaccaggaactcttgtttgaaccctttgcgcaatgcctcctgtgccagtgcatcgcgcccctcggtgctgaaacccaactggaacttatcaataatatcgtcacggaaaccccgttggcggaaataagccagtccgatgctgcgtccgtctacatggtttttcaggatattctgaaagtagtcgcgggcgaagttgttgacaatgaacatactttcgcggttgctttgcacctctttctcttcattggtcagctcccgttccttgatttctatgttatacttcttggccaggtagcggagtgcctcgggataggacatctgttcgtgttccatgatgaagtgcaccgcgttgccgcccttgccgcaactgaaacacttgcaaagtcccttggagggagacacgctgaacgagggagttttctcgttatggaaagggcaaagtcccacgtagttcacaccgcgtttgcgcagcgtgacgaagtccgaaaccacttctacgatttgtgcggcatcgagtatacggtctatggttgcctgatctatcattgttttatctccttgcggatgcaaatgtacgtgatatttcttggataatcaaatgacttttcagtggattcgacaggacctgccgatatatctgccgcttacttaatgatctctgtacgcgctgtttcgcattaaaaagttactaaatagggggttagtctgacgggtgcccgatctttttcttgccaaccggaggaagaaagtgcaaaatggcggccttttggggtcggagagccgggctttggggtaaaaagagcttgtgttcagggtaaaaagagcttgtgtttttgggaaaagacgtaagcattctccccgaaagacgtaagcatttcccgaaaatgattacttctttttcaaatatctctatatgttttccatgattacatatattgttctgtttaaggacggatttttctccgtatttctttccggttgcttggctgatacggagctttcttttctgccagaaagatgctcccgttgcttccgggtggatgatatgatacagaaagaaccctttactgctcaatatgcttcttatatcgataaatgcgatcaatcggatcggaggaaaaatgaattagagccgttttttccttcttgcctttcccttggggctaaagaatgaaaactgggcgcttcttattatcattttgacattttgcttatcccgcgaattagaaaagaaaagagaggggatgtctgtgatgaatgatgacatcccctcatacttatgataaagattatcatttaattttctctcgtatcttcgtcaggtactttttcattccctccgcatctttgttggtgatgatctcaagcagttgtttcagctctgtgcggatgttctccacttgtgacggtgtgcgcggattgaacaggatttcctgcaataagtagtcatcttcgctcagcagccctttggcaatggccatgtgctttttgaatgtggttcccggagcttcctggtgcttcatgacagctgcaaaaacaaatgtcgaaacaaacgggatggacagggagtaagccactgtttcatcatgctcgtcgaaagtatattcgaagatgttcaggttcaggctattgtataagtctttaaagaatactttccccaaatgatcactctcactgatgatgatggcgctttcgctgctcaggttgctcaggctggcaaaagtagggccaaacatcgggtgagtggagacataacggaatccgctttcttcgtagaacttcttcaatccggtttttaccgaagcgatatcactcaggatacagtctttgggcaaaaccggcagaattttgcggaaagcgtccagcgtgtatttcaccgtggcagcattgatcaccagttccggttcgaactccttgatctcctccagagtggtgaagcggtaggtgttgtatacaaaccgaagctgatgcgggttgacgtcgaacacggcagtctcgtgctggaaacttagtatgtcagtaaagaaggagcccatcttgccggctcccaaaattagaattcgcataatatgaatgatttgctatttattgataatctccatctgttgacgaaccgattcttcgtggatggcttcgaagatcactttcacaaactctgcactcatgccgcactgttcgccctgagcaccgcgtttttcaagaatctcgttataacgtccggtctgaagcactgtgatatcgtgttcctttttgtaagtaccgatttcgcgtgctacgcgcatacgttttgccaattcctgtatgatgttgtcatcacattcgtcaatctgcttgcgcaatacgttcagattctccgttgtctgcgtttctttacggatgacaagcaggttgaggatatagtccagtacgtccggagtcacttgctgtgaagcgtcgctccatgcacagtccgggttgcaatggctttctacaatcaatccgtcaaagttcaggtccatagcctgctggcagagaggagctaccagttcgcgctttccgccgatgtggctcgggtcgcagaagataggcagttcggggatgcggcggcgcaattcgataggaatgtgccattgaggcaagttacggtataacttcttgtcgtagctgctgaatccgcggtggatggctcccagacgtttcagtccggcgttgttgatgcgttccaaagcaccgatccataattccaggtccgggtttaccgggtttttaaccaatacgggaatgtctactcccttcagtgcatcggctatttcctgtacggcaaaaggattggcagtggtacgtgctcctacccagagtacgtcgatacccgctttcaggcattcgtacacatgtttggcggtggctacttcggtagatacgtacatgccggtttcttttttcacctctttcagccaggccagtccgtccacaccgattccttcgaaacctcccggcttggtgcgcggtttccagattcccgcacggaagatttttactcctttggctgccagttgggtagctgttgacattacttgctcttctgtttcggcgctgcaagggccggctattaccatcgggcgtttatcttccacacccggcaataagattgattcgagttccatatcgatctaattcgtttagttgttatttcattattgatttgattcgttccagcgcttctgccagcttggcgtctttgcagcagagagagatgcggatgtatctcgctccgttgcttccgaaaataaatcccggagtgatgaagacgcgtgcttcctgcagcactttctctgtcagttcttctacatcggcgcaacttgcggggatttttccccagagaaacatgcccacctgcttttcgtcgtacgtgcatcccagcgttttcataatctcgccggccaggtggcgacggttccgatagtttacattgttgccttcgtaccaggtcgaatccgcttcaagtgctttggcagctgccagttgcatggcacggaacattccgctgtcgatgttgcttttcactttcagaatccattgtacaaactctgcgttcgaagccagcatgccgatacgccatcccggcatattgtgacttttactcatggagttgaattctatacagcattctttggcacccggcacactcaggatactgatcggcttatcgttcaggataaagctgtacggattgtcgttcacaatcacgatgttcttgcggcgggcaaactccaccaggcgtttgtacagttccggagtagcgttggcaccggtaggcatgttcggatagttggtccacatcagtttcacgcggctcagatccatcttttccagttcatcgaagtccggcatccatccgtcttcctctttcaggttatagttcaccacctcggcacccagtattttgcttaacgaagtgtaggtgggatatcccggattgggcaccagtacttgttctcccggattgacaaaagcgagtgtcacgtgcaagatgccttcttttgatccgatcagcggctgaatttctgttgccggattcagttccactccataccagcgtttataccagtcggcaaaacccttgcgaagttccggtatacccacatacggttgataaccgtgtccgttcggatcgtgggcattattacatagcgtttcgatggtctgttccgaaggaggcatgtccgggcttccgattcccaggctgattacatctttaccttctgcgttcatccgtgccacttctttcagtttcttcgaaaagtagtattcgcttacaccggccagtctgtcggccggcgctaccttatacgtttgattttccttctgcatattcgcctaatattttaagttctttcgtcaatggagtgattgctgtaatcgattgtttatatctcaggtaatcgttgaaagctacatctacgtaaaactggtattcccattcccgtccgatgatagggagcgattgtatttttgttaagttgatattataaaaagatagaatagacagaacctgtgagagacttccttcggagtgggggagagtgaaaacgatgtttgctttgttgagaacggtgttttgctttcgtatctcgtccacctgccacggatctgccactaccagaaaacgggtgaaattgtgtttgttggtttcgatgccttcctgcagtaccttcattccgtagcgttcggcagcggcacgggaacagatggcggcgtgccctttcaggttttcccgtttgatgatttcggcactcaaagccgtatcttcggcttctaccactttgatacgcgggtgttggttcaggaactcccggcattgcatcagggcaatcgggtgagagttcacctcggtaatgtcattccagtcctcttcgggcaggcaaacgaagctatgcgaaatgcgtaatttgtattcgccgataatttgtgtgccgctttggcgcaacaattcgttgttgtgcagcaggcttcctgcaatcgtgttttcaatggccagcatcccgatggtctgactatctttccggatggcagcaaacacatcttcaaagttggcgcaacagattaattctatctcttctccttcgaagtacttgtgtgcggctatatcgtgatacgagcccagtgttccttgaattgctattcttttcattcctattgagtatatggtataaaaaaatcccgcgtccatgtcggagcgggattcatattattagtttctcttaatttcagttcttaagcaccctgtcacttgatacatacaaactcccgctctactttctggctaaagtaaaagtaaaaaaagaagtaatatgtaaaagtgaatacgttcatcagatctattttctttttgttttaaatctgaggcaaaattaatgcttttatcttaaacgcaaataaaaaacaaacttttttttgtgatttatgtgtttatattcccaatttgtgcttttatgactataaatggcctttataatatagtatataggcttgtctttgttaatgtttgctaaatgggacgtttcagttcttaagatgctagtttttctcctaaaaacttcttttatttgtcagacaaataagattaatcttattttaactaaactgaattgttatactatggatacattaaaactacatggtcaggcgataactttggtcgatcaggtcgaagataacctacttacttattttagaaccaaagatctgcgggcaggagatgccattcccaatgagatggaactggccgctgctttgggtgtggcacgtagtgtgctgagggaggccctcagccgattgaaaatggtagggatgatcgagacacgtaccaggcggggaatgattctgaccgaaccttctatccttggaggcatgaagcgggttgtcgatcctcgcattctgagtgagcattccctgtttgatcttttaggtttcaggattgctttggaattgggaatttgcagtgatcttttccagaatataactccggaagatattgttgaactgaaggagattgtccggttgggaatcgcttttgagaacaatgaatatgcccctatcagtgaatttacttttcatgctaaactttatgagataaccggtaatgccactatccgtgaatttcaggagatcatccatcccgtgatggtttttgtgaaagacaaattcaaagagttgctcgaacctattaatatagagataaaagagcggggagaattggtaactcacgctgaccttctcggctttttggaaaaacatgatgaggccggttatagaaaggcgcttgagaaacattttgccgtatacaagatttttatgaaacgtagaatcgttaacgaataatcggggggattgcaagaagtcaaacagaattttagcattcccttggggaatatctggaggatggccgttcttttattgcaggtaaccgggtaaataaccatttattgtagctgcgcagccattttatacctttgttatcgacactaagaaatgggtttccaatcagagattccttattcttattaatatctaattaaataataaaatgaaacattatcaacgtttggaaggaatggttgccgccacttttactcctatggatgcgcggggagatatcaatctttctgttatagacaaatacgccgacctgatggctgaatcaggaatggcaggtgtatttgtttgtggaaccacaggagaatctcattcactgactacgggtgagcgtaaagctattcttgctcagtggataaagtctgcccggaaacgcttcaaggtgattgcgcatgtgggtagtaactgccaattggaagctatggagctggctcggcatgcacaagaggtggaagctgatgcttttgccgctatggctccctgtttttttaaaccctcttcggtaaaggatctggtggacttttttactccaattgctcaaagtgctcccgatcttcctttctattattataatatgccgtctatgacgggagtatctctttcggttccctcttttcttatagagggaaagaaaacgatgcctaatctggttggaacaaaattcacacacaataacctgatggagatgggtgaatgtttggaactcaataatggagaattcgaggtgctgcatggatacgatgaaattctgattgccggattggctttaggagccgttgccggtgttggtagtacctacaattatttacctgctgtatatcagaatctttttgatgcgttcaagaaaggtgatatctgtactgctcgccggatgcagcagaagtcgattgaaatagtaaaaataataattaaatatggaggaggtgtacgtggaggaaaagcaataatgaatttaataggtgttgattgcggccggtgtcgtctgcccgtcacaccatttggcgatgatgaatattcttcgctcaaaagagatcttgaaaaaataggtttcttgaattaaaaaataaaagtagggaaggggaaatagactttggacggaatatacccccttcgccctacgccttaaattttatattaaaagcatacaaagatgagaaaaattactcgaattaagtgtctcattgttgttttattgacatttattgggacattagcacccgttcatgctcaacaaagtggcaattttgagattagtggtgttgttaaggacacatccggagaaccggtcataggtgctacagttattgtaaagaacacacaaataggtacaactaccgatgtcgatggaaaatttaaattgaaggttccacataaatctttgttacaaatctcctttattggaatgaaaaccaaggatctgaaagtaaccaataatacattttatgaaattactttggaagatgaatcggttctacttgacgaggtcgtagccatcggttatggaactcaatctaaggcaaccgttacttcaggagttgtatctgtgaagaaagcggagttaatgtcttctgtctctgcatctcctttgaacaatctacagggaaaggttgctggactggatattcgacagactaccggacagcccggtgcacagccggtagtgctgatccgtggcgggtcaaccgatccggctaacgactctcctctttttgtcattgatggggttgtccgtagcaacatgaatggactcaatcaggaagatattgagtctatggaagtactgaaagatgccgcttccgctgcaatttatggtgctaaggccgccaatggtatcattcttattactaccaagcaaggctcttcaaaagatggtaaagccactatttccgcttcctaccgtttgggagttgagcagattcggcagcattatccgttttccggtgcacgcgactatctgtatgcttcccgtttagccggttcccgtggaatcaatgacgccaatgtcagcggacgcttggaaggcggcgcatatccttattcaacaggtaatatcaattataaaaatggagccttggaaggatatggctattctcgtttcactaccgaatatttagatgatttgatttccaatatgggacagtcttatgtcgatgatttgctgaacagacaaggatatgaaacgatgaccgatccttattcgggaaaacagttgatatttaaagacaatcactatcaaaaagatgtattgtttcagactgcattgacacacaactacgatctgagtgtttccggcggaaatgacaaaggtaattattatgtgagtttggggtatattaattccgaaggtattgttctgggtacgggatacgatcgtttcagccttactgccaatggaaattacaatcttcgcagtaatttaaaattaaccgtcggattgaaacattccacaatttcgaataaagcgactgatccggagaactcgggcacaagcacaatggaccgttcttctcgctatcctacgaccttccgtctgtattatgacgatggaactcccggtattggtgaagccggaggctcaccccggaatagactgcacgaattatattatcaggatatttcggacaaagcttatcgaaacacgattcagttaggattggattgggagattctgaagggattgcattttaagccgtcagcctcctattatatgcaggaaaatatctatcgtttttttgagaagtataacgagtttaataaaggtcgtaagacactcgagaaacacgaccagtataagcaaatcatggcagacgcggtgtttacctatgataaagtattcagtgataaacacactcttaatgcaatgataggtatgaattatacccaggacgatacttataaattgaaaggaacaggctcggaagcccctacggattatgtacctacgttggcgcctaccaagcccgatttacagcgtaccacttcctctttggataaagaagtactggtaggtttctttgcccgtgtcaattatgactataagcgccgctatttgctgacggtttcagcacgctatgacggagcctcccaatttgccgaagatcataaattcgcattgtttccggccgtatccggaggatggaatatgcattatgaagactggtttcccaaaaccgttgtcagccggatgaaattgcgggcgagttggggacagaccggaaataataagttgtcgtattctaatacccaaggcgaatatgcttcatatatttatgccggaaatccgggggtactgaatagtgtacttgccaataacagtttggtatgggaaacaacctctaatgtggattatggttttgatgccggtttctttgataatcgtcttgaactgtcggtaaccggatataataaattgacttccgatcgtttgtatgacaaagctcttccggcacagacaggttttagttctataaaggccaatttggggactgtacagaacaaaggttttgagttatcgctgacagcacatcctctttcaacaacttcccccgtgagttgggatgttacgggtactttcagtatgaacaggacgtatatgaaaaagcttccttataatgggagagacaaaaatcgggtacagggcggacttgtatgggatgctaaatcgggtacttatgttgagaccggcggcctggccgaaggcgagaggataggcggacgttggggatataagtatctgggggtatacgatacagatgaagaagctgcaaaagctccggtcgacaccaaggtctccggttctaagatgaataagaaaaaggttgccggagatgctatctgggccgaccttgacaataatggagttatcgatgataaggatattacttttattggctgggccaatcccgataagaagggagccttgattaataatttgtcttacaagaatttttctcttcgtttggttgtcgattttgctttaggacattccattgccaatatatggagatgccgtgccaatgccaatgcacgcaatgccattataacgactactgacgttacgaatggaaacatctggtggcagacgggtgatgctgcaacagccaagtatccgcgttacgatgttgcttcggactgggataacggatatcgcaatcacatgcgtacaatagcttatgccggaatgaattcaaatggaaatgccgacaatacggcttattattcaaagggagattatttgtgcttccgtgaggtttcgttaggttatgaactgccgcgttccgtatgttctaaaatgaaggtgaaaggggtgtctttgaatgccggtgtgacaaatatcggatacattacagcctttgacggattaaatcctgaacagtacgatggacaagagaccggtgaatactttctcccgattcaatttaactttggtgtaagactaactttttaaaatgattttcactatgaaagcaacaaaaatattgatctgtattctctgctgcacatggatttgcagttgtagcttgttggaggttgatccggtttctaccatcacttcacagtcgttctggaaaacttcgggagatgccaaagcttatcttacgggcatttacaataaggtgcgtgacctgaataatacttcttattacggtgaagaccggggagatgcttttaaagccggtgagattggccctacgagtgtggcatgggcccatactttgcttgagagcaatgctccttcttatcgttcggcttataatatcattcatcacgccaatcttcttttcaataaaattgaaagtctgaagtttactaatgagactgagaagaatcgtataaaagctgagtgtcactttctaagagcatatacttattttcttatagtgcgtatttggggagatgctcccatcattactgatcctgtgctttcggacaacgttgagcttaaaccccgttctcccaaagaagacgtcatgaagttgatccttgaagatatagaacagtctgtcctgttatttccggaggatggatatatcaataagaatttagcttcaaagccggctgcctatgctctgaaagccgatgttttaatgtggaaggcaaaggtcctgaatggtggaaatgcggatctggaagaagcgatcaaggcaatcgatcaggtaggcgggagtggagtgtctttgctaccggattatgcaaaggtatttgccaatgataataaaaagaataatgagatcattttctctttttattttgaacgctatgaaactggaaatctttctattgcaaccaacactacatcgagaaccgataatttatcgatggctgtcaacttagccgatgcggcaacttcacccaatcagagccgccatgtctatgccccaagtgacaaggccagagagttgtatcttaagtatccgggcgataggcgctataaagttgccatgattgatttggtggataaagatggtaacctgattttaacccagacaaacaaattcagggggaaggcctattccgacgatcgttattttgacgatgacttgatagcttatcgttggggagatcttcttctgttgcgtgctgaggccaatgctgcactcaataagatatctgagtctcttgtcgatctgaatgaggttcgtgaccgggcgggcctggagccctatgatggtccgaaagataagattgctgtagagaaagaaatctgtgacgaacgtttaagagagctttttatagagcaaaaacgatggtttgatttggtgcgtttccattgtggcgggaccattgacatttataaggaggtgcccaatttgaatgacaaacccggttatccgttgtatttcccaatcaattataatgatatggtcttaaatgacaaactggtgcagacagatgggtacgaaagtaatgtagagagatagaatataaaaagaaggaactgtgtggagtagctgttatatacttttacacagttcttttgatacggaagtataataatttaaagcataagtttatgaagaacacaatcttgaaactgtttctattgttttgtgctgttccttcaatcggacaaaatgtacatcccaatctgccatggatcgacatatcggggcagcgtgaacggcaggtgacaatagctccgggaagaccggatttatataacggacatcctactactgtaatgatggatgatcataagactattctttgtacctggtcttacgggcatggaggtaaagcgtctttcatagccgaaagtaaggatgcggggctgacttggaaaaatggtaaaacccctgctgactggcagacgatgagcaattgtcccagtatttataaactgacggataagcaggggaaagaacgtgtctttgtgtttagtgcctggccggacatgcctatgacttatagtgaagacggagggaagagctggagtccggtccgtagtttgaataaaccttgtgtgatggcgttttcaagcattgtaaaattgaagaatggcgattatctcgggttgtatcaccgtggactgaatgatcgggaccgtcctccgttgactttgtggcaatctgtctcacatgacggaggactgacctggagcgagtcggtgaaagtaggcgagatggaggggcgttcaccctgtgaaccctgtgtcttccgcgctcccgatggcaaacggcttgtctgtgtagcgcgtgaaaataaccgggtaggcaattctctgatgatgttttctgatgatgagggaaccacctggtctcctttgcaagaaactccctggggcctgaccggagacaggcatgtaataaagtttactcctgacggtcgtatgattgccgtctttcgggatatggctcccaacagtccgacgaaagggcattttgtagcctgggtcggtaattataaagatttgcttgagggaacttccggacaatataaaataaagcttttacatagttatgccggttcggattgtggatatcccggtctcgaaatccttccggatgggactattgtcgccatcacttatgttaaaatgcgaccgggccctgaacaacactccattgtcggcgtacgcttcaaacttgaagaaactgataaaatgctatattaacttttatccccaattttaccaatatgcgttatatttcgatattgtttttattgagttgttttttactcagtacttcgttacgtgccgagcgggtgaaagttattgttcgacagcccatagtaccggtcttgacaaaaaaggagattaatccggttttgcaattaaagttgataaagagctgtccgggaccatgttttgtaaaggagatcggattatccctgaaaggtactactttgttgaccgatttaactcatttgagtttatatagagttgccggaaagagggggctttctgactgggaaaagtgtgtcgactcagttgctcccgctttaaaaacggttttagacactccgttggaattgaaatcagatactaccatactgtgggtaactgttaaattgaaagataaagttgacttaacccatcgtgtgacggtcagttgtgatcatgtgacgacgacttgtggtaaggcttctgtaacttccgttcgtccgattgtcgcactccgtaccggagtcgctgtacggcaaagaggggaagacggagttcatacttcgcgtattcccggcattactacttccctgaaaggaactttgatggccatatttgatgcccgttacgatagttcgcgtgacttgcaaggtgatatcgatattgcgatgatgcgaagcctggatggtggaatgagctggcagccgatgcagatagtgctcgaccgcaaaaagtggggtggattgccagagaaatataatggaatcagtgatgcttgtatcctgaccgatgaaaagaacggtactatttatgtggcgggactctggatgtatggagtcttaaatccccgatcgggtaaatgggtggaaggaatgacgcaggacagtacccgttggatacaccaatggcatgcgaaaggttctcagcccgggctcggggttaaagagacctgtcagttcttgattacgaaaagcgtggatgacggactgacttggagtgaccctgtaaatataacagcacaaaccaagaaaccggaatggtggctgtatgctccggcaccggggcatggcattactttgaaagacggtacattaatatttcccacacaaggccgtgataaagatggaataccattctctaatattacgtatagcaaggatgggggaaaaacatggatagcctctaagccggcttatcacaacactacggagtgcatggcagtcgaattacaggatggcagtgtcatgttgaatatgcgtgataaccgtaatcacggtaataaaaaggtcaatggacgccgtatttgtgtcacctccgatctgggaagcacatggacggaacattccacttcccgaaaagcattgatagagcctacttgtatggcaagtattcatcgacatacttatcaggaaaacggcaggcaaaagactcttcttctattctgcaatccggagtcttatgacagtagagaccacatgacgctaaagtgcagcctggatgatggaaatacctgggattccggccggaaaatcatgttggatgagttgggaagttttggctattcctgcataacttcggtcaatgattctacgattggtgttttttatgaaagtagccaggcacagatggttttccaacaaatacagttgaaagagctcataggtaaaggtaaatcatataaagagagatagttggtatgaaaaatagaaaaatatatccttggatcgttgtcggacttttatggtttgtggcattattaaattatatggatcgtcagatgctgtcaaccatgaaagatgcgatgcagatagatattatagaattacagtcggctaccaattttgggcggctaatggcagtcttcctttggatttacggtcttatgagtccgatggcaggaattattgccgatcgcgtcagtcgtaaatggttgattgtcgggagtctttttgtttggtcggcggtcacttatggcatggggtatgccgatacatttaatcaaatctactggttgcgcgcattgatgggagtcagtgaggcattatacattcctgcgggcctctccttgatagccgattggcatcaggagaaatcacgttcgctggcagtcggtatccatatgacgggattgtatgccggtcaggccattggcgggtttggtgctacggtagctgcggcttattcgtggcatactacattccattggttcggtattgtaggcattgtctatgcattggtcttgattatattccttcgtgagaatgaagaacatgccagggtcattcgggccatgcatacagataaatcaaaaaagattccgttgtttaaaggagtgactcttttattcggtaatattgctttttggattattctgttctattttgcggctcccagtcttcccggatgggctacgaagaattggttgcctaccctgtacgctgagaatctcgatatccctatggctgaggcagggcctatatccactataacgattgctgtctcttcttttatcggagttattctgggagggttattgtcagaccgttgggtatgcaaagacatacgcggacgtatctatacaggcgcaatcgggttagggttgaccatacctgcgcttcttttattgggcttaggcaatggtttcatcagtatagtaggtgcaggatttctgtttggggtcggtttcggtatgttcgatgccaataatatgcctattttgtgccagtttgtttcggccaaatatcgagcaacggcctatggtataatgaatatgaccggagtttttgccggagcagttgtaacaagcttgtttggaaaatggacggacggtggcaatctgggattgggatttgctattctgggaggtattgtattgttggctttgggcatgcagttgtgctttcttcgtccgcacacggataatatggaatgatacaaatcatttcccggacaggagggaataaggttccggtccgggaaatgactgtatcagaacggttagtttacagtcccaatacgtttggggttgtttctgcttgctgattattgaactgtccgttcaggttctctccctctttcgggttcagctccagcgatttcttcatatcttcaatcgaaccgtctttgtccccgtttaatagtttggcacgtccccgttcatgataggcggctccaaagttcggattcaactcgatagcttcgtcaaacaactcaatagcagctgtcaatttcttctgtgtgataaatagttgtcccagatataggtaagcctgttcgttgaaggggtttatctctgtcacatggagatagtccgtctctgcttcttcttcctttccggtggcttcttttattttgccacgtagcaggagggcagcttcttcgtccggattctgtgcaagtatggcttcaatatcttccatagcctctgcaaattgctgcatcttatacagtgcttcggcacggagcagtcgggcttccgtgaaatcatctttcagcacaatggcttttgtcaggtgggcgatggtcattattccgttatccaatccatgattggctttgcccaacaggtagtgtgccattgcgtttccttcttccagtgcgatggctttctgggcggcatcggccatctcctgataatcttcttgcatgaagcagagattggccagggtcaggtacgtgcttgtcaattctggttccagtgcgatcatacgttccagcaactcatgtgctttcccgaattcaccggtctggatgtaaagctggctcagataattcagtgtttcgaaatcttcttcaatggccagcgcttcgttaaagcacttaatggcatagtccggacgtcccatacgttgggcacgcaggccgtcatatttaaatatctcaaagttctttttggcgtttttttgtttttcttcctcagggttttctgttttccccgcaaaaaaagatttaaagaagttcggcatgatcaaagtttttttagtttggttgcaaatgtagtaatttcatcacataaccctgttgcttttcaggaagttttttcagtaagcagtccgttctcagagctcagtaagccctcgtccagcataaaccgtatcacttcgctcaactgctctttatctgtatttatgtgtgaagctatctccgccggagtcatcggatgctctttcagcagagcacatatttgctctctcagtccgtcgaaggtgctttgtgatatatccggttcggcgcggtggctgaggcagacgtcacattgcccgcagttatgttcgttcttctctccgaagtagcggagcagcatccggctacggcagacattctccgaagtgacgtattccaccatggcatggatacgggtttcatagcgttctttccgttcttcatatactgctcggggtatttgcagataatggaggtctatccgctcacgtgtatatataatgtaaggtgtttttttgtgcgggatgtagtcgacgatacggcgcttgctcagcatcaccagcaagtcgtaaatctgttgccgggtcagtcccgtacgtaccgccagagtctgctcgctgatgtaggcatagtctgtaaagacacccgtgtaagatcgcagaatcatttgtatcagtttctctgcagcttctcccatctcacggagtttatacaactcatcccggcggatcgtgaagataatccgtgaggcattgtcttgctcatcggtatattccaggtatcctgcctgtgtcaatatcttcagtgcgctgtctgcaggtacgggaaaatatttgaacttgcggcagaattcttccaggctgaagtcatacatgcatcccagcccgtcgcccatcgccatctgataatgatattgcagatgctcgtacacatcttttatatagtctttatccgggaaagtatctgcaatgcgtttgctgagcgttgttttatccgacttggcatagagtatcaccgcgtatgccttttgtccgtctcgtcccgcccgtcccgcttcctgaaagtaggcttccggtgagtcgggcaggtccaggtggatgacgatacgtacgtccggtttgtcaatgcccataccgaatgcgttggtagctaccatcacccggctttctccgttttgccatcgtttctggcgaagatctttggttgcgttatccagtcccgcatgataaaagtcggccgtgattccttcgtttaccagcagctcggttgtttctttggtttttcgtcggcttcgtacatatacaatcgcgctgccttgtatccggttcagtatgtgcagcaactccccgtttttattatcagtggggcgaacgatgtatgccagattctttcgttcgaagctcatacggaacacgttttcttcccggaagcggaggcgctcctgtatgtccttcactacttcgggagtggccgtggcggtcagtgccaagactggagcatccggtacgagatccctgatatccgctattttcagataagccggacgaaagtcatatccccattgtgagatgcaatggctttcgtctaccgtaatcatactgattttcatggaccggagtttggcccggaagatttcggtatccaaccgttcgggagagatgtatagaaacttatagtcgccgaagatgcagttctccaatgctaccacaatctcttgccgtgtcattcctgaatagatggctatcgctttgattccgcgctttttcaggttctgcacctgatccttcattagagcaatcagtggggtgatgacaatgcacaatccctctttggcaagggccggaacctgaaacgtaattgactttccgcctccggtgggcatcagtcccagtgtgtcttttccattgccaatgctggttatgatgtcctcctgcaggtcgcggaaggaatcataaccccagtattgctttaaaatctcttggtaagtcactctatcggtttgatatcttcaatctgcaactgcacttccccccgtttgtgggtgttctcttcaatggtatagcagatgtcaaatgatcgcttggttttgatatatctcacgtgcgaactttgtccgaaggcgatgccgttcatcacattgttcgatttgttgtctaccagttccagtttgatgtgttcctgatcgcgaccgactaccttgcttgttccataatcgtacacgtgatgtgtgcagaacaccggtttctggttgtcgggaccgaacgggttgaatcgtttcaattcattgaagaacttcggcgtgatatctttaaaatctatttcggcatcgatatcgatcactgcgctggtctgttccggcagtatatgttccgacacgaaactttcgaatctctcggtgaatgcctgtacgttttccactttcatcgatagcccggcagcataggtatgccctccgaagttttcgagcaagtcacggcaatgttcgatagctttgtaaacatcgaaaccggatacggaacgtgccgaaccggttgccatatcatccgtccgggtcagtacgactgccggacgatagtaaatctccgttaatcgtgaggcaacgattccgatcactcctttgtgccagtcttcattgtaaagcactatcgaacgacggtctgccaagccttccagttcggctacgattttattggcttcttccgtcatgctcttatccagatccttccgggtttcgttgtattggttgatttgtccggctttctcgagtgctgccgagaaatctttctcaatcaacaggtctaccgcttcttttccgttctgtatacgtccggaagcattgatgcggggacctattttgaatacaatgtcgctcaccgtaatttctttttccgataatccgcatacatcgataatcgctttcagtcctacgctcggattgccgttcagctgtttcaacccatgataggccaggatacggttttcgcccatgatcggtacaatatccgatgcaatgcttacggcggtcaggtcgagcaacggaatcaggtgatgaaactcaatgccgttactgatggcaaaagcctgcatgaatttgaagcctacgccacatcccgaaagatgagtgtatgggtatgtattatccagtcttttggcattcaggatggcaacggcagggggcaatatgtcgtccggtacatgatggtcgcagatgatgaagtcaattcccttctctttggcatacgcaatctcttctacggcttttatgccgcagtccagtacgatgataagccctactccggtttcagcggcgtagtcaactccttttttggaaattccgtatccttcgttataacggtcagggatgtaatagtcaaggttcgaatagaactgttgaatgaacttgtagaccagtgccacagccgtggtaccgtccacatcgtaatctccataaatcagaatgcgctctttctttcccatcgccatgttcaggcgttccactgcgatgtccatatccttcattaggaatggatcatgcaaatcgggcaattgcggacggaagaatttcttggcatcctgtgccttcgtaattcccctttgtaccaaaagtcgtcccaggacggggctaatgcctagttcctgagccaatgcccggcttatctctgcctgttcttgtgtgatgggtcgataattccatttgtgattcattttatatattgttttttctttttatctgttctctgatgccggaagtgcataactttccaacaagctgtaaaagtacgaaaaaaaccggaagtgtgggggatatactgaaaaaaataattgcttgtgttttgtttatcgatatttggtgcgacatggtgaatctactatctttgtatcgtactattaagtgttataattatgcaagatataataaacgggcgttgcggttggtgcggaagtgacgaactgtatgtgaagtaccatgatcaagagtggggaaaattggtgaccgatgacaagacgctgtttgagtttcttgtgttggagagtgctcaggccggcttgagttggataaccatccttaagaaacgtgaggggtatcgcaaagccttttgcaatttcgatgctgagtcggtggcacaaatgaccgatgaagatgttgaacggttgatgcactttgatggcattgtgaaaaatcgtctgaagatcaaatcgaccatcacaaatgcaaggtcatttctcgccgtacaaaaggagttcggtagtttttatgactatactctatcattctttcccgacagaaaaccgattgtcaatacatttcaatcattgagtgagattccggtatcatctcccgaatctgatgccatgagcaaggatatgaaaaaacggggatttaaattctttggaactacgatttgctatgctcacttgcaggcctccggatttatgaatgatcatctggcggattgcatctgccggaagaggtaaataacaatataactgtgtacagtggaagaggatattttatgccttttgcccgttaacattgttaatgccattttccgatggctttgttcttgtctgcaaataacaagtcttttgcatttaaagaatttgctatttgcagacgaaaaacgaactttaacgtaacgttaaaataaagcttctgcagattgaaatattgtgctctgaagtggctgtagatcatttgtttaaatgtatgtcccgttttccattcccgacagagaaccttccgtatggaaaccggtatacttgcttttttatcaactgcaaactgtactttcctatccggattattttctttttgccttattcagtgctgctatcagataccttccttttgcccctatgtcactccagcaagtattggcaatcagttgccatacccgtgttcctttccttccataatccgatagcctgagtatggcattcacctctcctgcttcggtaatccccagtcttttgagtgtatccgtcagtcccggataattgtgtgtcattgtgttgaaggcgtatccgggtatcgggagaggagcagaaacctcctcccattctttctccttccccttggggggagctgaggggggtaattctttattttcctctgctttcttttcttttactttactttgtccggaattgcatgcattttttgcgttaacggctacatcatgtactacatttcccggactaatggttacattttcaccttccggcgcttctgtttcctgctgagtcaagtcgttcaccagcagatagggcaatgctttcagatccctttttcttcgctttgttgcctccatccatatcttctgtatgtttgccgaagtcagtattccgtttgccagataactgtttctgtccaatatccctttgatgaagaggatctcaatgatcccctgtacctcagcggcctgcacctctcttcccgccttgttggcaaaaatcagacactgctcttcatcccaacggatgaagtatccctctttgtatattttgcacagcagtttcagtacgattgccgaaccctttattccatatttagcttctatcacttccattgcgttctcttccatgaagtttacgcccaccgggaaatagttgatcccgtcatatgctattgccattgttttttagattagtcgtttgtactttcaataatacattcaccataaattaccccggattcccaaagatgtcttcacttgatttctcaaaataaaaataattcatcggtgaaaatccgtgtaatctgtggtggcgccctatacgatcggtctccactccatgaagttctccatctggaatgtcgtccatcgctgttcatccacattccagtagactactgcgccttctatttgtgtgggatcatactttttgtggaattccgcttcatagtagatcagtgtcgctttcaccaacttgaagtctccgttctgcttttgataagcgatggctgcgtgcccgtattgcaggtggtcggtcaatgcttccaggcgctccgccatccattcggcacacatttcagtgtatcctttctcaaagacaatccgttttttccatctcagtttcatggcttcagtttgtgatgccggtcttttcttctgtttcatacgtatatgatttaaagggttaatagataaattatcgccccaaaggtaagtcggatcgaatgtattccggtttgataaaattcattgtaggtatttcagcgctttccttcttggttctttttctttctttccatcttattccagatttcgttgacgtaagttctgattgtgctgaaaactaatggtttgaatactccatttcttatttttccaaaaagttttttttcctctatgtagcgtgccaatgaatctttgcacgtcttgatattttgttcttttgcgtccaatatgtaggattctatcagcgcttttataactccttcattgttggagataattcccggtatctgcgctcctgcttttctgcctcttgcttctttaactatttctgtattagattgttgtatttctctaatagcgttttttaacacttttgttagcggcttgacataatacttttttcttgttcataatatttattattttgttaatatttaaatgatgttaagatgttgcaaaggtagaaaggaatctatcggtaggcaaatgaatgtggaattaaaggaaaaataaacgcttttgtaaggttaactatttgatatgtagtgttgtgttaatggaaaaagggagtgtttcaataaacgttcgtttaattgaacgcaaagatagagggtatttttagaacgacaaaatgtttaataaaaaaaataatttaccgctgttgcttaaacctttaattgattgatatacagtagtctgtgaattgataaaaaacagtctattatctatctgattttgtttgtctcttgtttttgatttgtttacaaaaataatgtttcaaaagacgaacgtctaaaaacacattttttagtgtaattcgtttgtttatagtttcttaccagacaggtaatgagtaactacaagaaaccgtggcaagagagtacaaagcttgccgtatattacataaagtactcgcaagtgattgaatttcaagtgtatgtaagaagttcaaagccccgggagaatgtccttttctgaaataatcgtataatggaagtggaaaaagagaccgaaatatggttcgctatgcgtgccacttatcgtcgagagactgacgctatgcggttgcttgcgaaagagaacttgggctgttttgttcctatgcaatataagataagtataaagaaagggaaaaaagtccgtgttttggttcctatcattcacaatctaatttttattcgtgcttgtccttccgaagtgaagcgtgtcaagtctatggttgcttatttgcaatatatcaccgatacccgtagcggtaagaagatcattatccccgacaatgaaatgcagcgtttcatcgctgtagccggtacttacagtgaccatcttttatactttcaacccgatgaactcaacttgtccaaaggaaccaaagttcgtattacaggtggtgacttcgagggtcaggaaggtgttttcctgaaagtgaaaggtgcccgggatcgtcgcgtagtcattgctatacaaggtgtcatagctgttgccatggccactattcaccctgatcttatagaagtaatcaaataattcataattcaaatttattatgactctttccgaagaagtagcttcccttcagcgtgccgcgcacgacctgatgtatttgggcatggacgggagtcccatttacagcgatgacttgtcccgccgcaacaatgaagtttaccgcttgaccacaacattgtataattccggtgtcaaaggttccacggttgaagaacaggcctctgtctgtctcgctctcctaatgggttacaacgcatcgttcatcgaccacggagaaaagcgcgaacatgtccagaagatattagatcgttgctgggatatcctcgatactcttcccgcttcactattgaagctccgcttgcttaccgcctgttatggtgaggtattcgacgagcctttggctgacgaagcccgtgcaattatcgcttcttgggattcggtgtcacttactagtgaacagcaagaggctatcaacgagtttcagactgtggtggataatccttatccatgggagtatgtttaaaaaaaatattttattattatgctt

SEQ ID NO: 5084 - DNA, 455 bp, Unknown
  gut microbiota DNA sequence
ttcttccggattgcaccggcacttgctttaattgcacctatacctgctctgattgcatccatacctgctctgatcacaactatacttacttcattttacactacccaatgtcctgtgggttttaatagtaagctcctcccgcttccattcccaaccttgcttttaaaatcccctgcccccatacttaccctaatcgcaactatccctttcggtccggcacttatcccttctcccagtaaacactcctttgtctctctattgtattcatcttcaattcttttcttcctttcttttcttctcttcctattacttgatttaaccccctgttaaatcaagtcttttgtctccaaataacaaggcttttagaagcagaagccttgttattttcgtcctggaaataaatgtttccccaaccgcattaacaatgttaacgcaggattccgttcaattcccgt

SEQ ID NO: 5085 - DNA, 378263 bp, Unknown
  gut microbiota DNA sequence
gtaggttttgcttacggtgaaaatgaaatgaagtatgatgaagagacctctatgggcaaatctattgccgagagttggaatcttcgcggcgccttgactatcggtgtcgattactttgttcttcctgcactctatatcggtgcgcagatcgatccgtttgcttatacgtacaacaagactacgtataatccgcaagcaggtcttggcgatctgtcggcagacagccacaactacagtgtgctggccgctccgacatttaagatcggatttaagttttgacctctatctccatccggctgataggccatcggccgggtggacgattttataaataaataagtccatttatttatacctccccggtgtccgtgacggctgtcggggatttttatgtgattggtatcttttggaaggactgaatggtatttggaatatgaaaaagagtaatatatacataggtgaagtgataaaacaggtcatagccgaaaagcaggtgacaaaggccgagcttgcccgtaggttgggggtaaaaccacagagtgtggactatctgctgacacggaaaagtatcgatacggataccctgtatagcttgtcgttggcgctggattatgatttcgctgttttatattccataaagaaagaacatgctcttgctacggacgaagagtctccgtttaaagtgggaaatgcaaagatcagtttagagatcgagttgcgtcccgatgaaatgttgaaactgaatctgaaacagaagattgcagacctgctggaaggaaagggaaagtgattttacatatctgatatcttcttttcacctgcttttctataaacaaatagaaggaagaagggaattacctcgtatttataattctaaaaagatctttttacttcttttgtaagttgttgataattagaggataaatagtagacgaaacaaaattagcagcctttgaaacaaatcttttagttgggaaatgggattccgcgttcctttgcggcatcaaaacaatctcaatcaactaaaaaatttaagtaccatgatgaagaaccagaaaagggctgtttgcttgctggcttgcttgctgatagcgggtttcacagctgcacaggaaaagaaagaatctgctcaaacagcttccggatcaaaggaagaaggcaatcgtaatgttatgctgaacgcttcgagcgccaatggtccccgcgaaatctctatcggcttgccgggtggagacgtaaatgtactcgaaaacggactccccgtagtctatacctctaatccgcataatgtaaatacgcactggcgtggagacagcagtctcgggcacgtcgggttgctcaaaatctccgaaaccgccattactaccggcaatatcggttatgctgtaaactctttcacccagttgggaacagaaaagtttcgtggaatcgtcaattatagtaccaatcactttggcaagcagcagttcgatgctaatatcagcggtggtatggggaaaggatggttctacagtggaagcgtttaccaaaattttgatccgggcagtttcaaactgcgttttacatcgaatcaggaccgtactcaaatctataaagcagccctgaccaagaattataatgaaggacgcggacagctgtcggctatctatcactacagcaacagccgttggccaagcaacgaagtgacttcggcccctttcatctatgtaggcgacggtagcgtgaaagaaataccgggattcagcctcggaacaagttcctatctgcctacaacgggcgaaatggcctaccgtgacatgcgtacgggtgaactgaaggagaccaatctttatgatgccactttgaataaaggaaaccagttgaccttgctcaacacgtacacctgggataatggcctgaactggaagatcaatctgaagtatgatcatgccttgggctcgtatgtctaccagactccaatggccatggaacagaaagatgcctctgccggttactacctgaaagcggtagacggtacattgaaaccgtatgaaggatatgtgcagagccgcatgtcttgccttaaccggggaaaaatcgatgagtttttcgctacctccgaactctcccgttcctatcgtaatacgacctggagaatcggagtgaacgaatggcactataaggtggattatgcttcgaatactaccatgtacgatcatacggtaggggagtatcccgaacgtctggtacgtgaagggaatacagatggtgtatattacgatttcaataagaatgcttcggaatattataaaggacatgaaaacaaactggctgtttatgccactcacgattgggatatttcgcccaagtggaacgtgtattatggcgcccgtctggaatggcagcacctggaaggtgaaaatgcggctgtatacgatgccgaagggaatgccgtaggccgtttcccggattattacctgggagctgtgtccgataaaggagtcaggatcactccccgtcttttcgactacgactggatgaacatggcctttactgccgccgctacttataagctgacccgtgaatttggttttaccgccgatttcacttacaacacacagcgtcccggcttgtcgaactttgcaccggccactatgcccaataccgataaaatttctgttcccctgggacgtgccggggtctattataacaccgattggatcagtctgacctctctgttctcttatatctcgaagacgaataacaactcgacactgaacctgattaatccgaatgaccagactgagattctcgccgccccgttgagttatgacatccaaaccatcggctggacgacggatgcggtgatcaagccgtttaagggcttcaacttccacttcttgttcacttatcaaagtccgacttacaagaagtatgaaacgagtgtgacctttaaagacggtacggtgggggagatcgatgccacagggaatattgtgacggagattccgaaagtgcttgtcgaactggatcccagctataacatcacgaatgatctcaaagtctgggccagcttccgctacttcagcaagacgtatgccaacattaaaaatgcttactatttcaacggacgctgggaaaccttcggaggtatcaactggacggtgaataagcatcttgcgttgagtgccacggttatcaatttcctgaatcagaccggggctaaaggaagcattgccggtgccgaactggtggacaaaaaagatgcggcatcttataacggtcattggatggcgggcagttatattcgtccgtttaccgtggagctggctgccagtatccgcttctgacaggagtttggtatcaatcgttatacaatttgaaacaaaattaatagccggtggcagatatctccgctatatttgccaccgtaaatacggctattacattacttaataaaaataccatgttatcatgaaaacaacttttatgaatgtaagtagaggagtgatcggtgctttggctttctctctcggaatttcgtcttgccaaagttcacaaagtaaaatgacatttgaacaggaaggcgacaaccttacggtgattcatattacaaatcctacgcagtatttacttttgcccgtcgaggagaagactcccgaagcacaggtctgcattgcttcggactcggttccggtagacatggacgtacgcctgtcaagggagaaagtggactattttgttccctttgctttgcctaagggagagaaagaggtagccgtgcgtatccgtcacttgccgaaggaggctttgtgttggaaagaactcaagctttcggatacttttgacacgaccaatacagaccaataccgtcccttgtatcaccatactccactctacggatggatgaacgatgccaacggactggtatataaagatggtgagtatcacttgttctatcagtataatccttacggctcgatgtggggcaacatgcactggggacattcggtgagcaaggatctggtgcactgggaacatttggagccggcacttgcccgcgatacgctgggacatattttctccggcagttcagtagtggatgatgccaatacagccggatatggggcaggggccatcgttgccttctacacttcggccagtgataaaaacgggcagatacaatgtatggcctatagcactgacaacggacgtacgtttaccaaatatgaaaagaatccggttctgactccgtttgacggactgaaagatttccgtgatccgaaagtattctggtatgctcccgatcagaagtgggtgatggtggtgtcggccgataaagagatgcgtttctattcgtcggagaacctgaaggaatggacctatatgagcggttggggtgaaggttacggggttcagcccagccagttcgaatgcccggatatggtagaacttccggtagacggcaacccggaccataaaaagtgggcgctgatagtcaacgtgaatccgggatgttactttgggggaagtgccacccaatactttatcggtgactttgacggagagaagtttgtttgcgacaataagcccgaaacggtgaaatggctcgactggggaaaagatcactatgcgacggtctgcttctcgaatacgggtgaccgtacgattgcggttccctggatgagcaactggcaatatgccaatatcgtgcctacccgtcagttccgcagtgccaatgcattgcctcgcgaactgagcctttatacacaagatggggatatctatatggctgccgccccggtggaagagaccaagtcattgcgtaaagaatcccgggagattccggcttttgaggtgggggatgcttatcatgtcgattcgttgttgtccgataataaaggggcttacgaaatagagttggaactggcagccggctctgccgagattatgggactgaagctgttcaatgaaaaaggggagaatgtagatatctacatcagccttccggagaaaaagttggtgatggaccgtacgaagagcggcatcgtagacttcggcaaagacagtgccccgcatgccatcgaggcacacgatcgccggaaacagaactctattaattatgtagacgattttgctttgggtacctgggctccggtgcagaaagccggtaactataaattggatatctttgtagataaatgctcggtagaaatcttcctgaacggaggtaagattgctatgacgaacctgatattccctacaactccttacaatcagatgagtttctacagtcgtgggggagccttcaaggtggatcggtgcaagatatacaggttgtagttcctctatcgcctcccgttgagacattcattaaattaacatatcatggaaaataccaaaaacaactcttacatgaaactcatcccggtgatgctctgcttctttgccatgggattcgtagatctggtgggcattgcctccaactacgtcaaagcagatttgggactgacggactcacaggcaaacatctttccgtcgctcgttttcttctggttcctgatcttctctgtacctacggggatgctgatgaaccgcatcgggcgtaaaaagaccgtgttgctcagtctggtgatcactttcgcatcattactgctaccggtctttggtgatagctatttgctgatgttggtctctttctcgttgctcggcattggcaatgcgttgatgcagacatcgctcaatccgttgctgtcgaacatcgtgagcggcgagcgcttggcaagtaccctgaccttcgggcagtttgtaaaggccatcgcctccttcctagccccttatatcgctatgtggggagcgatcgaggccatccctaccttcgacttaggctggagagtgctgttccccatctatatggtggtagctgtagtcgctattttgttgctcaacgccacgcagatcaccgaagaaccggaagagggcaaaccttccactttcggtcagtgtctcgctttgctgggtaaacccttcatcctgctctcgtttttgggcattatgtgtcatgtggggatcgatgtgggtaccaatactacagcaccgaagattctgatggaacgtctgggcatgactctggcggatgccgggtttgcgaccagtctttactttattttccgtacggcaggttgttttctgggagctttcattttgcagaagatggcggctaaaaccttcttcgctatcagtgtgttgtgtatgctggccgccatgttcgggttgttcgttttccaggaccaggcgatgatttatgtctgtattgccctgatcgggtttggcaactctaatgtattccccatcattttctcgcaggcaatgctctatatgccggacaagaagaacgaggtttccggcctgatgattatgggacttttcggcggaacgatcttcccgctggcaatgggagtggcttcggatgctgtgggacaaagcggagcggtagcggtgatgctggtcggagtactctatctgatgttttatacatggagaatcaagaaataaccggatttatagataaaaattaattcataccatgaacagtataatcgtaggaatgggcgaagcgctatgggatgtgctgcccgaaggaaagaaaatcgggggggccccggctaattttgcttatcatgtgtctcagtttggtttcgacagccgcgttgtcagtgcggtaggaaatgacgaactgggtgacgagattctggaaatattccgggagaaacagttgaagcaccagctcgaaagggtgaactacccgaccggaacggtgcaggtgactctcgataacggcggagtgccgtgttatgacatcaaagagggagtggcatgggataatattcctttcacagacgacttgaaacggctggctttgagtacacgtgctgtctgtttcggttcgttggcacagcgcgacgaggtgagccgtgccactatcaaccgcttcctcgacaccatgcccgacatggaaggacagttgaaaatattcgatatcaaccttcgtcagaacttctacaccaaggaggtcttgcgtgaatctttccggaagtgcaatgtgctgaagattaatgatgaggaattgatcattatcagccgcatgttcggttatcccggcatcgacctgcaggataaatgttggattctgctggccaagtataacctgaagatgctgatcctgacttgcggaacgaacggaagttatgtattcactcccggtacggtctctttccaggagacaccgaaagttccggttgccgatactgtgggggcgggtgattcgtttacagcggctttttgttcatctgttttaaaaggaaagagtatccctgaggcacatcggctggcggtagaggtatctgcttacgtatgtacccaaagtggagcgatgcccgtacttccggaggctttgaggaatcgtttgaatgactaatgtgttggtttatatagggttattgattggttgatagaaagttccgttgggtttaaaatcaggagagtgtttcataactcaccttttaaaccaacgggactttggttttaaaccaagcaggtgggagattccggagggaaattgttatatttgcctccggaaccttttatgtaataaccgaccatgaaccgtatacttttcttactcggactgatgctgtcgggactgcttgtctcgtgcagtccggatgctccccgatataccatcggtgtgtcacaatgcagtgacgacacctggcgtcacaagatgaatgacgagatacagcgggaagccttgttctacggaggagtcaaagtagagacacgtacggcgcatgacgacagccggcgtcagatagaagacatacgatacttcatccggcagaaggttgacctgctgattgtagcagccaatgaaggaatggctctcactccggttgtcgaggaggctttcgataaaggaataccggtgattatggtagaccgcagaatactttccgataaatataccgcatacatcggagccgacaattatgagttgggcaaagccgtcggcaattacatagcccatcgcctgaaagggcgcggaaaagtagtcgaactgagcggacttgtcggttctactcccgctatcgagcgccatcaggggtttatgagtgccatcagccaatatccggacatgaccttgcttgccagcgaagatgcaggatggctgcaacaacctgccgaggcaaagatggactcccttttgcaacgttttccggagatcgatgccgtatatggaatgaatgaccgtatggctgcaggggcttttcgggctgccggtcgtcgaggacgggagaaggagatgatttttgtgggcatcgatgccctgccgggtaaggggaatggagtggaactggtgctcgacagcgtactggatgccacctttatctatcccaccgaaggggataaagtggtgcaactggcaatggatattctcgaaaagaaaccttttgaacgggaaacgaagttgaagacggctgtagtcgatgcggtaaacgcgcatgtgatggagttgcagacaaaccatatcggtgagctggacggaaagatcgagacactgaacgaccgtgtggggatatatctctcgagggtggctacgcaacggatagtgttgtacggaggcctgatcatcctgctgttgatcgtcgggttgttgattgtagtatataaatcgcttcgttccaagaatcgcctgaaccgggagttgtcacggcagaaggagcagttggaagagcaaagagatcagctgatcgaactttcccatcagttggaagaggctacccatgccaaactggttttcttcaccaacatttcacatgatttccgtactcctctcactttggttgccgatcctgtggaacagctactggcagatccgtcgctggaaggtgaccggcgtagaatgttgttgctggtgcaacgcaatgtgcagatcctattgcgtttggtcaatcaaatacttgattttcgcagatacgagaccggaaaaatggagtttacaccggttccgctcgacctgttgcaatgctttgtagagtggaatgattcgtttcaggcggctgcccggcggaaacatatccacttctctttcgacagtatgcccgatacggattatcacacacaggcagatgcggagaagctggaacgcatttacttcaatttgttggcaaatgcctttaaattcactccggagaatggaaaggtcactgtccgtcttgcggctctgaagaaggacagcgtgcctttcttccgtttcacggtggccaataccggcagcctgatttcggctgaacacattcgcagcattttcgatcggttctataaaatcgacaggcatcataccggttccggcatcgggttggcattggtgaaagcatttgtcgagatacatggcggaagtattagtgtggagagtgacgaacggttgggaactgtctttactgtcgatctgccggtgcggacttgtgaagagggaacctatgtggtgactgctccgatggaggagtctgctccggaccgggtggacagcctgctccgcgaggatgaagcggaaaacctgaatgatccgtccaaaccttctgtccttgtgatcgacgataatgccgacatccgtgcttatgtgcatacgttgctcaattcggagtattcgattattgaagctgcggatggtaccgaaggaatccgtaaagcgatgaagtacgtccccgatgtgattatttcggatgtgatgatgccggggatcgatggcatagagtgttgtcggaggctgaagggagaactgcaaacctgccatattcccgttatcctgcttacggcctgttcgctcgatgagcaacgcatccagggatatgcgggaggagccgattcatacatctcaaaaccgttcagttcgcaactcttgttgacccgtatccgaaatctgattgaatcgaggcagcgtatgaagcagttctttggcgaccggcagacgctggcgaaagaagacatttgcgatatggataaagattttgtggagaggttcaagtcgctgatcgaggtgaagatgggtgattcggaacttaatgtggaagatctgggcaaggagatggggttgagccgggttcagctttatcggaagatcaagtcgctcacgaactacgctcctaatgagctgctccgcatggcacgtcttaaaaaggcggcatctctgttggcttcttcggatatgacgatagcggaggtcggatatgaagtgggattcacatctccttcgtactttgcgaagtgttacaaggagcagttcggtgaaagtccgacggagttcctgaagagaagcggattataaaggaactcactgtataaaagcaatacatccatgaaagattataaagaaaataaatctaatttgtccgaaactttttgtgatgaagtatacagtgtcgtgcgtgagattcctgccggtagtgttactacttatggcgatattgccgctttgctcgggatgccgcaatattcacgcatggtggggcgtgccttgaggcaggtgcctgccggtttaaacctcccttgtcatcgggtagtcaatgccataggccgattagtgcccggatgggacgagcagcggcggctgctggatgccgaaggtgtttctttccgtaaaaatggatgtgtagacctcaggcttcacaggtggagggatgacagtgtgctggccgattgatactgactctcttgtaggggtttatgtacgtgtaatgcgcctgccggaaataatgcgatgaaccatttgaacgttcggcttgtttacttaattgtctgcatacgcatcttgggaagatagctgtgtgcagatgtgaaattgactttcgggatatagtaaactatctgttgacaggaatcctgtctgtaataatcgggtaaagaaatcatatttgaccggggaacggcggaaccgtcgcttccccggcatcaacttccttgctataaagaagtgcttgttttcgtgtgtataggtcacccgatctatttttttaataatctaaaccctattatgtatgagtaaaataacgattaaagacttgtatctcatttttggcaatgacaaacagcatgctttacgcatgttgaaggaagaaaagagcaaaagtgagatattgaaggctaccggatgtacggtggccgtaaaagatgcaaacctatctatccgggaaggagaaatatttgtgattatgggactttcgggaagtggaaaatcaactttgctgcgttgcatcaaccgattgataaaaccgacctcaggcgaagtgatcattaacgggagagatatttctaacgtcactgataaagaattgctccgtatccgaagaaaagagctggctatggtgttccagcattttgggttgttgccccatcgctcggtgttgcataatatagctttcggactggaactgcaaggagtaaagaaacaggagcgggagcagcgggcaatggaaagcatgcaactggtaggactgaagggctacgagaaccagatggtcggcgaactgtcgggaggtatgcagcaacgtgtcggtttggcccgtgcgttggccaatgatcctgaggtgctgctgatggatgaggctttttccgctctcgatcctttgattcgcatacagatgcaggatgaattgctgactttacaatctaagatgaagaagaccattgtgtttattacccacgatttgaatgaagccattaaattgggcgaccggattgctatcatgaaagatggtgaggtggtacaggtaggcacttcggaagagatcctaacagaaccggccaatgcttatgtagagcgctttgtgcagagtgtggaccgtagcaagattattaccgctgcatcagtgatggtagataaaccccttgtggcccgattgaagaaagagggaccggaggtgttgattcgtaaaatgctcgagcgtaacctgactgtgttgcctgtggtcgatgcaaacaatgtgcttgtgggagaggtccggctgaaagatttgctccgattgcgtcaagaccaggtgaagtcgatcgagtcggttgtccgggaggaagtgcattcggtgttgggagatacgatactggaagatattttaccgttgatgacaaaaaccaattcgcctatctgggtagtgaacgagacccgcgagtttcagggagttgttccgttgtcatcgcttatttatgaggtaaccggaaagaacaaacaagaaatcaatgaaatcattcaaaatgcaatagaattatgatcaacataggacaatatattgagacgctcatcaactggatgatgatacacttctccacttttttcgatgcactcaacttaggcatcggtagttttattaatggattccagcacatactgttcggcattcctttctatctgaccattgcggcaatggtgctgctggcatgggcgaaggccggacgcggggttgcagttttcacccttttaggcttgttgcttatttatggtatgggattctgggaagccactatgcagacattggcactggttctgtcatccacctgcctggcccttatcgtaggggttcccatcggagtatggacggcaaacagcaatcgtgccgagaaggtgatacatcccattctcgacctgatgcagaccatgccagccttcgtctatctgattcctgctgttttgtttttcggcctgggagtggttccgggagtatttgctacaatcatctttgcgatgcctccggtgattcgccttacagggcttggcatccgtcaggtgccaaagaatgtggtagaggcttcacgctcgttcggagctacccgatggcagttgctttataaagtacagttgccccttgctttgcccaccatcctgaccggagtgaaccagacgattatgatgtctctttccatggttgtcattgcggctatgattgctgccggcggtttaggagaaatcgttttgaaaggtatcacccagatgaaaatcgggctgggctttgaaggaggtatagccgttgtcatattggcaattattttagaccggattactcagggaatggtccgtcggaaggacaaaaaatagaaaggagaaagaatagtatatgcgaaaatatagaataataggaagtttgttgctactggctgtgatgtgcgtagcctgtaacccggatagcgggaaaaagaagataagcattgcctatgccaactggctggaaggaattgccatgagtcatctggctaaagtggtgctggaagagaaggggtacgaagtggagttgctgaatgcagatgtagctcccgtttttgcctcggtttcccgtaagaaggcagatgtgtttatggatgcctggttacctgtgacaatgaaggattatatagatcaatacggtgatcagatagagtttatcggagaggtatatgatagcgcgagggtagggctggtggtacctcaatatgtcactatcgattcgattggggaacttgccgcccacaaagggcagttctcttccgagattgtcgggatcgatgccggagccggtattatgaaaactaccgataaggctatcggggattatggtcttgatggttataaattactcacctcgagcagctctactatgttggcttctttacagaaggctatggagaaggaggcgtggatcgtcatcaccggatggactccgcattggatgttcgaccgctatccattgaagttcctgcatgatccgaaaggtacttatgggaatgtggaatctatctatgtcgtcggatggaaaggatttacggagaaagatccttttgcggcaaagtttttcagcaatattaaattcactacagaagagattagttcgttgatgaaagcacttaaagatgcacgcatggacgaagaagatcttgtccaaaaatggcgcgacgaacatcgggaactggtagaaagctggatccctgaatcataagcagtatatgtgtgtccgggaatccaacttctgatttctgtctatcgggtaacggcagtgcgttggtaggcaagtcgttccgtaccgtttttcacataaataatgccacaataggtgaaaccgttctttaggagaatgttttggagtactttattgtcacggtgagtgtctacacgcaggttcggacagtgggacgaacaccatttcaggcataagtccatcaatccctttacccgtccgccggatgcgatgcgatggatcaccccgtaaggggcatcgttgagccaggcgccgtctttgatgactttgtagttgggatcttctccccggatgaaagcaaaacagccttctaactcttgattttcgtttacaaacacatagctgctcccgttttcgatatcttgccggatatcatcaggggaggggtatccgttgatccactggttggcattgccattggcagccatgaagcggcgggcacgttcgtagaatggcatcacttggccgagttcttcaagccgggtggggcgtatggttatattcatgattattccgtttttttggggggcaccacagattacacagattaataatttatcttcgtcaatatataggattaagagttctgtgttaatccgtgtaatctgtggtgaaacctattcatttttgttcaaaaagggggaaagaacctcttttagtcccttcccccttcgaaagttattatctgatcaaagattattcagctgcaccccaagcctggttagccagacgcttgtagttgttgtaacgccattttgcgttgtcttcagctgcctggaacagttcttctgcttctgcaggatactgtttcataactgatgcataacgaacctcacctttcaggaagcctttgaagtcatcccaattcggttctttgctatccagcgtgaacggattcttgccttctgcttccagagccgggttgtaacgccacaagtgccagtaaccgcacttaacagctttttcttcttcttcctggctcttacccataccggctttcagaccgtggttgatacacggagcgtaagcgatgatgagtgatggtccgggatatgcttcagcttcgcggatagctttcagagtctgagcctgatcagcacccatagcgatctgtgcaacatatacataaccgtaagtagtagccatcagaccgaggtcttttttacgtacgcgcttaccggaagcagcgaacttagcgatagcacccaccggagtagccttagaagactgaccgcctgtgttagagtaaacctctgtatccagaaccagaatgttaacgtctttacctgaagcgataacgtggtcgagaccgccgtaaccgatatcgtaagaagcaccgtcaccaccgatgatccactggctgcgtttcaccagatattgagtcaggcccttcagctctttgctgatcgggcaacctgctgcgataccttgttcgatgattgcttcgatctgcggagccagttctttggtcttatctgcatcgtacatgttttcgatccatgctttcaatacttccttagcttctgcaggagcattgtcggctgccaggatttcgttgaacaacttcacgatacgtgcacgcatcttttcgttagcgagttccatacctaaaccaaactcacagaagtcttcgaacagtgagttagcccaagccggaccgtgtccttttgcgttggtagtatatggagttgaaggtactgaaccggaatagatagaagaacatccggtagcgttggcaaccatctcgcgatcaccgtacaactgagaaatcagtttcacatacggagtttcaccacaaccagaacaagctcctgagaactcgaacaacggagtagcaaactgagagttcttcacgttagccttgatgtctaccaggtgttgtttgctctttacgttgtctgcacagtaagtccagttatcagcttgagccaattggctttcaaggtgtttcatagtcagagccttgccacccttcttcgggttacccggacagatgtcggcacagttaccgcaacccagacagtcgagaacgtcaacttggatacggaatgtcataccgtcgaattgtttacctacagctttcagcatctcgaagttggcacccttctgctcttcagcgtcgagtacgaacggacggatagaagcgtgaggacaaacgtaagcacacttgttacactggatacagttttctgcgttccattccggtacgaaagcagctacaccgcgtttttcgtatttagaagttccctgataccaggttccgtcttcgatacctttgaatgcagataccggcagtaagtctccgtcctgagcattgatagggcgaactacttcgttgatgaatgccgggtcgttgttttcaaccttggcatcgtccggcaggttagcccaagccgggtcaacagtcaaagtcttgtattcgccaccgcggtcaacggctgcgtagttcttgtttacaacgtcttcacccttcttaccgtaagacttcacgataaacttcttcatctgttctacagcctgttctacagggattacacctgtgatacggaagaatgcagactgaaggatagtattggtacggttgcccaaacctatttcctgtgcaatctgagttgcgttgatataatatacagagatattgttctgtgcaaagtatttcttcaccttgttaggcaggttcttagccagctcttcgccttcccagatagtgttcagcaagaacgaaccgttcttacgcagaccacgggttacgtcgtacatgtgcaggtaagcctgaacgtggcaagccacgaagttcggagtgtttaccagataggtagaacggataggatcgtcaccgaaacgcaggtgagagcaagtgaaacctcctgacttcttagagtcgtaagagaagtatgcctgacagtgtttatctgtgttgtcaccgataattttcactgagttcttgttggcacctactgtaccgtcagcacccaagccgtagaatttagcttcgaacataccttcgccacccagagcgatttctgcttcctgaggaagagaagtgaaggttacatcgtctacgataccgattgtgaagtggttcttcggcatcggcatagccagattcttgaatacggcgatgatttgtgccggggtagtatctttagaacccagaccgtaacgaccgcctacgataaccggagcattttctgcaccatagaagcagtctttaacatccagatacagaggttcaccgttagcacccggttcttttgtgcgatcgagtactgcgattgttttagctgttttaggtacggcggccaggaagtgtttagcagagaacgggcggtataggtgaactgcaaccaaaccgactttttctccttggcttgtcagatagtcgatagcttcgcgggcagcttctgttacagaacccatagcgataattacgcgttctgcatcttctgctccgtagtaatcgaacaaaccgtatttgcgacctgtgatcttagaaatttcattcatgtattcctctacgatggcgggaacagcttcatagtagttgttgcatgattcgcggtgctggaagaagtggtcagggttttcggccataccacgggcaaccggattcatcggattcagcgcacgtgcacggaattcggcaagcgcttcctggtcaaccagcggagcaaggtcttcattttccagcatttcgatcttctggatttcgtgtgaagtacggaaaccatcgaagaagttcatgaaaggaacacgggctttgattgtggcaaggtgtgcaacaccggccaagtccatcacttcctgtacagaaccttcagccaacatagcgaaacctgtctggcgcgcagacattacgtcctggtggtcaccgaaaatacacagtgcgtgagaagccagtgtacgagcagatacatggaatacgcaaggcaggaattcaccggcaatcttatacatattcgggatcatcaaaagaagaccctgagaagcagtgtaagtagtagtcagtgcaccggcctgaagagaaccgtgaacagcaccggctgcaccaccttcagattgcatttcctgtaccaatactgtttcgccgaagatgttcttacgtcctgcggcagcccattcgtctacgtattcagccattgtagaagagggagtgatggggtaaatggcagctacttctgagaacatatatgaaatatgtgcagcagcctgattaccatcacatgtgatgaatttcttctgtttagtcataactaaaaataatatttaagtaagtaatttatttgtttatttcaaaaacggtatggaaagcggatacttccatgtttttccgttcagtcctttgatacctccgatgatggggaacagcagacaaagaaaacagcctattccaagtatcaagaggagcaagattccggcacctccgccgaatatacccagcagaactgctaacggagaagtctgatcatttgcgtaatccatgtcgtttatggataagattccgctgaacatgaatattacaaaaagtactgtcagcgcgatgccgtacaggaaccaactgatgtaccagttcagaatgtatttgccttggcgattgacgagtatagaattctctttacccatgatccagaatacaataggggcaatccagcctacgtatggtatgaacatggcgaaattcatcagtgccagataagcattttccgtcagtcccataggaagtacggctgtaggtttagccgtagcttcttcgtccaatatctttttcttttctttttcgaactcttcatcgttcaacgctccgctgtcgtggaggcgttttagttgttcaagcttctcgtaatccataatgttcaagatttgatgttaatataaaaagccgaacatccagagtggtatctgattgccacgacctatttctgccttgtgcaaagcatacgtcactccggggttattcttaatttttgctccttcgcagcatattttgaacggcatcacttcgtcaaccatgaacgaggtgttcttgtcacccttgtgcactttgtggtctttccacatcgtgtttacaaagaaagtgtccagcacatcctgttcttccacctttacggggtagatggagtacatcaggttggggttgtgcagcataatcttcgagggctttttaggaaactcttcccctttgggatagaccaggttgatcagccgtgcatcggccagatacttgatgtagttcatcaccgtggcgcgtgatgtctgtatgtcgcttgccagttggcttacgttcggagcctttggcccgtctacagccaacaaatataataatttttttatcttcgagagatattttagctcaatttgtttgataagcaggatatctacttctaccatcatgttcatggtcttgagcagattttcagagaaattgcgtttctcgaggaagaaggggtagaagccgtgatggaggtagtcttgaaaataatccaaagggcggactttggaaagcacccctttggctatctgttcgtggctgctcaatatctcttcgagtgtgtagtgacggaatttcatccctgtttgcaggttcagaaattcgcggaacgaaaaaccgcggaggttgtagctcttcacgatgtcacgcaattccaggttttcttctttgagccgcatgacggacgaaccggtgaatacaatcttcaggttggggaaacggtcgtagcacatacgtagctcgcggctccaatcggggtgcttgaatacttggtcgatcagcagaaccttcccaccgcgtttctgaaattcattggcgaaatcgacaatgctgtgtccggagaagtagaagttgttcatgttgataaagaggcacgaacggtcggttccgaacttctccttggcgtattgaagcaggaaagtggtttttcccacgccacgtgttcctttgataccaatcaagcggtcactccagtttatttcgtccatcaggtcgcggcggaccggggcattggtgtgctcaacaaggtaggcatgtgtgcggtagaatgtttccatctcttatcttgggtttttcggggggcaaatataagcctttttttagagattgcaaagtagagatagcaaaattgtggtttcgtttagcaagtttatcttttgcttcactttgtcaaaacggtattcctgataggtggcaggggcgttatttcggggcaatggcaagctacttctgaaaaaatgcagccatttcaatcgggcaattgtgattttgcttgtctacttcagtgtttgcttgcaaatataaatattgttttttgttttcggtagtttctgccggtatttatttgaaaaagggtttcttttgtcagttcgaaatgtttgctccggagagagcaaatagagacggagaaggggaaaagagcctttgttgatgggctgtcaatcctcactccgggagatatgaaggctttgtcccgaagaagtgaaggctttacccgggggaagtgaaggctttgtccggcggaaagtgacggtttgccccgcataaagtgacctgtttcccggttttatatgcgtttttgtgcatatatttgcaggaaacttaccggctttaacgctggttgcttcttagatagcaaagggcttgtaagtgaaaaaccggaaatggaaacaaaaggacaggagacggtgcatttaaggaattaaatgatagtttatgtccccgggcatgggtatatcttagggtgaaaaaacacgtaactgttcgctgccatcactcgcacaagttcctgcgtccggatgaaccctgtttaattaattgatgctaatgacgaatctgctttacttgtttaatcccgatcaggatctggctcttgccagtggcgaagtcaattatatgccgcctgcctccgcccgcagaatggcggaagagttggcattgcttcccgtatggtttgcggacaggccgtgcagtgtgcttgctccgtctgcctataatcagtcttttctggaagagatgctcgacttatttccgctttccgcatcattgagaacccaggccgaagatttttcggaagtccgttcggtggttccctggggatggaatccggcgctccggaaacgtctgctttcattgggagtacccgatgctgcgctaccttcgatggaggatataggacggttgcgcgatctgtcccatcgtttgcaagccgtacagttgttgcccggtctgcaagtggatgaagtgttttgtggagagtcttgctacctgactgctttgtccgactgccgggcatttgtagagagcctagaatgctgtctgctcaaagcccccttgtccggaagcggtaaagggctgaactggtgcaagggagcgttcactcctctgatagagcgttggtgtgcccgggttatagagcagcaggggggagttgtcggtgaacctatatataataaggtggaagattttgccatggagttttattcggacggaaaggggcggattacttttgccggatactctttgttccgtaccaatgccggtggggcttacgaaggaaaccggttgttgcctgatgcggagattgaacgaagattgtcggcttatgtgcctgtggcggctttacaccggcttcgggaggagttgcaaagacggttgtccgtctctttggggacggagtatgccggttatctgggagtagatatgatgatttgccggttcgctctccttccggagtttcgcatccatccttgtgtggagatcaacctgcggatgaatatgggacttgtgtcccggatgctatacgatcgttatgtacgacccggggctggcggaacgtttcgtatctcttatcatccgtctgacgggcaagcattgcaggagcatgatgcaatgacggttgcgcatccgttggacacccgaaacggacgggtagtgaaaggctatctgccattggtgcctgtccggaagtcgagccgctatcgggcttatatcttggtggaaaccggcggataaagttttatataggttgctttttgcaagaaaagaaaatggagaagtggcttcccgtgcccgcttcggaccgtaacgatagccttccctgaagtttttctatgatcagtttgcagatagagagtcccaggccggttccttgcgcaaactcgttctgtttgtagaatcggccgaatatcatcttttgttcggactgcgggataccgattccggtgtcctctacatagatctccacttcttcggtttgcggcatatagctccatcccagtttgatggagccttcccgggtaaatttggaggcattgttcaggaagttggtgatcacctgaaccagccggtttttgtcgacgtgtacgatcaagcccttttcgccttcttccaacaggaagtggagctgtccgggaatcagaatcttatgtgtctgataagtatccctgataagggcatccagcggatagtcatcacagtcgaatgacatatatccggactcgatgcgcgaaagttccaatatatcattaatcagtttcagcaacaactcgctgttgcggttgatggtatctatatactgttccttctcttcgggggtgatgtccgtatcatccggagaggcaagcagggtggagaatccgacaatggcatttagcggtgtacgtatttcgtggcttatgttggccaggaaggattctttaagttccgccttttccgccattttacgggcctcgatcaattcctgttcccgtttcttgtagtcctcaatgtttaataaaaggccggtggttttctgtccgcccagagcactcttcatggtgctgcaccgaagttcccaccattggtatcctgtaccgttaaagtcgcatttcagctttatgaagtgtttgccgttggtggcgttctttgtcaataaggcttgtgtcgtatccagatagtcggcatccacaaaggacaggaacccgtcaatcgtcaatggatggggagccatgcccaagtttttccaaaaggcgtattcgaacaccatcgtatcgtcctttaaccgccatgcgtatgtatcgcttccctcgactgccagcgccaacgattctttctcatcttccagttcgtacaggatggagcgtttccttttcgtttcacgccaatacaggtaagtgatgcccgacagcaggctgacaatggcggtgatgctgcctaatagtgcgaaccaccagacgatggggtgccgggtcttgaatggaatgttgataatggtgtattcatggggaatgtccgcgatggtcagatgttctttttgcatggcattccagtcgatgaagtatcctttggcgctttcctgaatgggtatgtcggcaacgttttctccattgaggatacgggccgccgcatgaacggactcttctacctggatatgcatcggggtgatgtatccgcccagaaagtcgtgcccgcagtcaaaaagttcattgatcgttgtaaagcgttgccgggtggacaaagatgccatagtgaccgttgtgtagtcaaactttgtctgcagataagggagggtactgtacttgctgatagaccagatgaagtctccaccttttgtctgatccttattctggttcttggagaggttacgggcagatagcgcattaattattatatgtcctttttctgcttctttccgtgtgtcgtttttgtccagatgccagtccagattggatatgatgtccgtcgatttcaattggttgtcaatatcgtttcggactttccggtctaagaacgtaaagtcaagtatggtgtaaatatggtttttgccggttagcttgtgcaccatttccagattctttctgaaatctatcttgtcgtgaaacccggtgacgttgttgtattgtccgatcagttcccaattgggataattgactccggagaatacgattggtattcccttcaataacggatgatgggtttccaataacgagtaagtggcctggtcatcgttaacaagaagaacttcaggtttccatttcgaaatagaatcgagaaagttattgatcttatctatctcttgctgttcgttgttaatttcacaattcagatagaagaaagtaagttctacgggaatgtgagctttggcgaattccttttttatcagtttattgaattctgcatatccttggtaatccttttcataagagtggatcaccaatacccgccgctcttcttttgaataacaggaggtcaatagcagtaagatcatacagcaacgtatgagtgaatgaatggaccgcatacttttcattcggtgtgttgttcgtttgttcggtttgtttttcgtctatttcacaaagatactatattaatgatataaataagaaaagatggttatttttcttcttgttgagctgccttactttcatttccacagcggtccacagccgtgacggcaaaatacttcctggctgtccatgggaggatgggagcatatatgtagtgcgtatcccgcagattctgcacgaggatattttccggattcgtgatatctaccggatacgtgtccgatgcgtagaccacgtacatgggagcattctgcttgtcattgtccgtagcggctttccagttgagacgggtatatccgtcgccggcggagacagccttcaatgctgaaggggcggtgggggagacgttgtcaatccacggcatcggcggttgtagtgccggatattgatagaaatgatccagcaggaggtcgtataccccttgggtgttgtccatcagatactttacccggtagtgcgcttcgcctgccagccgattggagcggatgaagtgcatttggcgttccacctcttcggtggtccagttaccttcgtcggggtggaggaagtagataccgagtccggggacgatgtggcgtccgttgctttgttcctgccagtcgagggcaaacggataaaaaccgttgccccggaaatacatcatcgggtagatctggtcctggatgccttcgcccagccagccttgcggatcctgatagacagtgaagaaggcattccagcctttagaggagtagcgtgaggtgtcacggtattttcctaccgggcaggtgctcaccttcacccaaggcttcatggcttttacaccgttgtagatgtagcgtacaatgtcggtcaggttgtcccggcgccattgtgccagcgtgcgtcctttgccgtagcggcggaagtcgtaactgtccggaaagcgcggggcgttttccggatagcggagatagtcgaagtgcactccgtccacatcgtaacggctgactacctcacgtaccagtttcattagatattccttggtggcaggatgtccggggttaaggaaatattcatttttgtaaggcacgcagatgtcacgctcacgcttggtcaccgattgcttgccaagtgaggccacatgttttttgcctcccaaggggatggtcaccatccaggcatggcattccatgcctcgtttgtggcactcttcaatggcgaaggccaacggatcgtatccgggatcgcctccggtttttcctgtcagtatggagttgaagggttcgatgtccgaacgataaagcacatcaccacgggtacgagtctggaaaagtaccgtattgaagttggcctctttcaagcggtcgaggatatcgatcagttcttctttctgtcgccggatacctgcaggagtggttgctttggtgcgtggccagtccagtccgtagaccgcagttatccaggcagcccgtacctcgtgtttcggggaggtctgcgcatggagcggaagtaaggagaggagaaaaagaaagaggagggatgttcctcttccggctctctttttcactgagaaagattcgttatgacttttatagatggtattcataaatctaatggttttgatgttcaccacagattacacggattaacacagattgataatttatttcattgagaatccggttaaagaatccgtatcaatccgtatgaattcgtatgaatctgtgttaatccgtgtaatctgtggtgaaacgtcttctaaactgccttccgcggtaagcggaaggcttgcaaagttagcaaaacccttcgtaaagttgtgtagtttccttagattatgttacatttgcgctgattaacaattcaacacgccatgattacattcacgatttgcctgctggctctgattgcaggttactttatttacggacggttggtggagcgtgtctttggccccgacgaccgaaagaccccggcactgacacatgccgacggagtggattatattccccttcctacctggaaaatcttcatgattcaatttttaaacatagccggtctcggccccatcttcggagctattatgggagcgaagttcggtactgcttcctatctgtggattgtgttgggaagtatctttgccggtgccacacacgattatttcgccggaatgctctctctgcgtaacggtggtgagagcttgcctgaaattgtcggccgttttctggggatgactaccaagcaggtgatgcggggttttaccgttgtcctgatgattctggtaggtgcggtctttgtggcaggaccggcaggactgctggcgaagttgactcccgacagtctcgacactactttctggatcattgtggtgttcatctattatattcttgccactctgcttccggtcgataaaatcatcggaaagatatatcccttgttcgctgcagctttgttgtttatggcagtgggtatcctggtgatgctttatgttcatcatccggtcatctcggagttgtgggacggattacagaatactaatccggaagcagccgtgttacctattttcccgattatgtttgtcagtatcgcctgtggagccatctccggatttcatgctacgcaaagtcccctgatggcacgttgcatgacttccgagcgtcatggacgtcctgtcttttacggtgccatgattaccgagggcattgtggcgctgatctgggctgccgccgcgacttatttttatcgtgaacacggtatggaagagaacaatgcctctgtcattgtagacgctataacgaaagattggctcggtgcggtaggtggggtgcttgccattctgggagtgattgcggcgcctattacatcgggcgacaccgcgtttcgttcggcacgtctgatcgtagccgattttctgaaactggaacaaaaaagcatgcgtcgccgtttgtatatttgtgtgccgatgttcattgtcgccatcgggctgttgctttacagtttgcgtgataaagacgggttcgacatgatctggcgctattttgcctgggccaaccagaccttatcggtctttactctctgggccattacggtctacttggtacgtgcccgcaagtggtatggttttacattggttcccgctctgtttatgacagctgtctgttccacttatatctgcatcgcccccgaaggattaggattgtcacattgggtttcgtatgtgacaggagggctttgtacactgattggagccgtttggtttattgtttggaaaaaagggattggatactcgtataaaaaataaactcgatattcgtataaagatgaagaaagtaaaaaagtcaacctgggttactgtcgccttgctgatctatgtatctgcgacagcggcttatctgctgcctcgcaatcatgaggtgagcgacacagagaaatatctcaccctggctgcttcgtatgtcattgttctggttctctggctggtgctgagaaaaaaagaacagatgcagcagcgccgccgggaggaagaacatatgaataacctgaaaaagtagaaacgttatgaagaaattaatgtggatcgtatgtctgcttgtcgtttcagtgacggcacaggcacagtttgagaaaggaaagtggattgtgaatccctcggtgacgggacttggactttcgtacagcaagtctgagaaaacccagttcgggttgcaggcgcaaggcggtgctttcctggtggataatgtggcactgatgctcacggccggagccaattggagcaaaccggaagataagtacacactgggtgtgggtggaagatattatttcgacaaatgcggcatttatctcggagccggattgaagatgaatcgctataactggaaagtaggagacacgaccgactttgccttcgatgcggaagctggctatgcgtttttcctgacacggactgttaccatcgaaccggctgtctattatgatttgagtttcaaagacagtgatttgtcgaagttcggactgaaagtaggcttcggattctacttctgatttttcttttaaaaggaactcaccacagagggcacagagtaacacagggtgaattttaagtcattgattatccatattgataatctgtgtattctgtggtgaaaagacttttgacagcccctttgtggtgagttcccgataaaattgattagagaacccttgcttgttttacaagtggttcagtttctcctgcaggaattgtcccgtataacttgccgcacaggcagccacctcttccggcgttccggttgccacaatattgccgcccttatctccgccttccggtccgaggtctatcacgtaatcggcacattttatgacatccatgttgtgctcgatgattacgatggagtgtccgcgtcggatcagtgcgtcgaatgcatcgagcaacttgcgtatatcgtgaaagtgcaatcccgtagtaggttcgtcgaagataaacagcgtcgggtctgctttctcctgactcagatagtaagccagtttcacgcgctggttctctcctcctgacagggtagatgaagattgccccagtttgatatatcccaaaccgacatcctgcaaggggatcagtttcttcacaaccttcttttgtccatgttccgtaaagaattcaatagcttggttgactgtcatttccagtacgtcatagatatttttatcctggaatttcacttcgagtgtatcggccttgaaacgttttccgtggcatgattcacactccagcaccaggtcggccatgaattgcatttccactgtgatggttccgtcacctttacactcttcgcaacgcccaccctcgttgttgaagctgaaatgtcctgcggtatatcccatttgtttggcgagcggctggtcagcccagagcttgcggatttcgtcgtatgctttgatgtaggtcaccggattggagcgggaagacttgccgatgggattttgatcgacaaactccacattgcgcagattgcgcaggtcgccttcgatggacacaaattctccaggacgctcgctgcattcgtccagttcgcgtttcagcgcgcggtaaaaaatgtcgcgtaccagtgtgctctttcccgaaccgctaacacccgtcactaccgtcatcacattaagtgggaagcgggcgtccacacctttcaggttattttcacgggcaccttttatttcgatatagttgttccatggacgacggtgttccggcacgggaatggtctcttcgcccagcaggtatttcaccgtataactgttgctgcctttctttaaatctttcatgtcaccctcgtatactacctgtccgcccagtcgtccggcattcggaccgatgtcgatgatgtagtctgcggcacggatgatttcttcgtcgtgctctaccaccacgaccgtgttgcccaactgctggagttggcggagcacatgaaccaatcggtcggtatcccgactgtggagtccgatactcggttcgtcgaggatgtaaaggctgcccaccaagctgcttcccaacgaagtggccaggttgatgcgctggctttctccgcccgacaacgaattgctgaggcggttcagtgtgagatagcccagacccacatcaatcaggaaccggatgcggctgttgatttccgtcaggatacgacgggctacggcctggtcgtgttcgttcagcgtgagcgagtcgaagaatttttgcaattcggtgataggcaggtctaccagttcggaaatgttctttccacccacgcggacgtatcccgcttcgggtttcagacgggtgccgtggcatttcgggcaaagcgtctttccgcgatagcgtgccagcatcacacggtattgaatcttatactgattctcctcgagcatcttgaagaagtcgttgatgccatggaagtattggtttccttcccacaacacccggcgctgttcgtcggttagctcgtagtaaggagtaaagatcgggaagttgaatttttcggcattgtggatcagctcttcgcgccattctcccatcttttcgccccgccaacagacaatggctccgtcgtagacggacaaagaacggttaggcaccaccaagtgctcgtcgataccgatcacttttccgaatccttcacatacgggacaggcaccgatcggggagttgaacgagaacatctggtcgttcggttcttcgaacgtcataccgtcggcttcgaatttggtactgaaagtatgcaaccgggtcgttccgtccggctgataaaagcgaagcatacacatgccgtcgccttcgtacatggctgtttcggcagagtcggtcaggcgactgatggcatccttggattttgctgccgtcattcggtcgacgagcaggtataccacgtcctctttgccggcagcatattcgtcgatacgcaccatctcgccgtttacttcaagacggttgaaaccttgcttccggtcgatctccaactgttgttcgagcgtgcgtccgtcatgcaggtaaatctgtgtcagcacggtatagcgggtcccttccggataagagagcatgcagtttacaatgtcttcgatggagtgcttcttcacttcctctccgctgacgggactgtaggttttgcccacacgtgcataaagcaggcgcaggtattcgtaaatttcggtcgaggtacctacggtggaacgcgggttacggctgttcactttctgttcgatggcaatggcgggcggaatgcctttgataaagtcacattcgggtttgctcattcggcccagaaactggcgggcatagctactgagactttccacgtagcgacgctgtccctcggcatagagggtgtcgaaagcgagcgatgattttccggaaccggaaagaccggtgatcaccaccagtttgttgcggggaatgtttacgtcaatattcttcagattgttgactctggccccttttatagagatgtatttactatcagtcataagcattttcgttacttggactgcaaagatagtgagtcagcaacgtttaacctaacagtggaaggaacttttatcttaaaaacacttgcgaagattgaattgcttgcttaaccgttgcaaatgaggagcaaaattgtatctttgcaccacatttttatgaaaaccaattatgaacctgagaaaactgattcttcttttagctctctttcttgcaacaggagtgggggcacaaatacaacaacaaagcccttatccgaaaagagaatttcgcggagcgtggatacaggctgttaatgggcagttccgtggtattcctactgagaagttaaaacaaacacttatcgatcagctcaactctttgcagggggcaggcatcaatgcgatcatattccaggtgcgtccggaggcagatgctttatatgcttcacaattggaaccgtggagccgttttctaaccggagtgcaggggcaggcgccttcgccctactggaatccgatgcagttcatgatcgacgagtgccataaacggggaatggagttccatgcgtggatcaacccttatcgggtgaagacatcgctgaagagtgagctgtcgcccaatcacctgtataatatccatccggaatggtttgtcacttacaataatcaactcttttttgatccggcattgcccgaaagtcatcgtcatatttgcatggtggtggcggacattgtttcgcgttacgatgtagacgctattcatatggatgattatttctatccttatccggcaaaaggcatggactttccggatgacgcaagctttgcccgttacggcggagggttcaccaatcgtgccgactggcgccggagcaatgttaatatattgattcagaagatacacgagactattcgtggcttgaagccttgggtgaagtttggtattagtccgtttggtatctaccgtaacgaaaagaacgatccgctcggaagcaagaccaacggcctgcagaactatgacgatctgtatgcggatgtattgctttgggcgcgcaatggttgggtcgattataatattccgcagatatactggcagatagggcatcctgccgccgattatgaaaccctggtgaaatggtgggcaaagaatacggagaaccgtcctttgttcattggccagtctgtgatgaatacgattcagaatgccgatccgaagaatccttccatgaatcagctgcctcgcaagatggctttggaaagagcttatcagactatcggtggcagttgtcagtggccggcgagcgctgtggtggagaatgccggaaaatatcgggatgcacttgtgcaggagtatcataagtatcctgctttggttcccgtcttcgactttatggatgataaagcaccgggtaaagtccgtaaagtgaaaaaagtatggacggaagatggttacatgttgttctggactcctccgaaagctaaagatgagatggatcgtgctgtgcaatacgttgtttatcgttttgatgataaagaaaaagtgaacattgacgatgcttcgcatattgttgccgttacccgtaacaatttctataagctcccttacaaggatgggaaaaacaaataccgttatgttgtgacagcacttgaccgtctgcacaatgaatcgaaatcggtaagtaagaaagtgaaactgtaaatgtattacaaaagatgaggggatgtgtcatcattcaccacagaggacacagagtaacacagaggagattctaaattattgagtagtaacaaaaaaactccatgttactctgtgttctttaatactccgtgttactctgtggtgaatttgagtttccgcagtgagattcctctagtataagatcagtccggctattccgcaggcgataatcatcagaatcgggttagcgtgatatttttttgttcctataaaggctaccaggaaaataatgatgctgatgacaaaagtataagtatcgtctgtgggcgaaccgaagttttccacattcatcaagaccagagcagccgatgccaataatcctaccactgcagggcggagtccgctgaacacagcctctacggcaggatgtttctgatatttcaggaagaacttactgatggtcaacatcaggataaatgacggtaacactaccgcaaaggtggcgatgacagatccccagatacttcctgtagccgtaaagccgacataggtagcggcgttgataccgatgggaccgggagtagactggctgatagctacaatatcggtgaactcctgagtacttacccaatcatagcgtgtcaccacttctccctgaatcatcgagagcatggcatatccgcctccgaagccaaataatccgattttgaagaatgtataaaagagttgcaggtaaatcataatgtttcaatgtaaatgtgaatgattagggatgtgactgtttccattttccccagcagaagccacctacacctgccgcgataataatccagatgggagagaagcccaataaccaaatgagtagggcggagacaaccggaatccagagggtatatcgattgactctggcagactttgccatgctgaaagtaggtgctgcaatcagtgcgactacagcgggacgtatccctttgaagattcgttctacaatgggattgtctttgaagttatgaaaaaacatggcaatggccaatatgatgacgaatgacggaagtaccgtcccaagagcggtgacaaggcttccccgtatgccgcgtagcttgtatcctataaagatcgaaatatttacggcaagaatgcctggggcggattgggctatggcaagcagatcgataaagtcatccttggaaatccagttccgtttggttacgatttcgttttcgatcagaggcaccatagcatagccgcctccgatagtgaaggcaccaatcttgaaaaagatgccgaatgcttcaagataaatattcatttaacgtattgttcttattctcttttcttattcttgttgttcctctacatcctcttttccgccctctttacaatatttgctggggctcactttgaaatgtttcttaaacacttcccggaagtatttgacatcgttgaatcccgtcagttcggatatttcggtgacagagtgctgaccggtctttaataatgccgccgcccgtttcaggcggattaatctgatatagtcagcaggggcctgatcagtcagtgctttcagtttattatagaaacttgtgcggctcatgttcaatagattgcagagtacatctacattgaatgccggattgtctatgttctcttcaacactcttcttgaccgtagcgatgaatttccaatcgagatctgtagcacagtttggagatacctcctcttcctcgctgacttcaagattggcatacttgcttttcaataatgcacggtttgtcagcaagttagcaatagttgctttcaagataccaatgttgaatggtttcacgatatattcgtctgctcctattttcaatccttccaggatattcttttcgtcattcagtgctgtaagcaggatgatggggatgtgcgaggtttcgatatcgtttttaatggcggcgcacaactcgtctccccgcatttccggcatcatgatatccgaaataatcagttcgggcatgtactcttttacgatcgtcagtgcttccttaccgttggaacatgtctgaatggtgtaattatccgataatgtatgagtcagataattccgcagttcatcattgtcctcaacgatcaacagtcgttgcaggttctggtcgtgttgctttttcgccttttcataaatctcggccggagacacgtgtggcacttgctctgtgctgagttcacgggtacgggttgccaggtgtgctttatgaaagtgcttactgtccttcggaaaacttactttgatagacgatccctgatgttccacgctgctcagattgattttacctttgtgcagatgaaccagtttccatacaagcatgagtccgataccacttccggttactttagagttgatcgcattgcttccccggaaatgtattttaaataacttcttctgctcattggcaggtattccgatacctgtatcgtttacctctacattccaactgtcattggtctccgaagcataaatatgtacgctaccgttctccggtgtatatttcaaggcattcgagatgatatttttcaggattgaatccatcttctctttgtcaatccatacattcaggtaacggaaattgctttcgtaggtgaagttaatatgcttcacgcttgcgtatggacggaatgcgttgaaagtctccgtcagataggtattcagttcatattccgaaatataaagttctgacgaatatacgtctgcccgttcaaagttgatcaggttggtggtcagacgcagtagggcatttacgtttcgcagtgccgtattcatgttgctgatgccatcttttgtcaacgcttcccgttcgcgtatctcttcgagcggtgccttgatcaatgtcagcggggtacggatgtcatgcgccgtgttgatgaagaaatggattttctcgtccgatacttttctttgttttctcaaaataatgatgcggagagtaatgatggcaattactgccagtacgattgcatagaccagcatggcccagaaactgagccaaatgggttgggcaatactgattttcatggtacgttcttcgagtacgatacgtttatcttcgttagagaccgcacggatatgaagggtatactctcccggactcagattggtgaaacggatgatgttttcatttccgggacggctccactggtcgtaaaatccttccaacttccatgaatatagaatattcgacggataatcgtagttgatggaggacactttcagcgaaaagatattttggctgtaactgagttccagttctttggtatcatcgatatccgtacttaacggggagttttcgtcaccgggatagaccgtttgataaaaaattgtcagatcactgagtaccattttagaactgtacttcctgggtatcttcatttccttgttaaactcgatggcaccgtctgagctgccgaatataaagttaccgtttttacgcaatgtacctgagccggcattgaaatggctggccattagtccttgatctttggtccagttatggaacaatttttctgccggataataactgctgagcccattttcggtactcatgataatgtcatcgtcggtatccgaaagaatggtatatatgttattggaaatcagcgcgcagttgtctctgtggtagtgggtgaaagttctcttttccgggtcgtatatcaataatccggagccacttgttccgatgtaaagaagcccgttccgtgcttggtacagagaataaatatacattgattctacaggaagttcgatacgttggtacttaccggattctttctctaataagtatagtcctgtggccgtacctatccacatctgcttactgtctttttctatgatggaagttatcgagttcagcttggggtataggcgaagagtctttttatgaaaatcaatgcgtttcaggttgtagtaacctcccgaccagatgtctccatcggctgtttttatgatcgaacggatgtacttatccggccggatgttgactccatacagtgaagatggagtgatatactcgacagataaggtccgtttgtttatttgatagatgcccgaactatatccggcagcccagataattcccggctctatctcgcatagtgtaacgaatatgtgattcttgttgcctccattcttttcaaaagaactcatgaacgaatgccatactccggtttcggaattgtaataactgattccgttattggtggcataccacaaatctctttcactgtcctcaataatagaatttacctggtcgttaataagtgattgtttgttaccgatagaatgttttatccagttatagcttgaatggcggttattgcgtaccgtgataccgattggataattggcgagccagatacgttgttcatcgtctacgtaaaagtcagagatgttgttaccgttcatttcattgtactggttgtaatcggcaactatataaggagtagtcagataagagtttatgtttatcttatacactccagcaccgtctgtagcgacaagcagttctttattattcaacggctttatccgcgtgatgctgacgtcggtcaggctcatatggggctgagtgctttgtttggtattcatgtcatagacataaataccgcgttcaaacgtcccgatgaatagtttacgtgagggacggtggaaataaagttcattgatttgtattggaagattatccagtttgtcgcaaggaagcaaatgtagcccttgattcttcaactccgcatgatggataccttgttccgtaccgataaagaagtgagtatcgtctatctgttcgatatcagtgatgtcttctccgatttcgttcttgatctggagggtctgtagtgtatgggtattgtataaatagagagtctcctcgttacacagccagatgttgttattccgatcgatgaagctgtaactgatgggagcggggcggtctttgattttctcttctggtagtttgtagaccagcgtgaactgatctcgtaacgggtcgtaacgaaacacttttcctttctttcctatttcccacaaggtgctctcgtggtccagatatagccaattcaagttaagcagtgaattgagttcttcaccgtcatccattaatttatatcgtttgaactctttgccatcatatctgtccacaccttcgtgggtcagaaaccacatataaccctttttatctttttggatgtaatataccctccggttgcttaacccatcctctacaccgatatatttgtaagtttgtgcagagaccataagaggcaataagagcagaagaaaaagaatttttttcatacaagctggaatcctttaatgatttttctttcggggggcgaatgattttacaaaattaataaaaagagtggagaagtgcaaactttaggaaaggatttgttacggttgacgaatgacaaaaaagggcgaacctatctgtaggtccgccctttatcatcattatttatcttattattttttcttttcttctacccacttacgtgcattaacgaaggcttcgatccaaggagttacctggtcgttgtgtacacggtcggcaggataacaggcattttgccacgggaagatagcacgttccaggtgaggcatcatggccagatggcgtccgtctgcactgaccagagcggctattgaataatccgatccgttcggattgcccgggtattcgtcataagagtatttagcaactacgttgtattggtcttcatcgtatggcagagagaattttccttctccgtgtgctacccaaatacccagtttgctgccactcagtgaaccgaacatgacactacggttagtcgggatggtgacaccgacgaaagtcgattcgaacttatgtgattcgttgtgcaacatctttcctttcttctcgtgttccgggtttaccaatcctagttccatcatcaactgacaaccgttgcagatacctaatgacagggtgtcttcgcgggcatagaatttatcaagagcctcttttgctttcgggttgaacaggaatcctccggcccatcctttggcagaacccaacacgtccgagttggagaaaccgccgcaataaacaatcatatttacatcttccagtgtctcacgtccgctgataaggtcggtcatggtcacgtcttttacatcgaaacctaccaaatagagtgagtaagccatttcgcgctcaccgttggttcctttctcgcggatgatggcggcacgtataccgctcggtgtgcgacgttcgggagtgatgccatactgtgaaagttttcctttgaatcccggcatgaacgcaaattcgagcggttgcatcttgtagttctcaaaacgcttcttagcacatccgttcattgactgtttacggtcgagcaggtaagaagaagaataccatacatcacgcatatagtcaatgccgaactgataagtagcaccctctttgtttaccaagatatggcgttcgtctgtcggtttacccaatttaatgaaaccgacacctgcatcttcaaggatttttttcacttcgtccttatgcttgtcgttgatctgaataacgatacccggattttcggcgaacagaatcttcacgatatctgtctctttcattttatcaaggctgatttccagaccgccttctacgttggcaaagcacatttcgagcagagtcgtgatcagaccaccagctgagatgtcgtgtccggcaaggatcagtcctttatttaccaactcttgtactgccagaaaagcatcacggaagtattcggcatcctgtacacaaggtacttcgctaccgactttacctaatgactgtgcgaaagccgaaccgcccagtttgaggttgtcgaaactgaagtcgatatggtaaagtgtggtttttgcatcgttgacgagtaccggagagaccactttctttacgtccgagacttcaccgcctgctgatacgataactgttccgggagaaacaactttttctccgttcggatatttctgggtcatggacaaagagtcctttccggtaggtacattgatctgaagtgcacagcagaagtcacttaaggcttttacagctgtgtagaggcgtgcgtcttctccttcctgtgagcggcatggccacatccagttggcggagagtgatacactgtccaaaccttcggccagcggagcccataccaaattggtcagtgcttcggatacagaaagaatagaacctgccgccggatcggccaatgcagcctgaggggcatgtccgatagaagtagcgatacctttttcgccacgataatccaatgctactactccacaatcgctcaatggcaattgaatctcgccctgacattgctgacgggctactttaccggtaacggaacggtctactttattggtcagccagtctttacaagctactgcttccaattgcaacacctgagtcaggtattcgtgaagtttagatgtttcatattccggcattgtatagtgacgttctacggttttgtctatcatgtaggtcttgggagaagaaccgaacatctggtccacagccaaatcgaacggacgcacaccgtccgcttgctggaacgcaaaacgatggtcgccggttgtttcgcctactacatacatcggagcgcgttcacgttcggcaatttggcgtacgtgttcaatggcttcctctttaataaggagtcccatgcgctcctgactttcgtttgctataatttctttagccgacagcgttttgtcgccgataggcaatttgctcatatcgatcaggccgccacattcttctaccaactcagacagacagttgacgtgtccggccgaaccgtggtcatgaatcgataccaccggattttcatcctcttcgcaaagagcacgaaccacgttgttggcacgtttctgcatttctgcattggcacgttgtacggcattcagctcgattccgctgctgtagcgacctgtatcaaccgatgaaacagaaccaccgcccaatccgatgcggtaattgtcgccaccgatgaccactactttgttgccggcttccggctgtccttttaaacagtcgcgttgtgtgccgtaacctacaccaccggcaagcatgatcactttgtcgtaggcataagtttcgttgttttctgtatgttcaaaagttagtaccgaaccacagatcagcggttggccaaacttgttgccgaagtcacttgctccgttggatgccttgatcaggatctgttccggagtctgatacaaccatttgcgtaccggcaagatgtcttcccattcgcgtccttcttcggtgcgcgggtaagaagtcatgtaaacagcagttccggcaatgggccatgaacctttacctcctcccatacggtcgcggatttcaccaccggtaccggtagatgcgccgttgaaaggttctacggtagtagggaagttgtgagtttccgcttttagtgaaataacactcttgatgtcctttatccggaagaaatcgggcttagagtgatctgccggagcgaattgttcgactaccggaccttcggcaaaagccacattatctttataggccgagataatcttattggggttctcctgagtcgtctttttgatcatctgaaagagagaagactcctgttctacgccatcgatgataaacgttccgccaaagattttgtgacggcaatgctccgagttgatttgtgcgaatccgaatacttcagaatcagtcaggcgacgtcctaaatcagattctacctttttcaggtagtccatttcttcttttgacagggcaaggccttctttttcattgtaggcttccagatcgtcgatataaataatagcttccggctggcggttggtagtgaatacattttggttaagacctttgtacatgcgttgcagcatgggatcatggtctgcattttcatcttttacggggaaatattcctcgatgcggctaatgccgtcgagtcccatgttctgggttatttctactgcgttggtactccatggagtaatcatctcacgtcgtggcccgacgaagcagccttgcaggttttcttcactttccggcatggcttcaccaaaaagccagcagagtttgttgttgtcgttcgcgttaagttcgtggttgctctctacggcaatcacgctcttggaaggggttctgaaaaaaagaatcatgtgtgtatatacgattttgttttctttgcgtgcaaagataagcaaattcgttggtggtgagaaggaaatactataaaaaaaacttcagcctaccacgggtcaaggggggaatgaccgggtaggctgaaaaacaaatcaaacaaatacctatgtgaaaacaggaaatagtctgtctgatagcttatcctattactttcgacgtatcataatatttgaaccagttttcattgaagtccggactgcttggatccgaatggttcggttcggtgatccaactcctgaacttgctgtagacctgcatgatgtctatcttctcgatgggatgcgggatggcgacaggaatttttataccccacacaaagttgtcagtactgcaatatttaatatcggtacgcatattgccgcctgcctcgccggcgtatgaattgctgtaataagctgtcggttcgtagcctctcaagtggatttcgcgtcctccgtttttctctttttgcaggaagaagttctgattttctgatgtggctgctgcccacagtgcctgagtcttttctaaatttttgaagcaatttatctttaatctgtatttgatggtcaccagatcgttgttcgctattgcgtggtcaggttcggtattatagaatgttccgccattgttccgctttcttaattgttctgttcctgtaaagataaagatggcgggcgcatcttctccgggattctgaagctccattttaaccaggtcgtttccttctatttcaatcacgtcatcaatgtatcgggcatgtgttttatccagttgcagtcctaaacggtagggcagatacccgcccatcgcacggaaagtgatcttgatttcaagtccgtcttgttcgtaatcttccttgcttccgccgtgtccgtcgaagaaggttgcttgtgtgcgatatccgataacgaagtcgttaaagtcataatctcctgttgccggccaattatcttccatcataagagtagcttctccccctttgacgggataccattggtagctatatgcgccttctcctccgtttgtatcgaagccactcacgttttccggcagtttaatcgacagttccgcacgtgtagaagctctgttgatcggaacgcttatcacttctttccctttgccggcaggatactgtacatataatgcccggtttgctttcgctacatccagttcgatacttttagagatatcggatacgggtgtttctgccagcaaactttcgtcagtacatgctgcgtcggtataaatcgctacccgggttgccacaggagagtggatcgagagattgacacttcgtgtagtagtccagtccgcatcatccggaatgatcagatctgttgttttctccggttctttgggctgtgagaggtctttgtcatcgtcaacacacgcggttaaaagaagcgtgattcccagtagggtgtacatcatccaatgcgtagctttcattcttttcgtgtttagaattagtcattcattctgtttgtgacagcaaatatacgataaaagttgtatattgtaccctttttgtattatattttatataaaatcttgattgtctatattggaatgtggataaaatgaacaactttttctcctttgattggatggaacagagccttcctatacaacaaacagaggctcaattcacccggaattgagcctctgtttgtatagaatgaagcttctgtttattcgctgatgaccttgcggtattccgctactgccattttttccgccagataagcgttgatcaggctggtgtgtgcctgtgtccacgaaagctgcgccgacagtacatcgaccatacttgcctttccttcattataagagaaggtgatcaggtccaggttttcctcagccagttctttgttttcctcagctgtctttacctgctcttccgtctctttgagcttggtcagtgcggctgccagttcctggttgatctggtctactacgtaactttgctgtagtttttggatacctgtgtaagccttctgctgccggttggtcttgaatcttgctccccagcgcaatacggggatatttacgctcattcccacaatgggagtaaacttcacgtcatatcccatattgggagaggctgttgcccatccgccggtgacgtacatacttacttgcggattgtattggctcaaggctgcttttcgttgggcttcgctcttctgtatgttgacttctgtgctggcgaaatcggcccggcgttgcagcacatcatccaatggaagcagggtgacaggcgggcatacgacaccgatggcgcaaaggctgtctacaggtgcgttaggctcttctcccatcaggatattaagcttttgcaaagccagcgtatagttctggcgtgcattgatgtattgaagttcggcctctttgcggcgtgtcgaaatcatcaacaggtctgtgcggctgatagcgccgtctttgaagcgatcctggatgatttcatattgtttttcaacgatctcctgatattgggccgaagcattgagcatggcacgggccgaagaagcattccaatagaaggcatcgctctggtagtggatttggtcacgtgtcagttcttcgctcagctggtcgagtttttcgtcggctttggctatgcggttctgggcctgcagggcacctccggtatagagtggctgcgacacgacgaatatgccttggtacgtgtgattacgatattgtccggccggtccgtcccatgaatccatctctttcaggttcagtgttccttcggcagagatgtccactttgggcagaaatcccgtaaaggctattttccgtgcgtccgtgcttgccatcgatttcagatgttgctgtttcagcacctggctataggcttccacacgttcacggtatgtctcacggctcagatgcgggacttgtgcctgcacttgcgcacagagtcccaatgcaaatagaagtataagtttattcttcatcatatacttttagatttttaattcgtttctttatcccttaatcctgtgaatggcgcaataggctaccggaagcacgaacagggtcagtgccgaagctacgagcagtccgcccatgatagtagccgccattccgccgaacatggcgtcgaacagcaacggaagcatacccaggattgttgtacccgaagccatggctaccggcacgatacggctgatcgttgctttgatcaccgctttgcgcggatcgagtcccgattgattttcgatgtcgatctggtctactagtacaatggcgtttttgatattcataccgatcagtcccaacaagccgagaatggcgaagaaatcgaacgatttgcccaacagcagtaatcccaatacgatgccgatgaatatcagcggaagcatcagcaggatgactgtcggcttgcgatatgtcttgaacaacagcagcagggtggtaaacatcaggaagaaggtcagcggcagattctttgccaaagcttcgttcgattccacctgactctcctgttcaccaaagtatttcaaggtgtagccttccggaatcttgatttccttctgtacctgagaccatatctggttgaaagctgcgatggcgttcactccccgtcgcgggtcacattgcgccatcatcaccaactgccggttatagtctttcacgtttgagaagcgatatcggaaatcgaattccgacaccacctgttccagactggtggtctcgggaccattgccgaatacgggcagtgtacgcaggtcgttaatgcggaaggaatctgccacgctattgcctttcaataagataggcagtacctggtctccctggcggaattcacccaatgtcataccgttcgtcccgatctggatgctttgtgccatgccctgacgggatactcccaacggctgtgcccgctccggactgtaaattggtttccagataggaattttgtttccccaggagttacgtatattaataaggtcgggattccggtgcatgatttccaacgcctggttggtcagtgctaccaacgtatccacattgggaccgatgaagccgatttcgatggccgcgtccacagccggtgacagcttgaacaggctggtacgggtgatggcattcgggaagttggccttcatgtatacatcgaacttctcttcatattccttggtatacttgctgtcgttcagttctaccagtacgttggcaaaattcggtttcggaccaactgaggtcgatgccagatagtaacgcaacggagtgcttccgaaggtgatcgatactttcttcacttccggcagtttcagcaagtgagcttctacttttttcatttcccgggccacatcgtttactccatatccgtccggatagaacacgtcggcacggaagtaaggcttgtccagagacgggaagaagttttgcggcatcattcccattactaccagagagacgacaaagagtgcgatcatcgaccccagcgtcacgattttccgccgaatcaaaacgctcagtattttttcgaacttgtgatagaacggtttgtcatacggatctttgccggcattctttgctttggatttgaggatgaagtttccgaatacggtggtctgcgtcagtgccagtacccaacttaaccccagcgaaatggccagtacgacaaagagcggcttcacgatctcggctaccgatgaaggtgccagatagagcggcaggaacgaacagatggcaatgaatgtggcgcccagcagtccccattgcgggccggtggctccgtcaatcaatgctttccggcggtccacaccgcgggcgatggctatttgggcgttgtccgtcaccacgatggcattgtccaccagcatacccatggcaatgataaatcccgcaagtgacgttcggttgagtcctacccccatgaatgacatgataagcagtgtgcctccgatggagaaaaccagcgaagtgccgatcaatactccggcgcgcattcccatcaccagcatgatgatgacaataacgatcagtatggattctatcaggttgatgataaatccgttattggcctctttggctatgacgttttcgagataaagactctccagattcagtcctacgggcatcagggggaggagttcggccagtttcttgtctaccatttctcccgtcagtaccacgtctcgttgcgggtcggtcgatacaccgataccgatggcgcgtttaccgttgacacgcatgatggtgctcggtgggtccatgtatcctttctctatcacagcgatgtctcccagttttacctgtccggcccgggtggtgatgacctggttccggatgtcgtccactgtggtgtacatgccgttggccaccacgcgtagctgttgctcgccggctgtaatctctccggtgttgataatctggttttgcgattgcaacaggccggccagttgtttgggatcgatgcccatacccgccagcttgttcacggagatggagatgtttaccacttcggtctgtgtgccgaagagtgctactttcattactccgtcggcagtgactacctgtgtcttgatgcgttcggcccagtttctcatctcttcataactaaatccgtcgtcggccgtcagtccataataaataccgaacacatcgccgaagtcgtccgaaaccgtcggtaccgaagagccgctgggtaactgtggctgtatgttaagtaccttgcgtcgcagttcatcccatttctgagggatggaagaggcgggtagcgaagggagcagttcgaatgtgattttggaaatgccgtacatggattcggacttgattttatatactccgctcatactttgtatctcgcgggagatgggttcggtgatcagccgttccacttcggcaggctcggcaccgggatagcgcgtcatgatgacggccgatttgatgacaaaaggagcgtcttccttctttcccagtttgccgaaggagaagactcctccgatcagcaatacagccagaaagaagtagattactttggtattgtctaatgaatatttggctaaattcatgattgtatatggttttgagtgcaccacagattacacggattttcacagattgatgatttatattattgataataagattaaaaaatctgtgttaattcgtgtaatctgtggtgaaattaattattgcgttgaacgggcactcttatttcagttcctttaccgtttcaccttctaccagttgtgtcacaccggctgtcaccacagtctcgcctgctttcaatccttttgaaatgaaagcctgtgcatctcccataggagagtaaacggttacttcacgacggttcacttggtttccgttcaatacccatacgtaggttttgttaccttcgctttcaccgaatatcgcgctcagcggcaccaccgtcatgctttcttccaggaacgggcctacatcggcagagaagcgtatgctgcacgtaaagcccggttttacttcgtacagggcatggtcgaaagccggatcgtcgatcgtgatggtcaccgggataccggtaccgtctgtcgatatgtcgagatactcctccagtttggcattgaagatgtgtccgcggtaggtgtcgaattctacgcggaaacgttggtctttggagcggagcaggtaaaggtaagcgtcggggatagtgaatttgatgcgtagttttttggtgttcaccagctgtacaatgccttctcccgagttcacgcgttggtaattttctaccaagcgcttctcgatcgagccgtcaaaaggagccgtcagtctggtgtcccgcatattattgcttgaaagttcgtaggccgactttttttgttggaaggtcgatacgctgatttcatattcctgtaccgagatggcttgccgtgccagcaatcgtttgttacgctccacttgtgcggcggcggtttcgtaagccgatttgtctgccgcgtattgcaaagccagatcacgcgggtcgatagcggcaatcagttgtccttttttgaccctttggccttctacgactggcaggttaatgatctgtccgctcacgcggaaggccagtttcacatagtccacagcctctacaatgcccgagaagtcttttctgatttccgaccgggactctaccctggccgtctttacggggcgtactgttgtcacactgtcttctttcttttgtccgcaagccgtcagtagaatgagggctgcgaggatacatccatagttttttttcatatttcccattgattatacgctaagtgttttttgttcctttcaccacagattcacagagagttccacagagtggaaacaatagaaaagaaactctgtatggtgttgtggcgaactcctttagttcgttttaaagtaattaatagtctgtttagtcacattttgagggcgcaaagatataaaactaaaaaaccaaaaacagttttcaggtttgtatatttcatattattaacgaaatattgatttaccgaagagagcataagaaggtgtaattttccttacctgtttgaaaatcaaagaagtatatctttttgcctttatgttcctttgagtcctgccatagaactccctgccttaattttgtttcggtacaatcaaatctttaccctttttcaggttataaacaacttcggagatgcgtatgttcaattcatatccctctaaaagagagatttttatctcttgttttccgactttcatctgtaaggtgcagttgcggaaatttactttgaaagtatagctgtcccatgcttcgggaatgatgggagtgaagtcgagttgtccgtccagtattttcattccggcgaatccgcgtacaatgatttgccaacttccagccatactggtgacgtgcaggccttggtgcacctcgttgttgtagtcgtccagatccaggcgtgtggaatgcaggaagaggcggtaagcttcttccgtatctcctatccatgcagccagaatggcatgcacgaaaggcgaaagagaagattcgtgtacggttcggggttcgtaaaaccggaagttgcgacggatggtttcccggtcgaaatgttcataatagaggaaaagtcccaacagcacatcgctttgcttgatgtagcacgagcgcagaatccggtcccacgaccagtgttggttgatcggccgttcgttgacgggaatatcgtctaccgtacccagcactttgtccggatagccatcgtcttgcacaaaaataccccgttctttgtcttcgggcagatacattttctcgatgatctccttccatcgcgccgtctcttcggcatgccggaactcggttgagcgacgtatccggttgtactcttccggatattcatgcgccaccatctccaggcattcgatggtgctttgcaggcattgcacgcaagagtagttggtgtaccagttgttatttacattgttctcgtattcattgggtccggttaccccgagcagcacatacttctgtcgggcttccgagaaagagactcgctggctccagaaacggctgatggcgatcatcacttccagaccgtagtaggcgatatattctttgttgcctgttaccctcgaaaattgcatgatggcatacacgatgatgttgttgcggtgtatctcttcgaatgtgatttcccattcgttgtggcactcttctccatggatagtcaccatcggatagagggcggctccaccgccgaatcccagtttgcgtgcgttttcgatggctttgggcagttggttgtaacggtatagcaaaagtttccgtgatatttctctcggggtcgatagcaggaagtagggcacgcagcacagttcggtgttccattgtgtatttccgccatatttctcaccggtaaatcctttggggctgatgttcaggcgcgcgtcgtctccccggtagctttggttcagctggaagatgttgaaacggatgccctgttgcgctgccgggtctccctcgatcatcacatcactttcctcccagatttcttcccattgctgtttgtgcgcgccgaccagtgcttcccaaccctgctctttggcggcttgcgcttcgtccaccgcatactccaccaactcctgacggtcgcattgcagagaggagagaatggcaacatatttttccagagtcacccggtcacccggtttcacatcggcaccggcgctgaatcctgtcaatttttccttttctattttgatgggactgatatgggtgggtttgctgtttttataaaactggtaagtcatgcccaggcagatttgtgaatcctcatgcttggtttgcacccagaggtaggcgtactcgttagtagcttcggcccgcaggatgttccacattttttcgtcgaaattagagttctcgtgctttacgtcgccgttcaggaagggtaccagggagattttaccttcgtagttcaccgacgtcacactgtactttatcagacaaagattttggtttgccaggctgttgatatgctctacgtgtacttccagcgtgtggcctttgggtgaggtcacccgaaagtcgcggtaagagattccctcgcgcatgtcgagtcgtcgtctgtatgcttctacatcccaatgggccaggtccagctcctcatcgatcagtctcaggtaaatgccgctccagtccggtgcgttggggacgcgcgagaagaaacggggatatccgtttttccaccatcccacccgggttcggtccaggaaggtgatgcctgccacgtatgagccttgcaggctgtcactgctataggtttcttcaaaatttccccgctgtccgaaccggccgtttccgaggctgaatatgctttccgaagcgcgcatgttatcggggtgaaaaccctcttctatgatgttccattcgtctaccttgaggaattgtttcatggctttttaagattgagtcggttgtttacggcacccaagatacaaaaaaagtccgtgccgacagtggataacagataaaactctgcgctctttttatctttcgtgctattttatggtacgaatggtgggagatgattctggatcagcgacaggtaaggggcgatttattttgtcatgaaggtattcttttatcccttgccgacggaggttgcgttggtttaaaatcaggtagcctttggtttaaaagagagggtactttgattttaaaccaataccccctctcttttaaactcaaaagtcattcgcgctatagctgcttatggagcactttttgtctttccgcagtatacttttacgcttcgtgatgcgccatcgtctctttgatgaaatatacacaaacggcgcctgcaatcagcagtacgcctgccagcaccagcatgttcacctgatgccccccgacgaggtggagcaatcctcctccgacaagggcggcggcgatttgcggtacacagatggttccgttgaacagtcccaggtaagcccccatgtttttgcccgaaactgaattggtcaggatagtgaacggcatggcaagcatggcggcccaggcacagccgatcagcagataagagatgaacagcagatattcgttgtggaagaacagggtggatatgaaaccgatgccacccagtacgaggctaaaggcataggcctgtttgcgtgccttgaacaacggcaatatcacagcccagatgactgatccgatggcctgcacggcgaacagcacgcctacccagttgcccgcttcctgatagccggcgctttggacgtccgtagtgccccacaccgtggcggcaatggcaccgttggtgtaggtccacatgtacatgaaagcggcccagcagaaaaactgtaccagccctaccgtccaaaacactttgggagcatgcttcagcagggagataaagtcggctttttccttcttttcgtccgccgtgataccatggaactcttcaaactctttgggaggcatctctttcacttttaccgtggtatagatgacgcatagaatcaggatggcggcgccgatgtagaacgagtaaatcaccgattcgggcaccgtgcccttgtccgccgtgttgctgatcccgataaatgtgaagatgaatgggaaaagatagcccatcaggctacccgcattgcacaggaaactctgaatggagtaggccagccctttctgtttctcgttcaccatgtcacccaccagcatcttgaaaggctgcatcgccatattgatggaagtatcgagaaacatcaacgctaccagtccgaagatcatggccgtgccgactgccataccgaaacttcccgcattaggcagtaggcacatcacccataccgccagcagcgaacctgcaaaaaggtaggggatgcgtcgtccgaaacgggtccatgtcttgtcgctggcagctccgatgattggttgtacaatgattcctgccagcggagggagtatccaaaaatagctcaggctgtgcgggtcggcgcccagcgtggcgaatatacggctgatgttggcgctttgaagggcataggctatctgcacgccgaaaaaaccgaagctgatattccacagcttccaaaaacttaagtcaggctttactttcatggtgtatttattaagtagatttatttcgtcgttccccgtaccactaagttggtacgcacgattttattaccgctttttccttcatcgttcccttccagtttgtctatcagtagcctgatggtgcttttgcccacctcttcgccatgttgctccaccgtggtcagcttcggatctgtgctttgggcgatggcgccgtcggtgaatccgcagatagacacttcgtcgggcactttccgtccggtcagtttgcacgagtagaggatgcccgaagctgtttcgtcattgatggcgaagaagccgtccggatgatccggcctttcgagcagagcgggtgtgatggcgatcgctttttcgcggctgtcacataactttatcatgctttggtccaccggaatccgatactttttcatcgcgtccatataaccgttccgccggtttttcgatatttcgaggtggggagcggcgctataaaagaagatgcgcttgcagcccgtctgtatcatatactccacggcggcaaacgaaccggcataatcgtctaccaccacccgttcggtgttgataccggtacagatgcgatcgtagaaaacgataggaatattgttgtccagcaattcctggtaatggtcatatttggatgtgtctttggctagcgaagtgatgactccgcaaacccgtgcggcgaggaaggagtgaacgatttttacctcccgctcgtactcctcgttgctttgcgccaccaggatgttgtagcccgcttccgccgccgttctctcaatgccgctcagcacacacgaaaagaagtggtgaactaactgggggatgatgaccccgatggtgttcgaacggctggtgcgcaggttcagtgccagtacgttgggcttataattatgttcgcgcgcgtacttatgtatagcatccctcgtctcctggctgatgtccggattgtccttcagtgctctcgatacggtggagggcgatacccccagttcgcgggcaatgtctttgatggtgatttgcggtttactcatggtacatattggttttcagccaaaggtaaatgaatttatataaagacaaaaccaatgtatatatggatttgtttaatatgtcacaaaaatagtgtaaaggagactgaaaagttcagtgatagtatgttataagtccgcttttatgatgcaatcgtttgcggagttgcatgcgtggatttgtttgaatttaaataagcgactgttgtttaaatagtatttttgctacgtaatcaagaatcgggatgaagtcgttcattctctatctcttagaaagtatatttaatatttatattgttaactttaatttttagatgcatgaagcaagttaatcttagagtctgtcgtatgattctgcccctattgtttgggctattcttgtcattgagcgcttatgcacaacaagtctctgtcaaggggcatgtgaaagattcaacgggtgaacccgtaatcggcgcgaatgtggttgtgaaggataattcttctatcggtacgattaccgatctgaacggaaactttgttctgagtgttcctcaaaattcaactcttgtaatttctttcatcggttataagccggttgaaatgaaagccgctcccagcgtgacggtaactctccatgaagatgcggtgatgcttcaggaagcggtggtgattggttatggtaccgtgaagaaaaatgacgtaaccggttcggtgatggcaatcgatgcggataagatggtaaaaggtatggctacctcggcttccgaccttttggtgggtaaggctgccggtgtcagtgtgattaccgatggtggagccccgggggccggagctacgatccgtgtgcgtggaggttcatccatgtcggccagcaacgatccgttgatcgttattgacggagtgcctgtcgataacaccgagatcaagggtatgggcaacccgctctctactgttcatcccaatgacatcgagacgtttacgattctgaaagatgcctctgctactgctatctacggttcgcgtgcttccaatggtgtcattatcattaccactaagaaagggcaatcgggacgcgtgaaggtagactacagtggtacgttctctatcagtacgaaatcgaatacggttgatgtgatgaaggcggaagactttcgtaattttgtaatcgagaagtttggcgaaaacagccttcaggccaatgcgctgggtaaaacctctaccgactggcaagatgaaatcttccgtacggctttcagtaccgatcataatgtaagtgtatccggagcagttccgcatatgccttatcgtgtgtccgtggcgtatacaaacgaaaacggtatcctgaagacttcgaatatgcaacgtctgacaggtgccatcaacttgaaccccaactttttcgacaagaagctcaacatccagctcaatgtgaagggggtatacaataagaaccgttttgccgaccgtgcagctatcggtctggctacccagtatgatcccacacagcctgtctatatggaaggcaatccttatggaaacggatactttatgtatatgaagcaggagggagacaaggcttctccgattgatatcggcttggccaatccggttgccatgcttgaagagaaagatgataaatcgactgtttaccgcagcatcggcaatgcgcagatcgattataaattccacttcctgcctgaacttcgcgctaacctgaacttaggttatgatgtatcgaaaagtaaaggtgacgtgattatagccgataattcacctttgacttactgtacgggtaatttcaaaaacggttttggtgaaaacagccattatactcagctgaaacgcaacactttgcttgatttttacctcaactatgccaatacgttcggagttaattatattgatgttatggcaggttactcctggcagcatttctataattcgactaccaactcctatccttactcggctgcctatgcagagaagacgggagaagaattctataaaaaaggagatgactatgcgagcgaaagctatctggtttctttcttcggacgtctcaactatactttgttgaaccgttatctggtgacatttaccctgcgtaacgatggttcctcacgtttcagtccggacaatcgttggggcctgttcccatcggtagcactggcatggaagctgaacgaagagtcattcctgaagaatgtgaacgctatttcggatctgaaattacgtttgggatatggtgtgaccggacagcagaatctgggcaatggagactatccttatatggcccgatacatgtattccaaggcaggtgccaactattattttggtgataccgaatactcactgattgctccgcaaccttatgaccagaacctgaagtgggaagaaaccacaacctggaacgtaggtatcgattacggtttcctgaatggacgcatcacgggtacaatcgactattacttccgtaaaacgaaggacttgctgaacaccgttacggctcctgccggaactaacttcagcaatcagttgctgactaatgtaggtacattggagaacaagggttttgagttcagcatcaatgcccatgctgtttcaacacaggactggaactggaatatcggctataacatctcttataataagaataagatcaccaagatgactttcaacgacgacccgaactatgccggtgtcatccatggcggcatcgatggtggtacaggatacaatgccctgatccatcgggtaggtgaggcgttcaattccttctatgtgttcgagcagatttatggtcctgacggtaaacctatcgaaggtgcttatgtagatcagaatggagataaccagattaacgacgccgacttgatctgcttcaaaaaagctgctcctgatgtgttcatgggactgacctcacaactttcttataagaactgggatttttcatttgctttgcgcggtagcttcggtaactatgtttacaataatgtgcagtccaaccgtgaggcatacgaaggcgccaatatgtatgaccagaccggattcctgaaaaatcgtctgacctctgcccgcagcactgatttcaagaacgctcaataccgttccagctattacgttcagaatgcttcgttcgtgcgtatggacaacatctctttgggatatacgtttaataaactcttcaatgataagcagagtgcacgcgtatatgctacggtacagaatccgtttgtcattactaagtacaagggactggatccggaaatcagtggtgaaggaatcgataacaacatctatcctcgtccccgtgtattcatgatcggccttaatctcaacttttaatctgtaaaacatgaaaacaataaaatttaaatatcttcttccctgtgcattgctgggaatgatgttaggagtagcgtcttgtgtgaacgacctcaatacggttccactggacaaagacgaattggtttccgacgttgttttcgggaacgagcccttggcttatgagcagagtcttgctaagatttatgcaggtatggccatcggtggtaacagcgggggtgattccgatcaggatgtggtaggcatcgatggcggtagccaggcttcctttctccgtgtattgtggaatatgcaggatttgccttcggacattgcacactgtgcatggaatgaccccggtatccctgagttcaaccatatctcctggggtgcatccagtccgtggatcaagggttcatactaccgcctgttctatcaaatcaatgtagccaacgcttatctgcgtgagactaccgaagataaactggatgcccgcggttgtgacgcatcactgaaagcctcgatcaagacatggcgtgccgaagcccgttttctgcgtgcattgagctatgaatatgcgctcgacttgtatcgcaatgtaccgtttgtagacgaaaacagcccgatcggaagtattccgccgaagcagatcatggctgccgatctgttcaactggatcgagaaagaactgactgaatgcgtagaggatatgttggagcccacagtgggatacagccaggactacggacatgccaacaaagctgccgcgtgggcactcttgtcacgcctgtaccttaatgcggagacttacgtcggccagaacaaatataccgaatgtatcacgtatgctaagaaagtgatcgaaacgggttatcagttggaacctgtttatgtagatatgttcaaggcagacaaccacttgtccagcgaaatgattttcccggtacgctatgaaggcgaccagacgatgacctggggtggtatgaccgccttcctttgctggggggctacggcgactcaggaagaagtcaatgccaaaggagcatggcagggggtaagggcaaaatcgtcactctacaatctgttcctcaaagagagtggcagtgatgcggatacccgtaaggcaatgcttcgtaccgatttgacaaccagtcttgaaattattgacgaaaatacattccagaataacggtattcccgttaccaaatacttcaatgtaaataaggatggaacgctgcctccttcaaaggaagcttacgtagacttcccgcttttccgtctgggtgaaatctacctgacgtatgccgaagctgtgctcagaggcggtcagggtggcgacagagctactgctctccgttatgtgaacgatctgcgtaagagagcgtacagtgataagacgctggctcctatctctgattccgatttgacattgaacttcatcattgacgagcggggccgtgaattcttctttgaaggacaacgccgtacagacctggtacgtttcggactgtttactactgccggttacgtatggccttggaagggtggtacagccaaaggtaaggctgttgagaacttctacaacgtgttcccgattccgtcagacgatatcggttctaacaccaatctcaagcagaatgaaggatactaaaatcgaatgactattaaaaacaacgaattaagattatgaaaaaaatatatttctatacactgttgttaggacttctggcctttacggcttgcgaagatgagaagtcgcccgtcatggagttgcagaaagcctctgcttttgagcctttctctcaaagcgactttactttcaacgatgaaaatgctgcggctgagtttcccgagatcaagtggacggcagcagactatggagtgaaggcagtggtgaattatgacgttacactgacgaatgatgcgaatgcgaaaactgtcttattgggtgaaaccggaactaccagcctgaagtttaccaatggacagatgaacactatgatggctaaggtgggggcttatccgggacagacttataactttacgattacgctgacttctaaagcgtatgacatgactgctgatccggcttcgaactcgattacttttaaggcgactctttttgatccgaatgcggttgactggaagttcgcttatgtggccgtgggctatccggactgggactatacgaatgcttacctgttgggcgatcccgatggtgacggggtataccagggatatgccaacttcgatgcggatggtgtttcgtatgctattatagacggaagtgatcttaccaaggttctggcaaaggatcagacggctgctaaaaaaggattctacgggatcaaagtagatgctgaaggtaaggtggaacagaccgaaccccttgtatggggagtggtgggagacgctacttccggtggttgggataaggacacgcaaatggactatgacgccaccacccgcttatggacggttactacttcattgcttgacaaagagtttaaattcaggtcgaacaataactgggattccgataactacggagcggtatccggtaaggagtccgaacttgaaggcgaactggtggcagggcctaataattttaaggtgttgaaagccagcccatacgtgatcactatgaatctgacaaatgccggtaaatattcttatagcatggtagaaactaccattgaattgtcgagtgcggaaatggcattaccggggagctatcagggatgggacgctactaaagatgattgttacaaagtgcaatctgctgcccgcgactttatctataccggaacattttattttgatgccgataccaaatttaaattctgggatgccggggtatggatcggtatgatgggccctatcagttgggatgaagctaagaacatagggacatttgttctgatgcccagcgacggcgataatatcaagattgaaacagccggatactatcgggtaggtgccgatatgaagaagctgacagcctcgttgaccaagaccggttgggagataattggtgatgccacacccggtggatgggacaaaggaactgtgatgaattatgatccggcaactaaactctggtcggtggacgtcactctggtagccggtgagatgaaattcagatgggacggtgcttggactgtcaatctgggtggcagcctgggggcattgactcaggatggtgctaatatgaaagtgacagccggagcctataccattgtattgaatccggatgctaaaacggcgaccatgactaaaaaataatcctgtatttctctatctggaagagaaatgccaggaagatacttcggatgtcaacctgcataaggttggcatccttttttatatacaataataccttttaatctatgaaatatttaacttttccgtttctgctcctcctgcttccgctgattggtttcggctgctcgtcggaagagaaagaaaccgattctctgattcttttttctgatagtgagattttttttgagcaaggcattgattttgccgctacttcgggaacccggaatctatcgttctcgtcaggacgtccatggcggatctcgctgaccaccgatacggatacacgcagagcggcagactggtgtacggtgtctccatcttcgggaacagcgggcgatgcttctgtgactatcagtatacaggaaaatgctgattatgacagccgtagcgtcaagctgaccctggtggcgggaggaattgaaaaaagttttaccgtttcacaaaagcagaaagatgcactgacactgacagcttcccgtttcgaagtgggcaaggaaggaggaactgtgcaggtggaagtaaaagccaatataacatttgaggtcgaaattccggaagtggatcgtagttggatttcgcaggccaatacccgcggactggtggttaccaacttggcttttacggtggctcccaatgagggagtggccgggcgtgaaggagagattgtcatcaggagcggcagcctttcggaaaaaatccggatcacgcaggagggaagatgtgacgacggactgagtttccgacctgagactccggatgctgacaggcaattgacgctatattttaaagcgacgaaaacttccccgctctatggttatgcgggtgatgtgtatgtacatacgggagtggtgtcagaagggacctggatgtatgtgcctgcggagtggaatactaatgtggataaatgtaaaatggtccgggtggcagataatatctggagtattacgctggcaccttcgatccgtcaatggtttggttcgaacgaaacaccggttcggcaattgggtgtcgtgattcgcagtgccgacgggagcaagaaaggaacggacggagactcgtttgtctctgttaccgatcatctgtataaaccctttgaacccgcggctgtcagatatgcttctatgcctggcggtctgcaggaaggaatcaatctgatagacgcatccacagtcacgttggtgctgtatgataaagacaagaaagggggacataaggattttgcccatgtcgtgggtgattttaatgactggaagttgagtaatgaaagcaacagccaaatgaaccgggatgatgctgcgggctgctggtggattacactgaccggacttcagcctacccgtgaatatgcttttcagtattatgtcggtacaagggccggggagattcttcgtctggctgatgcttatagccgtaagatactcgatccggataacgataaatacattccctcttctacctaccccgatgcgaaagagtatcccacgggtgctgtcggcattgcctctgtattcaaaatacaaggggattcttatgactggaaggttaaaaacttccggatacccgataaaaataatctgatgatctatgaactgctgttgcgtgatttcactgccacaggcgatctgaacggtgctatggagaagataggatatctgaaaagtttaggtttcaatgctgttgagttgatgccggtgcaggagttcgatggcaatgacagctggggatacaatccttgtttctattttgctttggacaaggcttacggtaccgatcatatgtataaggcttttatcgataaatgccacgaagcgggtatggctgttctttttgatgttgtctacaaccatgccagtggttcgcatccttttgcccgtttgtattgggataccaaaaataaccgtacggcagccgataacccttggtttaatgtgaaagaacctcatccctacggtgtctttcatgatttcaatcatgactcgcctttggtacgtgcatttgtgaaacggaacctgaagttcctgctggaggaatatcgcatcgatggctttcgtttcgacatgacaaagggctttacacaaaacagcagtacggaggccactgccggaaattatgacgcttcgcgtattgccatcctgaaagattataacgagacagttcgtgaggtgaatccggaggcagtcgtcatcctggagcatttctgtgacgaaaaagaggagagcgaattggccgaagaaggcatgcaactttggcgtaacctgaacaatgcttattgccagtcggcaatggggtatccgtcaaacagtgattttacaccattggttactttcggaacaacaatgccctacggagggtgggttggctttatggaaagccatgacgaagagcggacagcctttaagcagattgcttatggcgagggacctttaaaatcggatataaatgtccgtatgaaacagcttgctgcgaatgcttcattctttttcacggcacccggtcctaagatggtatggcagtttggtgaaatgggatacgatgtgtcgattgaagaagggggacggacaggtaggaaacctctgcactgggaatatctggacaatgaagctcggaaagggttgtgcaatacatatgcgaaactgttgaagttgaggcgggaacattctgaactctttaatccggggagcacgttctcctggttggtgaagacagccaactggaccggaggacgtttcctgactcttgcagcaaccaacggcaagaggttggtcgtagttggtaattttaccgctaagccgatagaggcaatcacttcttttccggtaacgggagtctggacaaactatctggatggtacgaaacttcatgtgacctcgataccgaccggtctgacgatacctgcccacgaatgtcgtgtctatatcaatttctgattctataaaagggctacaccctttatcccggaaggtgtagccatctgtaataaagggtgtagctataccggttgtatggctacaccctttatggcattttaagatagcaactatagcagactgatttttgaaagcattttgccggcccagtccagttcttctccgatccattcggattcctgggtgttcatgtcgttttgctgtttatattcggccagcaggtccagatactctttcagtttgtcggcggcttttgcctgtttgttcatgcgcatcagcaacagaatctcctgtttgttgatatccagattgcgtgcagtggcaatttcccgggccttttccaatagtttcatacaagcttcgttgctctccggggtattctcctgagccatacgtgctttgaccaggatcacgtagtcatgatcggaggccacccgattgtctatgttcttttgagccagttgttccgccattttatagcgtttgtctccctgatacatggcagcattgaaagtcacgatgtccgaggtcattttctcaaacatatggctgtgtatgctttcggtttctcccagtttggtaaggcgctctttcaacaggccgtagctgccgtagcgtgtcaggttgtcgtagcgatggactgagccataaaactcttttattttattgatggcagaagagagagcattggggttcattcctttgaaggcaaggtaatcgcgggcgatccggtcggcttgcagctcctgtttgctgctgtaatccatacccaggcgattcactgtacgcacgttgatcagagcggcaatggttccgatgctggctgccaactcgatggcacccacccgttcgtcatatccatacatccagttggtatcgtcggctgccatggctactgtccccaatacatccgcccagaaagcggcccgtttggcgcgggtttcggcacgtgacacattatccacctgatgatcgaggatgaaatgaaccatttcgttggcgataatagcttccagttcttcttccgaatcgatggtacagagaagtccggtgcttaccagcatggccccgttgggtagcatataggcatccggttcgggtgactgaatgatgcgtacattcagtcgttccggacggttcatatctatttcgccgggattgactttggcaaaaatggcctgtacatagtcttgaatgtaggcgtctttgtaggctatttcgttgagtttatccagatagtccaggcactcctcgtccagttcctgtcgcatcttgtaacgataacctttccgattgtagtaatcatacatgccttgtgacaagtaaacgccttgccagtattcaaggactgtcgccggtttcagccggatgatcttaccggcttcttctgccccgacaggatattgcagcccgtctatttccacggcataggtgatgcctgccgtttcatcgggtgaaatgcgcatttttcgtactccccggatgacgacaggagtacctttcgtgtagttttggtacttttcggtcagttcgcctttcagtgcaatgggaccgctgaggtcatttcctttccggtctttggcatagaggatgcacgaggtcagaaagagcataaataggatagtcagtcgtttcatagtcgtatcttttttagtgaatttatgattagatgttacgaagatacgaaagaagtttcctacagcgctgttttttctcctattgtgccatagggttttccctataaaagtatatattgcttctggaaagctgttttttactttgatgtttctgtaggtgaggaatttgggagaataatttccatgatctctttctccatgccggagtggtgcatggcatatcctttccagtatttttctattcgcccattgggtgctatcaatataaaacaagggatggattttattccgtagcgggatgcaatcccggtcaggccttgcccgtcgctgaggttttcccatagaaaatcagagcttccctttacctggctttcgcgactgccgacattgatactgataatcgtcagtttgtccgcacaggaagagaacagttcctttaagccgggcacggacttcttgcaaggtgcacaatatagatcccagaaatccagcagaatgtatttccctttatttaaataatctgtcagtttgcaagaatctcctttcagatcaaataggttggcatctatataatagtctcctttttcgggtgttttgtcgggataaaaataagatttggcaaacttaccataataggtttgtttttgctttcctgttaattggccataaatttctctccccatacggagatgtttcggattggtcatccaatgggcataaccactcgataagaaaaagtacaccaaccctgtatcagtcagtttaggctgtttatgcagatggctgagtatgcggatctgccctggtaggtcattctggatgatttgattcgttagtattcggacactgtccggagtgagtgacctatcccataattgcctgctgttcatccgacttgtctttattatattgtccttccctttcagttgtctatagaagtcttcttctgcttgttgcggcatgttgttctccacaatccaggtttccggtacttctgaattggcggatactcttatggtgtcatcgccgacccacaaacgtaggttaagtgtaccgatagccttttctgttccgtacaaatagataatatccggagtcttttctcttttgccttccaaacgaaaggtgccgttacggatcatatcagatgtgaaataaatcattgctcccattccgttccagcgtccgaggtagagaatagagccgtcgggaacatatccattggttttcccttcgattacgaaatgttgtgcgtgcatatcccaagaggaaagacagaacaaaactaaaagccatatccgttgatactccattattattcctttctttattttttgtagtagtggtcagttacctttatccatctctgaccttttttgcttttcctgctactttacgaggataggaggggagatccgggagggtttctgttgtttgctgtaaatgaactaaaaatattagttacaaacctaaatttgatagttaataaactaaaatggatcgttttttggggagcagtttcctttgcggagtggctttagggaaaaaaaataagctgcctcaatattggggcagcttattttttatcaatcggatgatccgacctattatttcttacggttaccgtagcggctcatgaacttgtcaacacgtccggctgtatctaccaatgtagatttacctgtatagaacgggtgagaagtgttagagatttcgattttcagtaacggataagtttcaccttcgaattcgatggtctcttttgtagctacagttgatttagacaaaaacatatcaccgtttgacatatctttgaatactaccggacggtatgattcaggatgaagaccttttttcattttaatattcgttttttaaattattatatcgttttactatttggtaagaatagtgtaatggtcatttttcaggtcgcaaagataatgcttttttgtttcttaggaaaaaagttttggaaaaaaagtcgtattctcgcttttttttaagacttttgcaggggtgacgggttaagtttcgttggtttaaaaggtagatccttttggttttaaacctaagggtgcttggttttaaatctaaaaaaggactttaaacaggcaagaaatgaatcacattcaccataggattacacggattggcacagattgaagatttatttcattggaaattgaagaatctgtgctaatccgtataatctgcggtgaactcaaaaataaatatatgaagaaactaattattgcattcaactttttattgttgctggcggtcggtggccgggcacaggatcatgcggacaggctgtacagcgtagctttttacaatcttgagaatctgtttgataccattcatgatacgggaaaaaacgattatgaatatcttccggatgcggcaaaggggtggaactcggagaaatatcgttcgaaactgaaaaatctgtccaaggtgctgggcgaactttcgcgtgataaagtaccggcagggcctgccgcaatcggtgtggcggaggtggagaaccggcgcgtgcttgacgatctgattcgccaacccgaactggctgccggaggttatcgatacatacattatgaaggacctgacaaacggggcatcgactgtgcgttgctgtatgaccccaaacaattcactccccatgcgacggcattggtgctttccactcctttcgagggagataccatccacaaaacccgtggattcctgattgtaggcggcgagctggcgggtgataaagtctgcctgatagtcaaccactggccctctcggggggcggcggaaccggtacgcgtgcacgctgccatgcaggtgaaggcattgaaggactcgctgatgcgtacggatccggacttgaaactgattatcatgggcgacctcaacgacgatccgatggacttgagccttgccgtactgggggcaaagaaacacgtcgaggatatgactgaagatgacctttacaacccctggtgggtgacgctggaagataagggagtgggcactttgctctatcgaggcaaatggaatctgttcgatcagatcatcctttcacccacgctgcttcaagcaacaaaaggattgaaatatgatcacaatgaagttttcatgcgcgattacctgtttcagcaggatggtaaatataagggtgcacccctgcgtacatatggtggcagagtgtggttggatggttacagcgatcatttgcctaccattatatatatgaggaaacaataaaaaacctttatttgctacgtagacattacaaacagctcttaaaggatgggaaataatttgaaatagaattgaattacgctcctcaaacggatatttccgcccgagggtttctctattcaaaggattattcttacttttgcatagaatttttaattcactaacaataaacttttaaacaaaatggttaattacaaagatttaggtctggtaaacactagagatatgtttgctaaggctatcaagggtggatatgcaatccctgcattcaacttcaacaatatggaacagatgcaggctatcatcaaggctgctgtagaaactaagtctccggttattttgcaggtatcaaaaggtgctcgtcagtatgctaacgctacattgttgcgttacatggctcagggtgctgtagaatatgcaaaagaactcggctgcaaaaatcctgaaatcgttttgcacctcgaccacggagatactttcgaaacttgcaaaagctgtatcgactcaggcttctcttctgtaatgatcgacggttctcaccttccttacgacgaaaacgttgctctgactaagaaagttgttgaatacgctcaccagttcgatgtaactgtagaaggtgaacttggcgtattggcaggtgtagaagacgaagtttcttctgaccaccacacatatactgaaccggacgaagtagttgatttcgttaccaagacaggttgcgattcattggctatctctatcggtacttctcacggtgcttacaaatttactccggaacagtgccacatcgatccgaagacaggccgtatggttcctcctccgttggcattcgacgtattggacggtgtaatgaaagaacttccgggattccctatcgttcttcacggatcatcttcagttcctgaagaagaggttgcaactatcaaccagtttggtggtgcactgaaagctgctatcggtattcctgaagaggaactgcgtaaagccgctaagtctgctgtttgcaaaatcaacatcgactcagactctcgcctggctatgactgctgctatccgtaaggtattcgcagaaaaaccggctgagttcgacccgcgtaaatatctgggaccggctcgcgacaatatggaaaaactctacaagcacaaaattatcaacgtgctgggttctgacaacaagttagctgaataaattccaaatctagtatttaaaagttttacttgatttaatttatattttaagaagccactcaagcaattgggtggcttttttgtatcccttctcattataccatatcgtcacccgtcttcactacagccaccttcagcgttttatggaaaggaatgaacgctgcgatgacagcaatcaccagtgccagtatcagtacatagccgattagggttttcagggcaagcagcagggattgctgctgcaaagtggagtacagactgttggctgccaattgtccggcctcgctgaattcgtgcccttgcgccagggcattgctcaatgcctgattgtatttttgttcggccagcggattggtcagcgtcatgttttccgaaagaatgttcatcccctttgcctgcagatagtaaagcatgttgttaaagaacgaagcggacaggaccggagccaatactgagcggaatgaaatcaggaagaaggcattggacaacgtcaggcgcgggtctaaatcttcgacaacaaacacaccgaacgcaatgaatatgaccatcatccccactccccggaacaggatggggaggtagagcatttcataagttccataaggggtgataccaaagtagaggatagccagatagatgacgtagcagaacatacctcctgaaatgaggaagcgaaacctccatcgttgccatcggaaccaccagaagcaaatgacggctcctaccacatatccgggcaatagccacaggctcagcgaattggcgtgtatgctgtctacccggatgatgctgttcatatagttggttaccagtgaactggtggctgtcaggaacatggcgagtaccatgaagccatatccgatgatggatttatgcagaaagagtggtttcaggctgacaaagggtttgccttgtgtacgctgccgatggatgaagagaactatcaggagcgggatgacgaatacatatactctgatcttcggggatgcgaaccaatcgagtgttttcccgtaggtaaatgtatagagcgttagcaggaaagcggtggcgatgatgaacatgcttcttccgtccatttctttgaacggaatgtgcatgggacgccttgcatagcggaagaaacagatgacgaacagaatggcgatcagcaagaggatggtgacaaaatagtacatgtgctgccattggtagtgataggccagttgagcggtgatagccatcgatagctgacctccggagaaaacgatggggtagaagtaggcatagaattcacttcgtacgtttttcggactgaagagcgggcggatcaggatgatgaactccaacatgacgaaggctttgagaaatcccatacagaaactgcataccatgatgacgtccatactaccggtttgggcgcataccaggctgaagaatatctgtagcagcaggtcggtaagcagtaaggttttcggagtggctatggtgcgtattttcggtacgatgggataggcaacagccatccctaccgaagctgaatagtaagccatggtaatatcttcgctcaatactcccagcgtgttcgatacttcgaccatacttcctgtgtaggcaccgttgagcagggtgatgggaaagatgacaataaacatggtcacgatgcccaaccattgaggcacccagggacgggtaggcagattgagcttcaccataagcctaagggcggaccgcttccgtttctaccatcatccctgcacggagacattccatctcttcgggtgaggcgtcattgagatcgatgcggaccggaatgcgttgctgcactttgacgaagttccctgccgaattgtcggtcggtaccagggagtatttcgatccggtggcttcggaaatggcggttacggtcccgtgaaaagtgcgtccgctgaaagcatctactttgatgcggactttttgcccgatatagatatgggctatttgtgtctctttataattggctgtcacccacttgtcattgccccgtaccaggtaggaaagagtttgtccgccttgtacgaactgtcccggttcaagtgtacgtcgtcccgtgtatccgtcatagggtgcggtgacaacggtatacgacaggtttagtttggccatctccaggtcggcctccttccggaggatattggcttcggcgcctgtactgcgtttgctggtttcggaatactgcgattgggccgcttctttttgtcgcaacagggcgttgtatcttgcccgggtcgcttcgaagttcgctttggccagttcataatcctgttggctgacggcctgctttttcaggagccgggtatatcggttcagttccgcttcttgctgtgaaaggcgtgccagtgtttcggctatgttggcttcttgtacggctacatttactcctgaagtccggatgccggagtttaacacttcctttgatcccaaggcatccatcaaggccgcttccgcgtctttcagccggatccggtattcccggtcgtccagtatcagtaacgtgtcgccggcatgaacatactggtgttcggtaaaacgtacttctttgatatagcccggtatccggatgtttagcggagcgatgtattgatccactacggcatcattggttatctcgtagcgggcgtatttccagaagtagtttactgtccatgaaatacctgccaatgccagcaggatgcatactgtgttgagaaagatgttcctgaacttcagtcttctcaattgttttagctttatctgatgggtggacatggcggatttcttttagatctcattgagcacttcatgcagtctcttcaggtcttcgatgcattccgttatccggcttgcctccatctctgctccggtttgggcatagatatcgttgatcaggggtttcacggtgagggcaagttcttcgccttggggcgtcaggaaaatcaggcggtttcggcggtcggaggggccttctttccgtatcacccagtttttcttttccagattattaatcagattggtcaggcaagccttgtcctttgctgttttctcagccagggattgctggctgatgccttgtttgttccacaggcagttcattacttgcagcatctcgaaggtcatatccacgttgtggcgtttgagtacccgctgaacggcctggcggaatgccatccaggttcgtaaggtttgtaggacgagctcgcgctccgattcgttgtttgtcatcgtcgtattcttttagtcgctgcaaaggtaggaatattctccgataatagtcaaacgtttgactattattattcgcattaggctacacaaagggcacagaggatgtcgggtgaaatcctttgtgccctttgcttatgcggttataaccggtgtgagattaaagctctataaccatcgattggcggggtgccattgtcagttcttcattgagtgccgttacttttccgctaatgacgtcttttccttgagtcttgtctttcagcacttcggcatagtatttcaggggaagtttcacctctttatccgtaccgttcaacaggacgaataccgttttccctttatattggcgtgcataagcatatacgccgtgctgcaccatgaactgtttcatgctgcctttggcgatcacatcgttgcccttacgccagttcagcaggttgcggtagaagttatagctttcattctgcaatcgggtacgtccctcgggagtcagggcattctctttatcgtccgtccatccgcccgggaagtcctttcgtacatagccgtcgcttttactctttactccattcatcatcacctccgttccataatagagttgcgggatgcgtcgggtggtcaataaaagggtggaggcctgtttcagcatatcgaggttttcgccttcacccaggaaacggtcggtgtcatgattctcgatgaaagccagtacggaagccggattgggatacagataatcgtatacaaaattgttgtagacacggtccaatcctttgaaccaagtgtccgtttgttcattcttggccgtgttgactttgtcgaagaagctgaaatccatgactgttttcaagtgactgttgcgcggggcggagagtttggagtctttctgccaccaggctgtataggccggttcggtaacccaggtttcgcccaccgtgttgtagttggggtattcttcgttcagttctttcatccagttgctcatggcatcgtaatcggcatacgggtaggtgtccatccggatgccgtcgatatcggcgtactcaatccaccacaggctgttctgcaagaggtatttgtatacgtgagggttcttttggttgaggtcaggcatggcttccacgaaccagccgttgttcatctggtcgaaatcgtactccgaggcatacggatctacatgtggagtcagcttgtaggaagtttgcacaaagttgttcttgaagtccgcatggttgaaccagtcctttgaaggcatgtccttgatccagggatgttctactccgcaatgattgaagatcatgtccatcacgaccttaatgccccggttgtgggctttcgctatcagtgagcgatattcctcgttagtgccgaaacgtgggtctaccttgtaataatcggttgttgcatatccgtgatatgagccgcctttcatattattttcgagtaccggggtgaaccagagtgcggtcactcccaagtcggtaaaatagtccagattttgttcgataccggccaggtcgcctccgtgacgtgcgttcgggtcgttgcggtccactttatattcggccatgccttctatccggtcgttatccggattgccattggcaaaacggtccggcatcagcaggtataatgcatccgatgcgtcaaaacctttgtgatcgactccggctttgctgcgtgctttcaattcgtactctttcaccaatttcttctttccgaccgtaaatgtgatgggcatcttgcccggctttacttctttatcgagatgtaggtagacaagcaggtaattgttgctttccagtttcacgacgctgctgagcgatacaccgggataatttactgatacggatgcctggccgatgccttcaccgtataccattaactggagttccggattgttcataccggtgaaccagaagggcggatcgattttggatatgttcatggctgcataagtggttaatgacagtaggaatgaacctaagagtaacaataattttttcatgatattagctcgttattatttaatgttgctaatatagggtaaatcatcggattgttttccgttttctttcttactgtgtgccatctatttatgcaaacgttttcattggagaattctccgggatggggctcaaccgataaggagcacttttcgatgcaatcaggtgaacgtgacgtccggaaaaggagatgccgtcatagcttcggctacgcagcaccgtaacttcggctacgcagcaccgtaacttcggctacgcagcaccgtaacttcggctacgcagcaccgtaactttgattacgcagcactgtaacttcggctacgcagcaccgtaactttgattacgcagcaccgtaactttagctacacagcaccgtaatttcggctgcgtgccgatgtgacttcggttacgtgccactgtgccttctaccgcacatcttcaaatttattttccattattctccctctgtgaaactctgtctgcactcagtggtgaattgtccgaaacgatgcatctatccgatcaattcacttttctccctttaagaatttctcttttcggatgctttccaatttattggtggcacttttgtagtaatctatgtagggtgcgggttcttcttcgtcatcatccggctgctgtagtactgcattttgtttggattttgttcgcagaaaagcctgcaagtaatgctctgtggctttagtatctcctattttgtccgataagaacgccaagttataaagtaaaatatgcttgtcaggggcatatttgtattgttctttggtagccttgatttggtcccgggtttgcttggtttgcctgtagcagtctgccaagcctgagtataagcgctccatgatactgtcggcggggatagtcagggcgatagcctggttcagatatcctattccctcttgtttccataatgtcttggagcacgaacgtcccaaatagtagagtaggttggcgccgggtgactggcatgattttgctttgagtagccaatcgcgcgctttatagtattctttcgtagcgtagtagctgactcccaggtaataacatgtcagcagtgtgctgtctccccgggcggtcagatcctgataacgtttgatggcggtgggatattctttgcgcagacaatacgccagtgcgttttgacggttcacttctacattggtgctgtccgtccggcggtatgcctctgtcagggcaattgccccttcgtaatctttcattgtattgaagatactgcccagcttagctaccgagagatagtcggagggatatttcctgatgatggaaagatagcaaaacatactttctaccggcatgccggctccttccatgctttccgccatcagtcgcaatacggtggcggaactgtctttcctggccaatgcgatactctcacgcaatgcatcgccgtatcgctgatagttgtataacaagcgggtgtattgcaagtgtgcgtaaatatgttcgggattgagttccatcaccttccgataataccccaaggcctcgttaaatttgctcaattgcctgcaacattctgctgcctctaccaatgcctgctgattttcgggcagctcgataatgatatgttgcaaagtggacagggcttcggcggtacgccctaaaccttttaaagctttggctttctgtatgagtaactgtggtgatgcactttcttcatcaatcagtctgatcaccgttttatagtcatagtttgccattgcttcttgaacggaggcggtgttctgggcttgcagcactacgctgaaccccagatagaggaggagtatccaatgtttcatgggggggacagattctattgtttctgactttctaacggtattccttctttgaagaacttttctttctgtaagtctttcagccaattttcggcagcgttgtaataattttcaagtccgagtacaagttcccctttctcactcaccggttcttctttcctggcattcgcctttcgggtttttaagaaagcctgcagataacgttcggccgatttgttgtctttgagttgatatgaatagttccaggcgatgtcataaagaagtttatggttcgtcttgtcatatttgtacagttctctgagagcctggatttgctttggagtatcctgagccagtttacaacaatccaccaagcctttgtaaagtcggatcatggtgctgtctttgggaatggtcagttcgatagctttctccaggtgttcgatgccttcttttttccaggaagtcttggcgcagcaacgtcccagataatagagcagattgggattttcttccatctctttttgcagtttgctgaaacacgcgtgcgcttcgtaataatattcatccgcgtaatagctgactcccaggtagtataaggtctgtgtactgctgtccccctgttggcacagcttttcatagcgcttgatggctgtcggatattgttcggcgtggcagtaggcgagagcgttttgctggttgacaatcaggttggtggagtcccgttccctatagcgttcggtagcttggatggcatattcgggatatccagccacaatgttcaggtttccgagtttggccgcagccagataatcatccggatatttatcctgaatgacttcatagcaaccgatagccggtagtatctgttgcatcccttcaaggctttgagcctgtaggtggagcactacggccgaactgtccgtttcggacatcattgaactttctccaaaagcttcagcatagtttttggtgttgcaaagtaggttgatgaattgcaaacgggcatacttgtttttgggattcaggctgatggctttccggtagtagtccagcgcatcgttgtacttggccattgctttacagcattccgctgcttcgatgtgtgcctgttggttggtggagtcttccgctatcacttggcggatggaacgtagagcttccgcattgctgccgattcctttcagggcttttgctttctgcattaacagtgggatggtgggaggttccttgtttatcagttcaacggcagtctcgtagtcatagtttgccattgcttcctgaattttgttttgattctggcccatcagtaggggactgaggcaaagacagaaaataaggaagagtggtttcattgttcttgttctcataggacgtattgttttattgtccgcaagttagtaaaaatatccattctacgaaaggttcgtaatatcttttagatagattaacgcaaaaaaaagacgcccttctttgcgaaaagaaggacgtctaccttactaatgaaaaaatatcgtttacatgaggaatccgagcaggataccggcagctacagccgaaccgataacccccgctacgttaggacccatggcgtgcatcagcagatagttggtcggatcatattccaaaccgattacctgtgaaatacgtgccgagtcgggtacggcggatacacctgcattaccaatcagcggattgatcttattgcctttcttcaagaatagattgaagaatttgacaaacatgacacctgacgctgttgcgatgatgaaagagaatgcaccgaggataaagatcaagatagaatcccaggtgaggaattgtgaagcttgggtagaagctcccacagtcagtcccaacaggatagtgatcacatcgatcaacggaccactggccgtatttgccaaacgacgggttactccactttctttcagaagattaccgaagaacagcatacccagcaaaggcagacccgaaggaaccaggaagcatgtaagcaacagacccacgatggggaagattactttttccgtatgcgatacgattctcggtggtttcatgcggatcagacgctcgtgtttggtggttagcgcacgcatgataggtggctgtatcaccggcaccagtgccatgtaagaataggctgacacagcgatggcacccatcaggttgggagccagtttggacgaaaggaagatggccgtcggtccgtcggcaccgccaatgataccgatagcacccgcctggttgggttcgaacccaatgagcagggcaatgatatacgcgccgaagataccgaattgcgcggcagctccgatcagcatcaatttggggttggagatcagcgccgagaagtccgtcatggctccgatacccaggaaaatgagcggcggataccagccggaggttactccttgataaaggatgttcagtaccgaaccttcttcgtaaatacccacttttaatccggcttccatattgaatggaatattaccgatcagaataccgaagccaatggggatcagcagcatcggttcaaattctttggctacggcaaggtagataaagaagagaccgattagcaacatgaaaagatgtccgggtgtcgcgttcgcaaaaccggtgtatccccagaagtcaacaaggttattccctaagaatgatacgaaatctcccataattattcaatgattacgaggtctgtaccttcaagtacagaatctcctttattaactttaatttctgctacttttccgtctttattggcattgatgttgttttccatcttcatagcctcaaggatgatgatcgtctggcctctcttcacggtatccccttctttcacttttatgtcgaggataacgcccggaagcggagatttcacaccgtcttttttggaagctgtcggttgtttggttactaccggagcacctgtttccgttttcggagcggctgccggacgggtcaccggtttcggagcggctttgacgggcttgtccaactctactttataagaggttccgttcacttcaacgttggctatgttatcttctacatcgttcactgtaacgttgtaaaggttgccgttgattttatatttatattgtttcattgcttcattttattagggttagtaattatcttttcggagtctgacgcagtgtgtagatcttcgaactccagggtgagtaggtgcgtttcactttgttgatggtcaaaatcatgtcttcaacgtcgtgagcgtcattcaggtattcatgcaaagccatggcgattgcggcggtttcttcacctgtgtggctacccaggttcttttccttcgcttccgtcttgtcagtgataccggtggctttcatcgcgtttttcttacccagtctgacagctacgttacctaccgccttgaatgaaagatacaagagtaccaaacctatgaatacgaccgacatggcgatgatggccataccgataccgatagagtcgtgtttcttgaagttctcgatcttcgggtttttgtcgatagtcatattattggtgctcggagtgacatagctgtgctctccttcaccttttactacccagttggcacttccgtctttttcgcgagcgtatgaacggtcggcaagctgaccggcgggtatggttacttcgtcaatcagagttttaccgttagagtcatacaaagcaatgtaattctctttgttcgggtcgagcgtaaagttcacgtggaacgtaccccggttaggcattccgtctgcccagaacaaagcatgttggcgcggcttgatcagagtcagcacgtcgcctttgggaataggatatttggtcggattgtttttatcgttcgtcagaaagcaaccttccagatttacagaagcgaaagaggtgttgaatatctctatccacgcattgtgcagtccgtagtcatcctgatagttctggtcgttgacgaccaaaacctcattgattctcagactggtggcactttgcgccctgagccccatgcaaaccattgccagcagagcgataaatatcccgattcttttcttattcataacaatcgatgtttaatttgttacaatggaatattaccgtgctttttagcagggttggttaattttttggtctgcagctgttgcagggcgcggatcacgcggaaacgagtgtttctcggttcgataacgtcgtcgatgtaaccgtatttggctgcattgtacgggttggcgaacagtttagtgtactcggcttccttgtctgccaggaattgagcagggttttcctgatctttggcttctttggcatacaataccgctactgcaccggcacctcccattacggcgatttcggctgtcggccatgcatagttcatgtcgccgcggagttgcttgcaactcattacgatgtgcgaaccaccgtaagatttacgcagggtaacagttaccttgggcacagtggcttcaccataagcgtacagcaacttggctccgtgcaggattacaccattatattcctgacccgtacccggaaggaatcctggaacgtctaccaatgtcaccagtggaatgttgaatgcgtcgcagaagcgaacgaagcgtgcacctttgcgtgaagcattgctgtcgagtactccggcgaggtatttaggctgattggcaaccacacctaccgactgtccgttcatacgggcaaaaccgataataagatttttcgcatagtctttctgtacttccaggaattctccgttatcgatgatggcgccgatcacttcgtacatatcgtacggtttgttcgggctgtcggggatgatctcgttcagcaggtcgtccatacggtcgatggggtcggtacagttcaccaatggagcttcttccaggttgttttgcggaataaagctgagaagcttgcgaataatcgccaaaccttcttcaccggtttcggcagtgaagtgagttacaccggacttgctggcatgtacgcttgcaccacccagatcttcctgagacacgtcttcacccgttactgttttcacaacagccggtccggtgaggaacatgtaagatgtaccttccgtcatcagcgtgaagtctgtcagggcgggagagtaaaccgcaccgccggcacacggaccgaaaatacctgaaatctgtgggatgacacccgaagccatgatgttgcgctggaagatttcagcataaccggacagggcgttgatgccttcctgaatacgtgcgccacccgagtcgttgataccgataacaggggcacccatcttcatggccatatccattactttacagatcttttgtgccatggtttccgacagtgaaccaccgaatactgtgaaatcttgtgcgaaaacatatactaatctaccttctatcgttccataaccggttaccacaccgtcgccgaggaaatgttttttctcttgtccgaaattggtacatctgtgttgaacaaacatatccagttcttcgaaactaccttcgtcaagcaactgtgcaatacgctcgcgggctgtatatttgcctttggcgtgttgtttttcaatagccttttcgccaccacctaaacgagcctgagcacgaagttcaataagctcttttactttttcaagctggttactcatgagtttttcttaatttaaagggttataatatttacaaccggacgattgacaacccggatggggaatttaatgcaaagaaaaattccgtttgtccgtggcgcggatcgtccgaatcgtacatctttttagtgttcgcagagttctgtcagtacgcccagagttgatttcgggtgaaggaaagcaatgttcaggccttcggcacctttgcgcggagctttgtcgatcaggcggatctctttgctttcggcttcggccagggcattggctacgccgtcttcaatggcgaatgctacgtgatgaacacctgcacctttgttttcgatgaatttcgcgatggtactttccggacatgtgggttccagtaattcgattttggtatcacctactttcaggaaggctgttcttactttttgatcttctacagtttcgatgttgtagcatttcaaacctaaaacgttttcataatacggaagggcttcttcgatactttttacggcaatgcccaaatgttcaatgtgtgaaatcttcataactatatttttaaattttggtattaatcgtcttttcggaatggtataaaacagcacaaagaaaatcaattcttgtttaataaagaaatttttctgcaattaattatggtgaaaataggtttaaaacctaaggtgcatgggtttaaaaggcaggcatcgttggtttaaaacctaagggatgttggtttaaaaggcggagagggttggcgctgatccctgagacaggcggatgttcagacgtatattttgatcagcaggtcgttcagccattgccagcggaaacggaaccatcgccgggtgctgctttgcttgccaccgaagcggagcacgaagtcacgatagccgtgcttcttaaatgggagtccgacgtccatgaactccatgtggcggaatccgttttgatgggcatcccggagggctttccatacagccagtatacccgggtattgcaaggcataggtcttccgcatacctcccgaaaaccagagataggcatcgtttcccgaatagatacaggcagagcctccgataattttgtctttgtagcggacgatgaaaatctttgcctgccggctgtgaatcagccgggtgtccatgtgttggaaaaagatgatgttgggaaaatgtttacggatgcgggacgaatagagatgcctcagcatattcgaaaattcgcgtatctcttctaccgtacgtgcctcgtctacttttgctccgtttttcaggccttttttgatctggcggatacgggaggggctgaaacgctgttcggcgttttcgataccgtgaagcgagtttcgtacccgcagccagttgacagggaagtatctgttggaccggaaatatttgtagccgaacatggcgttctccagattgcggaattctattagaaacgagttccgcaaagcctccgtggtgaggtgctccagcatttcgccgaatatcctttccttgtcggcttccgctatcagatattcgcccgtgccatagatttcgcagcgtttgatgaaagcgggaggaaacatgcggatgcttttgcggatggcagcaagcagtcgcgcaacaggttttccgtcttccgaagccataatcagaagtggggtgtagcccggagtttcttcgtagatctgaaatagctctttcgaatgaaacgtattggttccgggaaaatccggaatctcacttccttggtaatatgtagtcagttttaatggcatatcgggacaaatttacattttttatttctctttacaacatttgcagggcttattttgttgagctgtcgttttgtgactatctttgtggagatactacaataaaatccgtttttgattatgttagaagaaattcttgaattcaacaaaaagttcgttgagaacaggggatacgaaaagtatatcactaacaagtatcctgataagaaaatcgccatcctttcctgtatggatacccgcctgacagaactgttgcccgccgctttaggaattcacaatggagacgtaaagattataaagaatgccggtgccgtcatttcccatcctttcggcagtgtcatccgtagtctgctggtggctatcatcgagttgggagtagaagaagtgatggtcattgcccattctgattgcggtgcttgccacatgaacagcgacgaaatgatagctcacatgaaaaagcggggaatcaagtccgaaacaatcgacatgatacgctactgcggggtcgattttaattcgtggctgggcggattcgacgatccggtgaagtccgtcaggggcacggttcgttccatagagaaccatccgcttattccgaaagatgtccgggtgcatggttttatcatcgattcactgaccggcgagttgacgagagtggaataaattgcctatctttgcgctcgaatcgccacggagcgcgccgattcatgcaaagtcctgcagggcataccttatatagacgggcatgccgggcggtaccttggttcgcgtgtgtttgtgcattctatggtgactggcggtatattcaaataatgcaaagtatagatacatggaaaatttcagtgaactaataaaaaatcgccgcagcatgcggaaatttaccggagaagaactttctcaggaagatgtagtcgctttgctgaaagcggccctgatggctcctacttcaaagcgcagtaacagctggcaatttattgcagtcgatgataaaaagttgctcagtgaactttcacattgcaaagagcaggcttcggcctttattgccgacgcggcattggccattgtcgttactgccgatcccttggcgagcaatgtatggattgaggacgcttccattgcctctattatgattcagcttcaggccgaagacttgggattgggaagttgctgggtgcaggtgcgtgagcgatatactgccaccgggatgccttccgatgaatttgtgcgcggtgtgctcgacattcctttgcagttgcaggtgttgtccgtcatagcgatcgggcataaagggatggaacgtaaaccctttaatgaagaccatttgcaatgggaaaaaatccatattaataagttcggaggtaagtaacggtgagtgcggtaaaagcaaacaataaagatacctacaaagccacagcagtcacccttattgtgatgggggtgctctatctgatcgacaaactgatacacttttccactttggggataccctgggtgatgaataaggataatcttttgctttacactgcggtgattttcctgtttattaagcgggataaatccgtcggcttggtattgctcggattgtggttggtgctgaacatcggcctgattgtttcgttgcttggttcgatgtccggttatctgctgcctttggctttattgataatcggaggtatattgtatttgatttcaacacgatgaaaagaagtatagaagatacgccgatcgtatttatcggtgccggaaatcttgccactaatctggcaaaagccttatatcggaaaggttttcgtatcgtacaggtgtatagccgtacggaagagtcggcccgcgaactggcacagaaagtggaagccgaatatacgacagacctcgcagaggtgaacccgtatgcgaagctgtatattgtttcactgaaagattccgcctttgccgaacttcttcagggcattgtcgaaggtaagcgggaagaggcattgatggtgcatacggcaggtagcatcccgatgaatgtctgggaaggacatgtcccgcattacggtgtgttctatcccatgcagactttcagcaagcagcgggaggtagattttaaggagattcctttcttcatagaggcttcttcggcagaagatgccgcgtttctgaaagccattgcctctacactgtccaaccgtgtgtacgatgccgactcggagcagcgtaaaagtctccatctggctgccgtgtttacatgtaacttcaccaatcacatgtatgcccttgctgccgagttgcttaagaaatacaatctgccgtttgacgtgatgttgccgttgattgatgaaaccgcccgtaaggtgcacgaactggaacctaagacggcccagaccgggccggccatccgttatgacgagaatgtgatcggcaatcacttgcggatgcttgccgatgatcctgccatgcagcggttatacgagttgcttagccgaagcattcacgaaagacaataatcccgaaacattaaataaaaatgagcacaatcaattacgaccttacccggataaaggcacttgctttcgatgtagacggagtgctgagcgccaatgtcatccctttgcatccgtcgggtgaaccgatgcgtacggtaaatgtaaaagacggttatgccatccaattggccgtaaaaaaagggcttcgtatcgctattattacaggtgggcggagcgatgtcgtgcggaaacgttttatagggttgggggtatccgatctgtacttcggctctgcggtgaagatacacgattatcgtggtttccgtgacaaacacggacttacggacgaggagatactctacatgggcgatgacgttcccgatatggaagtgatgcgtgagtgcggattgccctgctgtcccaaagatgcggttcccgaggtgaaagcgattgcccgttacatttcgtatgccgatggaggatacggctgtggacgcgatgtggtggagcaggtgcttaaagcacaaggccaatggttgtccgatgatgctttcggatggtgatttccagtatataccttatttatttatcagtatgcttgctaacttagatcgttataaaatcgtattggcctctaattctccgcgtcggaaagagctgatgacgggcttgggtgtcgattatgtagtaaaaactttgccggatgtggacgaatcttatcccgatacgttgcaaggtgaagagattcctcttttcatagcccgtgagaaggcagccgcctatcagtcgatgatcggaccggaagagcttttgatcacagccgataccattgtctggcatgaaggcaaagcgctcggcaaacctgtcggaaggcaggatgccatagagatgttgcggagcctctccggtaaatcgcaccaagtgattaccggtgtgtgtgtcactacccgagaatggcaaaaatgtttcgctgccgtgacggatgtccgttttgcgattcttgatgaagatgaaatcgcttattatgtcgatcactatcagcccatggacaaagccggttcgtatggtgtgcaggagtggatcggttttgtcggagtagaatccatatccggcagctacttcaatgtaatgggacttcccattcagaaattatacagagaattgaaacaactatagagagtgtgccgaaactcgtatatacaacggagtagcacagagtctcacagagtagatttattctctaaagaacttttataaaaaactctgtgttgccttgtggtgaattatgccttccttgtaggtcgcatgattccgtatggcgactccctccgtggaaggagaagagtgccatgcgaaattatagtttgatcatttgttttctgtattttctttctccatttcgatattgataattgtgttatcccatttgttcatcttttgcgtacccaaatctaccagaaagcccggccaaaatagaatgttccacaggcaggcattgttaaatgtagattccaggacaaagggagtcgtttggtacccttcctttttggctactagttgtttgtcttcccttttctttttgatttgtacagtgacactattgtcttctttgatttccgctattttctgtttggtcgatgcttcgtagattttagttccattcattcccgtaaaggtgatatcttgtttggaactgctgaataatgtacagcatgatgaaaatgaaatacagacggatagcaataataaaatctttttcataatctaagtttttaatgtgatataattgttttctttgatctaattatttctttcggatcgaggatgctcttcttctgtgtgtgctactgttatgggaggaacttttattgcctgtggcaggtgtcttgatcctgataaatggctttcagtaagcgtgctcccagcagcggacgataatgaccgggttcgtaataatgatgtatgtcggctgtgtattcgttgattcccgtgaaatcccagacagcggaatcacccagtatagccttcaatatttttatgtcttcccggctggtctttttctgatagtaatccggaccgatgatgaacttcaggttcgtgtggtgcttatcgcagatttttttgatggagcgaagtacctgaatctggctggcaaatataacaggaagttcttccatacccgcattcgttcgcttcttgaattctttttcatgacggctccagtatatttcgccatcttgcgcgatctctttttctctgggattgataaaattgttcgtgtaaggctccctgacgggatctcccggatttataacccctttcatataaggagcatacttatgtcggatcagataatctatgtaaggaatcattctgtccggataaaggaactcctgcaggaatctcaactggaatcccaattggctgatgccggctgcttcggccgaaaacagatgattgttgcccgataaaggagcgtttttgtccagtgattttttatccagaacgatcagtacatttttcaggggtgcacctacagagtcgagcagctgaagcttttgacggacgccgcccaggctttctccgttgtcatagaagcgtacggcatggtcgttcttatccaggtatttttcccattctcctgtcaggaatgccatggtacaggagttgccgagtataaaggagttataggctatcgaatcgcgattctgcagataattctgccatcccacatgggcttcgttgagtagcatgggagagtcgtcgaatcgtttgtaggggtgtaataccctataaggatcaaacataaaatagacaaccactatcgggatcagcggcaggatcagtaaaagcaacttcaggcaaaaacgtgtcttgggggagattctcgatgaatgatgtagcatgcgcgtaaagggtttcggttaaaattgtaaatagatgaaagtttccgtgtcaaatttgcctaacatcagcagagcgaataccaacagatagtagacactccaccgtaaccatgcgggttggcgttcaagtgtttccatcaggttgtacttagatgcataatattcgtagattaatactagtaatagggccgaacctgctacgatgcaattatgatcgcgtatgccgatgttcatttctttccaggaagaatgtacctcgaacgagatgttccgtaagaaataccaggcatcgctcagcgattgtacacgaaagaatataagcgagagtgcgaacaatagataagtccggacaatcagcaagctgtcggccgcatattttcctatatattggggcagattattgcggaaagcagctgttttcatttcccagcagataaggacaccctgaatcaggccgtatatggcgaaagtcaatccggccccatgccacaaacccaatgcgagaaaggtgatgaggaggctgaagtagattccccactgtccccagttacgggtaccggcggttagcggtacatagagataatcgcgtacccagaaggagagtgacatgtgccaacggcgccagaagtcggcagtcgagcgtgctgcaaacgggcggttgaagttgggcgacaacttgatgccgaacatataggcccctccgatagcaatatccgtataacccgaaaaatcggcatacagttcgatagggtagagtaggcaagtcattagcagttgtacacccgagaggtcatgaatcgaatgaaacatgacatctgtttgtggggagatctgattggctatcagcagtttcttgatcagtccgagtaaaatatatttcagtccggtcaccgcgtttgagtagatgaacgggcggggatctttcaattgtggcaacaggtctccaccccgttcgatagggccggagagaaacttcatgaagaaaagcatatagatcaggaaatccacccagtttctttcgctgcgttgctcttgccagtacacgtctgtcagataactgatggcttgaaatgtgtaaaatgacatcccaagtggaaagatgatatcatctatgaccgtgccatgaagaaggagccatccgccgatcagggcgatgattcctgcgatatagacgggtttggtcttttttccggcttttgccctgctttccatccattgtgcccaaaagaaggtgaacagtgctaccactactgccgtcaacaggaaaggcagatagtaccatccgatgaaaatacaactggttaccagtagtatgaggttgcgggcacggcctttgactgcatagtagaggaagaaacagagggtaaatagggccaggaaactaaaagagaggaactgcatcgtttattccattttggttaataaggcactgcacaaatcgccgacattcttgaacttaatgacctccctgaaattgaaacgtactccgaaatgtttctcgatttgagctataatttgcatgtgggttagcgagtcccagccatctacatcttttgaggtagatgattcgtcgatacatacgttgtccttttttaagatattacggaaaatgctttgtagttgttttaatacttcttctcgattcatatttattattgtttttagagtttcttctcttttatcagttcggcaatctttttacggtctgttttattactattggtcaccggaaattgggaaatacaatgaatctgcttcggcagcatgtatttgggcagtttttctttcagatattctatcaatgcgctttgagtacattcagttgtctcgacggccaggtgcaattcgttacagattccgtcgcagagcaacggaacggcagccacgctgcagggagtcttgaaaaacgactgggcagtatattctatttcactcagttctatcctgaaaccctgtattttcacctgatagtctttacgtccgcaataaataatatccccgtcgccatccagaatacacaagtctccggtccggtaatagatttgtccgtcgggacggtgtatcagaaccaatgccgatttttccgggtcgtccagataacctttcattacctgccggccggatacccaaagttctcccgtctctccttgaggtagctcgtttccttcttcgtcggcaatgatggcgcggatgccgggaaatggttttccgatagccaccattccgttgtaatgcttgcatttgtccgaagccggaatacggtaacaggtgcagtaaatcgtagcttcggtcggtccgtataggttgatgaacgttgcgttgggtgccgattttctgaatcgctccaacagctcgatttgcgatgcttctgccgatactcccagatatttcagagagggcagattgatttcgtcgaagtagggtgaaaggagttgtagcagtgagggagtgacagtggcaaaggtcagttgatacttctccagaagttcaaacaccttgaagtgctttacatcctgatggcctaccgtataaacggcagcacctaaagtaagaggatacagtaaagatactacggatacatcgaatgtaagttcgaacatttgcaacatgcgatcatgttcatccagattccagtcgagcgaactgtatgcccggtaaaaggcgttcaagttagcccgtgtgatgggcactcctttgggctcgcctgtgcttcccgatgtaaaaatgatataagcgttcctttcttcgtccgatgaatgggactgctgttctgacagtgtttttcccggtagccggtccgtatcgatgattctgaagtgtccggtgccgaatgctgaccggtcagtgtcacttgtacagagcaaagtacgcagtccggccagagcggctattttgagattacgctcttccgggtaggcaggatgcaggataacataggtctttccgccggctagtactgccagaatagcagcataggtttcaatccggttttccgctacgattccgattttttcatcttttatttctgatagcgaatgggtgatagaagctgttatttcaccgagttgggcataagtataatgtttatcgtcaataatgaatgcttcgttttcgggataacattgcatggcggaaagaatatcattgataatatccttctgggaagatgttgtcatatccattagtttttattcatgttttgggtttaggggttctttatatatcttcttgagatcgtttattaagatgacagtgaaatggtctgatctccctacgcacaatcgattaaagaatgttaattgtgtggtacgcacgtgcccggtctcgctttccctctttcggaaggggaaatagcgttggcttcatagccgacgactttgaatgggatagacaacacgatactttattgatacttacataaattctaatcggacagatttgtcatctctatcagattgtataaaaaaacaatgggggacgatgaactaaataaatatacggtttgttgcttattagtaattttatgtttaactctaaaatcttagtattatgaaaagatttcttgtcttatcatgcagtgttgccatatcggcacttttcttccatgcttgttcgtcttctgatgattcaatgatcgatgcgcctctgacaagggcggatgcagtttcggagaagatcgttttccaagatgatttcaaccaggcagatagtattcctgatagaaataaatggagtttgtgtaagaagggaagcccggcctggagcaaatatttatccgaaagctatgatcaggcttatgtacacgatggaaaattagtgttggttgccgaaaaagtgaacggagtatataagacaggaggagtgcaatcattgggtaaagcggaatttcaatatggtaagatagagatatgcgcccgtttcaccaagacggcaaagggcggatggcctgccatctggatgatgcctgccaaacccgtttacagtggatggcctgcttgcggtgaaatagatattatggaacagttgaatcatgatggcattgtatatcagacaattcacagtcattataaaaatgatctgggattcactaagcctgttccgacaaaaacagtgtcttacaataaagggcaattcaatatatttggtatcgagtggactcccgaagctcttacttttaaggtgaatggagctactgctttagtttatcctaacttgcacttggctgatgagagtgtcaaaaagcagtggccgttcgacacctctttttatttgattttaaattatgccttgggtggtcccggaacttggcccggtactataacggatagtgaattgcctgcaaagatggagattgactgggtaaaagtgagtcagcctacgggacgttaacattgttaattcataattttcatttttacttttccggatataaacaacaagtctttgatgtatcaaagacttgttgtttatatccaaagcactaactttaacactgtgttaaaacaaactttctaccgttagctttcaagattgctcagtcggttgattaccaatagcatgtcttgattgatcgtttgggggggctgacaatgtttcgataaagagaacataggataattgttcttttgccaacttccggatccggctttttccttttacgttccggttcatccgattgtggtgtttgactttccctgcatccgaggggctccgttaacgggttgttgcgtagatgttctcgtaaatgggtgtcaaggcgtctttctctaatatccattgattggtgcgggagttcattttgtatgcatattgggcaatcagttgattgttattgtcagttatgtatatatatttttttgatagatcgaatgatcctttttctttattccatacagaatactccaccgatgtttcggtctcgtaccgggagattatggtcctcgattctgtttcccaagtgttcttgaatatgttccatgcataggtggatttcactgttttctgttgatcggtatcgtagctgtatttatacatctttaccggattcagtatgcctgaggcggcatcgttcattgcatatatttcacggcaaaccaactttcctccttccatcgtatcgttatggataaactgttttccattgttggttgcacatgcgaatccgcatactgaaactaatgcagcagaagctaatactcttttgaaaaatgtaattgttttcatatcctttattgtttagttagtttatatctttctttgtctattagacgtgatggaatcgtattaagttgcacggatatgaaattattttcaaattattttttgcaggggaagctttaacgggtatgctacgttgtcagatggatgataataagcgggttattaaaaaagatcagagtgcctcaggaatctgttaattagtgatcaactcctgccacactctgatcattctgtttttcttttttgttttaaatcagatcgagaaccaagggaatgtcatccggggtgactcctttgcttgtgataatctcctcgtctttacggaacacttcaaggaatagctctttgctgccatatagttctgcggctttggtatatagagagagggttttttccacgtttcccaaagaccatgctacatgaccggcgttcaggtaatctaccggcattgggctttgatcaatcactttatcataatacttcatggcctgttcgcgtttagcgatcatgaacgaacaccaaccgatggcacgccaggctttgacgcagttactctccagaaaatcaagtttaaagaagtagttcaacgcttcttcaaaattccacatttccgccagacaactacctatgtaaaaaatcactttcgtatcttccggcaacacttcttccactttccgataatatttcaaggcctctttgaattgcctgttgaggcgatagcaagtgcccagatgatggttggtccatacattgttcgatttcaggatatctgctttccggtaggccttgatggcttcgtcatatcgttttagtttctgcaaggagtagccctgcttctggcagatttctgcttcttcttcatccataagcatatcaactatcgtatcgtaggcttcggcggcttcttcccagtgcttcttcttgaagtgaaaattagctatggcttccatggcttccggattgaatagaatatctatcaaatccggttcgttgtagaggcagatggactctttgaataagtcacgaaattccagtctccgggcatagagtttaaagaagcggtacagatcgtgcagatattggttgcttaccgtatcgggacgttcggagaacttctttagcgtttcggctttcgactggtctgctaattcttctatctgctgatccgtaagctgattcagcatcatgtcccgctgcgattgtggcaattgctgcatcgtgaagaaaagtgagtacttatcgctgttgcagaagaaacccgattgcaggatgatttccaataggcttcctccctcttttccccgatgacggaactctttgatcacatccgattgctgcttgtcgaaaggatagaaccagttggagatatctctgaagaatggataactcttgagttgtgagaaagtgctcatatatacgtcggctccttctagttgcaattcgttcatttcacgcaacttgtcacctagccccgacttctcgatggcatctgcccagtcaggattggtgtcatctttctcttcgtcggactcttcgaagccgaatttcatgttgcgcataggcgacatgcttttcagcatttcggggatgatctcctcacgcattttcttgtcgattttttccgtctcctggctgagcagtatctggatatgtatgcgtaacaagtctctttcaaatgcagtttcttccatcagcgctgtgatgcgcagattgatctccggatagaaagagatgcgtggcgaataggcatgcaggataaaagtaattcctaccagggctcgttggctgacctgtacattgggatgacggtaagcatctatcagccataagagtttcttgaggtcgaaacactccatcacactgagggtaacggcgcttgtgaagaggcaaagatcgttcaccggaagcagttcggactgaagcatggcttgtgcggctgccacttcttccgcagtccagttagtatgggtccaggtttgcaaaaacaaagtcttcaaactgtcttcatggcgtttcagcacttcctccatgttttggtctgagacgaatccgcttacggcaagatcgtcattgaacgattcgagcgtatgcatcagcatctccagagtgaggggggatacctcttcggaaaggcgggtacggtactggtgatagtaatggttcgatacgctgtccagcaacgtaatacgcgcctggtcggtaatctcgagtgtgtcggtcagcagtttctgatacagctttctacgttccgggtcttctacgccctggcgcatgtattgcaacatgtagctgtacgaagtctgtatttgttccagacgggtacggagcgaccattcggggcacttccataggaatgattccaattgagttaatgcttccttcaggcgtttttgcccgatcagtcggagaatatattgatattgttcattgataagttgttcgttcataatttacttccgtttattgtttccaatccatgtaaggcgtttccataaaccttcaaaggggccgtgtttgaagtggctgagccaccaggaacaaaatgccatttgaagaagtacaaaaaggatgccaaaaaagaaactataagtaattcccaggaaacgtcctagttcgaagccccagtgatagaaaaggagggacccaatgacggattgtccgatatagtttgtcaggctcatctttccgtacgaggtgaagcgcatcagaaatctgcggtctttgatgcgataaaaagtgataagcagtccgctgaccagcagtaccatgaaactaaggttgctgagagagctgatgatcaattgcagagggacccgtatggcgttgcgggtgataaactccggcaacatattattcagtccatacagaggaaagaaacagattaacgagatgcccaatgctttgagccagtgctgttcgttttgttcgctataaagaaataatcccttacgtcccacaagcatgccgaagaggaagagggcaggggtctgcaagatacgtccatgttccagtgcccaggtcaggttggcgagttgcccttcccagagattcatacggattgtttcgaggaaggtgccgtttttctgtacatcgaaggcaattccgaagtaatgggaagccagactgggaccggctacataatccggattgcaaagggcatagatcactttgcaccagtctatcggttgtatgatgagcagagtggcgaagatagctatgctccgatcgctgagacgacaggacaggggaagtatcagaccgagcatggcgtacatcgtcagtatctcaccggtaaagaaagctgcattgaactgcccgatgataaagagcagcgccattcgccagatgaaccggagacgaaagtctttgccgcggcgttgctgattgttgtcttgtatatagaaactaaagccgaacagtagggcaaatatggcgtatgctttgttgctgaagacaaaaaagagtccgttccagatagctttgtcggtgaatttcatccattcgcagggaacagtgtccggaaaggaatagaagttgaaatgttcgatactgtgtaggatgatgatgcccatcacagccagtcctctcaatacatcggccacgtctacacgggcattgggttcgctgattttgtgttccattggttattgttattatgattatttcagaatcttacctgtacctgcgcctgaaacagattgctgtctttgcctttattccggtcgcagaaagtgtattgtgcttgcagcctgcacttgggatagaaccaatattgcagtccggctatataattggtctgtttcctactgacggctttgtttgcattgaaatagtcatacgaagccacaaggtcgaaattgcgtagcatccggtagcatccggtggcataaaaaccatcactcttcacgcctccatcctttccggccagatattcggaacggaggctgaacggtgttgtcgtgatgacgcctcctatgctccagcgatttttggtatagttttctcctgcccggatgccggttatttcggagtcggcaatggcgtgtccggtccctttgataaacgaaccacccaccgacagccatttcaggggattcaccatcaggttgccgatgatatctttttgattgtttttatccttgatgttaagtccttgtccattcattatggctagtttgtagcatagcagatcattcagcaggcctccatgaaccatggccccgatgtcgcgtcccgatgtcatgccacaggcgacatcactgccgctcacccctgccagatagcagactgactgagaatagcagttgatcagttctacggtagtgggcgacaattcattttcgatggtataaggaaccttaaattcgccgatacgcactttcagcccgggtagaatccggtaatcggtgtaaacttcgagcagcatgccgccgttgtaaaagtcgtacataaaatcacaggtccagcggtccgtgatctttccgtgagccatgaaaatgattcgtttgatgtcgaacgtattcattttttttgctgcatcgtcataggtatatcccaactgcgcgtatccggccagagtgattcgctctttcagtgtgttgaccactttattcagtgtagcagcctcttctttctcctgcgctttcagggggctgcctgccaggagtatcagtgcgaatgttaacaggaatgtgtttttcatctttactttgttgtatttattgtggtttgagtgtgccgggaatgaaggtggtatccactaaattttctcccggataatagtcggggattgcccctttactcttcagccaggcaatgattttttctatgtcgtggtaagacggacgggtagcaggccgatagtccggcaagtctatctgcatggccgccttttcctgcagtccgaattcttttactaaaatttccgtccattcgttttgaggacgggtttgtaagtatttcacgccgagattgtagccggtgataaaccgcctgatctcttcgtctttttccgtgatggctttttctgagaaaacaattccggtgcaacgcagtcccatttgtcttgtgttcagtaatgctgtatgcccatcgttcagggcaattgccgttgccggtccgggtaagaaagatgcggagatctgtccgtcctccaacatcatcagcctcaaggggatattgtttatttcaggtttgttcacttctccggggtgcaggcaggcccgtttcattacttcgtctgtggcatattctacaaaggtattgccggagacagaaatattcttccctttcaaatcgtccggattcctaacattgctttttttacttgctatcagactgagactgccatcggtttccataaccagacgtaagcggcttccttttgcctgcaacagagttgcacccgggtagtcggtgagcataccatccagtttccccgataaaaaagcggcatcgcggtcagttgccgaagcataagtaatgaaatcgattttgatatccagcgagtcataaataccctgacggacagcaaccagagaaggcagtccatcgaaagaaggcatcagtccgaaagtcagagtttgcagttccggcaaagcggaatgcttctctttctttcctgtgcaggctgatagaaagaaaaggaacaggatactgaaaaggaggctctctccccatttccggcttttaaaaaaggcaactccgagcggggttgccttttctgtcttatagtgattcacttcagtcttattcctggatagcggcaatacccggaagaacttttccttcgattgcttcgagcagtgctccaccgcctgtagaaacataagatacaccgtttgccagaccgaacttgttgacacaagctacagagtcgccaccgccaacgagtgagaaagcgccgttcttagtagcctcaacgatagcttcgcctactgaacgagagccgtgagtgaagttttcgaattcgaatacacctgtcggaccattccaaagaattgtcttagaattcttgatcacttcggcaaagatctcttcagatttcggaccgatgtcaagaccttcccatccgtcaggaatttcgttaaccgggcagaatttagtattggcatcgttagagaaagcgtcagcaatcttagcgtcaacagctaataccagatttacacctttgtctttggctttctgcatcagttcgcgagccagatccagtttgtcatcttcgcagatagacagaccgatctgtccacccattgctttggtgaaagtgtaagtcataccgcctgtgatgatcaggttgtctaccttgttcagcaggttttcgatgatttcgatcttagaagatacttttgatccacccatgatggcagtaaacggacgcttgatgtcgttcaatatcttatcaacggctttcacttctttttccatcaggtagccaaacatcttattgttggtgtcgaagtatttagcgatcagtgctgtagaagcatgagcacggtgagctgtaccgaatgcgtcgtttacgtagcagtctgcatacgaagccaatttcttggtaaattctttctggctctcttttacggctttcttggctgcggctttttcttcgtcggttgcgtcttcagccaatcctcttggtttgccttcttcttcagcgtagaagcgaaggttttcaagcaacagcacttcgcccggttgcagagcagcggcttttacagcagcttcttcgcccatacagtcgttggcaaactgaacttcaacgcccagtaactctgatacatgcttaacaatgtgtttcagagagaatttgtcagcaacgcctttcggacggcccaggtgagaaccgatgatgatgctaccaccgtctgccagaatcttcttcagggtaggaagtgcagcacggatacgagtgtcgtctgtaatgttgaagttttcgtccaagggtacattgaagtccacgcgaacgaatgcctttttaccggcaaaattgaaattgtcaattgtctgcataatactttatttatttactttaaaagtgttagtttcttttatgatgaccgcaaagttagtattaatttctcttttttgctatgaaatcgttatttattcttcctcttcggtgtgtctttgctaactttatacttctcacagtaatatttacacatcaattgtaaaccacaggtttcacatttgggagtgcgggcttgacagacgtaacgtccgtgcaggatcagccagtggtgagcgatgggaatcagctcgtcggggatgttcttcatcagttctttttctacactgaacggggtggtgcaggaattacttaccagtccgatgcggtgactcacgcggaagacgtgagtgtctaccgccatggcagctttgttgaacacgacggactgaatgacattggccgttttgcgccctacaccgggcaacttgatcagttcttcaagagtatcgggtacttcgctgttgaagtcgttcaccagcatgcgtgccatgcccaccagatgtttcgacttgttattggggtaagatacgctgcgtatgtactcgaatatcacctccggtgtggtagcagccagtgcttccggtgtggggaaatcctgataaattctaggggtgatcatgttcacccgcttgtctgtacactgtgcggagaggataacggcgatcagcagttcgtacgggttgttgtaatgcagttccgtttcggccacgggcacattttcctgaaaccaggcgattactttttcataacgttctttctttgtcatcttagtttgttcttatgataatggggtgcgactttcaggttgaaataaaaggtggaaaccaccgtcaggcaagctccgaagaagtaagccatgtcgaacgaagtcagttgggcgatatatccgcccagtatcaggccgatgccgatgcctacatcccatgaagtcaggtaggtggaagtggccgtgccgcgttggctgttaggggccagattgacaaacagggtattgaaggccggaaacatggtgccgaatccgactcccagcaacagagccaccataaagaaaagcacatctgtcagttcgggactcagcgacatcaatttgccgcaggctgccagtgtgaaaaagcaggcacacaccagatagagtcccagggtgatgacttgtgtgatacgtcctttgtccacctggcgtccggaaaacatgcgtgagacagccatgcccactgccataaaggtgaagaacagcccggagctgagtgtgatcccgatctccttggcatacatggctatataagtactcgtcatgccgtagggaatggagagtaggagcaatgccactcccgcaggtatacctttaattaatacgaaccggtccagtgaaatcggttcacgttttaccggttccttaacaggtgtctttaccaggcaggcagccgcaaaccccactgtaccggagaggagtgaacacaggaagatggtctcgaacgaacaggtgtcatgcataaaaagtccgatcatcggtccgaagctcatggccgtgttgttcatcagtccgtagtagcctaccgcttctccgcggcgggaagaaggagtgatgtcgattacgatggtattacccgctacggtcaccattccgaaagccagtccatgcaccacccggagcatgatgaacagtgacagcaccccggcaaggatgtatccggcaaagacggtgatgaacaggaagtaagcgatcaggtagagtggcttgcgtgccagtgtgtccagcagatagcccgagaaggggcggatacagagtgaagctacggtgtaacaggataaaatgacccctacggctgcatttccggtttggaaaatttcagtcagatagaaaggcaatacaggcagaatcagatagaaggcaaagtataaaaggaagtttgctgccagtatcagaacatagctgggggtgacaagcctatctttggacatagtatggtggttttgattggaccgcagagtaacacaaagtctcacagagagcctctttttaattttaagaaaaccctgtgagactctgtgttcatgtctgcggcagtaaaatttaataggccgcttcgaactccttcaggaaacgtgtatcgttttcggagaacatgcggaggtctttcacctgatatttcaggtttgtgatgcgttcgatacccatacccagagcatatccgctatacactttgctgtctattccgttggtatcaagtacgttcgggtctaccattccgcaacccaagatttccacccagccggtgtgtttgcagaaggggcagccttttccgccgcagatgttacagctgatatccatttcggcgctgggttctgtgaacgggaagtacgacggacgcaggcgaatcttcgtatcggcaccgaacatctctttggcgaagagtagcaacacttgtttcaggtcggtgaaagatacatcgtggtctacgtacagcgcttctacctggtggaagaaacagtgtgcgcgatagctgatagcttcgttacggtaaacgcgtcccggacagatgatacggataggtggttgcgaaacctccatcacacggctctgtaccgatgaggtgtgtgtgcgcagtagtacgtcgggatgggattcgatgaagaatgtgtcttgcatgtctcgtgccggatggtcttcggcaaagttgagtgcggagaacacatgccagtcatcttctatttccggaccttcggcaatgttgaatcccagacgggcaaagatgtcaatgatttcgttgcgcacaatggaaagcggatggcgtgtgcccagctccacgggataagccgaacgggtcaggtcgagatcgtcctgtccgttgtcctggttgtcgaactgctctttcagtgcgttgattttttcttgtgcttttgttttcagctcgttgagcttcatgccgacttcttttttctgttcggcagccacattgcggaaatctgccatcaagtcattgatggctcctttcttgctgaggtatttgatgcgcagagcttcgagttcttcggcattggcggctttcaaggcccccacctcttcaagaagttgattaatcttagctatcatatcttgcgatttattgttattcgattttcgttaaattgctgcaaaagtaacaataatattgcaatcaaagaggatagaaagaaataaaatgtgtcggttggttgactcttgccgatctttaggctttctctttctttatttgtatatgataatgggaggtggagagatattttctcttcctcatgcagtaggtgttgtaatcgctcgtctgtcttttatgataacgtacatcttcttgtgtaagaggagtgctttctttcactagtgaatctttttttatcataacgggttactgtagttgttcctatcataaactgcatgccggtcctatccgtcgttatcgcatcaccgaagtcagctaggaggcgctgatgaaatgttttcagcgttgtagaaaacgtcggggataccttcattgagccgtacggacctcgtatgaatgttaaaagataggactatgcgattattttatttacaaatgattcgttattatgtaataaatgattaatttagcgggtgcagaagggtgattgggtgaaccgtccgttaatactattattatgtaaattgcgagtgcttcgtactctgcatctgatttctgcaaaccttaaattgtatcgatatggccgattggaagtcagtaaaaagtatatctgataaatatggaatcagtgtagagagagtgatagcgtgggtacgtgaaagccaaatcaccacttccgttgtgggcagcgtggtgctgattgatgacgggagcgtgtgcgaattggtagagaaagaaaaacggttggcgcacctgaaaaccaattacgagcaactttgcgcgaagtttgagcagcgcatcgaggcggaactgcgtgcagacgaagatgccggactcaagatgcgtcttctggatgatttcctccccgttctgcaccgactactctgcgtgatgattgacaagctgaacaccgaagatcgaaaactgttcaacagtgccttcacagccgcccctctgtatcggatagctcgggaaatgggatttgaatctgtaaaagactacctcatagcgtacaggaaggtgaccaggaggctgcccgaaagctcggacgaacttatcaagcgtctccaaaccgaccttgaacgaagccgcgactcttttaaggaaatggagcatacgctgctgagagcaaggcagagccatgaagacgctaatcggatgtgcagtgacctgcgcgacaaggagatatattacattgaacggtgcgaacggctgaaagagaaaaaccgggagaacgagaagcgcgtagagagactcaaaaaacgacttctcaaatgggaaaagtgcccaaacgtgggggaggccggaaacaccggagaggatgaaagcctgcaggaactgtcggacgaggtggggaatttgcatatccgtgaaatggaactgcgggctcagcgccgggaactgattacgagggtcgcccgtctggagagggaaatgtataaatacaatagcacggaaaatagcttcaaaagcagactgggcgaaaagggcgcttggaggaaaatcgagagcgaatttgaaaggtgtgcccgaacatattttggtagagacgtggaggtggtgtcgcggaaggaagcgcaggaaatacggcagctccagataaaagcgctggtagacgaaaactatgctcaaagcggggcgtggaaagagatgatggcggcgacggaggcgaagttcgcgatgtccggggagacaatgccggatgccgggaagctggaaaacgaagaggtcgaaaccggaactgagccggcggccaaagacgaagtggagatgataatagaaggtatagcgagcttagacgaaatgggggcatcgctggacagatataagaaagaaaccagcgagatgatcgaaaaatataaggcgaacgaggaaaaaacggagggcttctggaatagactccgttccatgtttcgttaactctaataactaacactatcgccttcgttttttgtcctgtttcgtatatagtgttgtataccggtatactctgtggcaaatcctggaaaaaacaaaatggggaagtcctcacggatttccccactttaatgatgaaatatttactatttttattaattgggtgtggagagtatcggactcgaaccgatcaccttaacactgccagtgttacgctctagccagatgagctaaccccccatgctcttaatgataacgtttgcgaacgtttatctgttttggtgctgcaaatataatgtattattctgaaataattgctatgtttgcggaaataatcaacttaaagataaaaaatatgctgatatacaataccacttttcaggtggacgacaaagttcatgataattttttgatctggatcaaagagagttatattcctgaagtagagaaacacggtgctctccgtgctccgcgcatctgtcgtgtgttgagtcatcgtgacgaaggtacttcctattcgctccaatgggaggtggacgattctgtcgtgctgcatcgctggcatcaggatcagggtgcgcggctcaaccaagagctggtgaagatatttaaggataaagtagtcggatttcccacattgatggaggtattggagtgattcagccggtaaaagaaaagattattctgggcattgatcccggtactacgatcatgggatacggagtgctccgtgtttgcgggacaagacccgagatgatcgctatggggatcatcgatttgcggaagttcggcaatcattacctcaaacttcgtcatatccacgaacgggtgcttagtattatcgaaagttacttgcccgatgaactggcgattgaagctccttttttcgggaaaaacgtgcagtcgatgctgaagcttggacgtgctcagggagtagcgatggcggctgcgttgagccgtgatattcctattactgaatatgccccgctgaaaataaagatggccatcaccggcaacgggcaggcctctaaagaacaagtggcggatatgttgcaacgcatgctgcattttgccaaagaggatatgcctgtttttatggatgctaccgacggattggcagctgcttattgtcatttcctgcagatggggcgtccggtaatggagaaagggtatagcggttggaaagattttatagccaaaaatcccgaaagagtaaagtagcgacggattctgaacttagacaataagtagataacaatatatataatatagagaaaaacatgaaaatgaactatcttgcctttatcggagtgacagcggctacagctgtagtgagttgtactcccgccaagaaagaatatgcgtcttacgaattatatccggtacgttcgggtagcctcacggagatggaatattcaccggagtctaccaagtttaccctttgggcgcctactgccgatgaagtccgtctgatgttgttcgactcgggtgaaggtgggcatgcttacgaaaccattcctatggaatcgggtgaagaaggcacttggatggcaacggtcagcaaggatctgatggggaagttctacacattcaatgtcaaggtaaacgataaatggatgggtgatacacccggtatcaatgccaaagcggtaggggtgaacggaaaacgtgcggccattatcaacttgaagtccaccgatccacaaggttgggagacagatcagcgaccgccgttgaaatcaccggctgatgcgatcatttatgaaatgcaccatcgtgatttttcagtagattctacatcagggattcagcataagggaaaatttttggcattgacagaacatggtacgatgaactctgccaaattgctgaccggaattgatcatctgatcgagctgggagtaacacacgtccatttgcttccgtcttatgattatgcttcggtagacgaaaccaagctggatgaaaataaatacaactggggatatgatccgcagaattacaatgtacccgatggttcgtatgctaccgatccttacgatccggctgtccgcatccgcgagtttaagcagatggtacaagcactgcacaaagccggtatacgggtagtgctcgatgtggtatacaatcatacatacaacaccgatggcagtaacttcgaacgtacggtacctggatatttttatcgccagaagccggatggttcgttggctaatggttcggcttgtggtaacgagacggcaagcaaccggcctatgatgcgtaaatatatgattgaatccgtgcttcactggatcaaggaataccatatcgatggtttccgcttcgacctgatgggcattcacgacatcgagacgatgaatgaaatccgtaaggcggtcagtgctgtagatccttctatcattatttatggtgaaggttgggcagcggaagcacctcagtatccgggtgattcgctggcaatgaaggtcaatacttgtaaaatgccgggtattgccgccttttccgatgaaatgcgtgatgcgttgcgtggtccttttaatgataatcataagggagcgttccttgccgggatccccggggaagaagagagcattaagtttggtattgtaggagctgtcagtcaccctcaagtcaacaatgattcggtgaattacagtaaagctccctgggcttcccagcctactcagatgatcagttacgtatcctgccacgatgatatgtgcttggtagatcgcttgaagtcgagtatccccggcatcacacccgaacaactcgtacgacttgacaaactggcgcagacggcagtgctgacttcgcaaggtattccgttcatctatgccggagaagaggtgatgcgtgacaagaaaggggtgcataatagttttgagagtcccgattctattaatgccattgattggaaccgaaagacaactcacgaagatgtgttcgcctattataagcgtttgatcagtattcgtaaagcccatcccgctttccgtatgggagatgccgagatggtacgtaagcacctggaattcctcccggtagatggtggtaatctggtggctttccgcttgaaagaccgcgctaacggagatacttgggacaacattatcgtggcacttaatgcccgttctgttcctgccaaactggcgatacccgaaggtaaatacactgttgtatgcagagatggtgtgattgatgaaagagggttgggctcgttatacggacctgaggtgacggttccggcacagtctgcactgatcattcatcagtagggagtgttgcggaaaaaaatcatcacggattacactgattcacacagataaaaaataaatgactgatggtcaatgtaaaattctgtggcaattgatgtaatccgtggtgatttctgactataataaattttgttgatatacaaaaccaatataaagttaacctaaattgattatctctaaaatactgttctgaatgtcgagggatgtgtgtttatagaactattttaaattatctgtataatgaaattcataaggaagtttccggtgaccgatgcggatagtctggaaagtccccaaaagtttgagggcttctttcttgattattatccccgggtcaaaggattcattaatggcttgttacaggatgctgaagaagcggaagatctttcgcaggatatatttatgtcattgtggcagaaaaggggaaatctgaagcagatagacaacttggatgcatacctgttccgtatagcccggaatgcggttttccggtacatcgagcgctctttgttatttaaaaattatcaatccaggcagttatcggatgataactccgatctgtatgaaatagaatcggaactgaacgcgaaagaattagaactgattatagccatcgctgttgaaagaatgccttctcaaagaagaaagatttatcagatgagccgcgaacaggggcttagtaatgaaaatatagcccgtgaactgaacattagcaagcgtactgttgagaatcatctgacccaggctttggctgatatacgtaagatattgttttgggtcatcatggctactttcgtataagcttaacaagctatataaaaaaagtgttctttgaactgtgtgtgtttggcgggttacgtatcttatatatataatccataaaacatactatgtctgacgcatacaaaatcatacacaactttatggccttcatagccagtccggaccttaaaaataaagtgtggacatggcttcttgatccttccggcaaacaacggaaagaagaagcgcttcttcagatatgggacgaatatcgtcctgaagcagatgccggtacccggcattctttacgtaagtttcaaaaaagagcagggctttcttctgcccggccgacctatctacatcggtgggcgcatatagcagctattcttcttatcccgttaatatctattataacggcctatatatatgtggaacatcacacgcaggaagtccgttttgtagaatgtatcgttcccaagggagagcaaaaacagatcacgttaccggatggttcgatcatcaccctgaattcgggatccgtatttctatatcctacgcaatttaccggcgatacccgttctgtatatctttccggagaagggcactttgcggtagcccctaataagaaacttccttttgtggtggcaactaaccatctggacatttgtgtactgggtactcagtttaatttgcaggcatatccttttgatagaaggacaattaccacattggagtccggttctgttgctgtaagaaagaaaaaccagccgaacagttttattaccttagaacccaatcagcagcttgattacgaaaatcggagtggtagattcaacaaaacagatatagatgcttctgtttattcgggttggacaaagggagagatgaactttatttcccagtcactcagggaaatcctgagaacactggaaagaagctatgcagtatctattcagttatcgtctgatctgatggagtcgaatcggatcaattcggacctttatacaataaagtttaagcgtcgtgatgatattttccatgttttggatattgtaacaaaaacagtaggaggtatcacctataaagtggagaaggacgaatccatatctatttgtccattaaagtaaaggaaaggagaacaattatatgcaaaaaagggaaccggaaacaaattaccacacccatttccgatccccgaaatcaatcaaaaactttttaacctttagagactttaaacagtattaattgattaactcacaaaattatgaaattaaaaatcaaattaaggaatattctatccgtaaaaattcataaaatagttcttttacttctcgctttatgcatttataacactgcgtacgggcaaaatcagcggataagtgtgtatggcaacaatcagtctttgcaaaaagtattcgaacaaattgaggagcagactcaattgagtattacatacaatcagaccagactggatgtaaataggaagattaaaggaaactttgtagacaaggaactgtcttttgtaatggatgctcttttgaagaataccggttttacttgccgttatgaggctgagcatatagtcattactcctgttgagcagaagaaagagaaagctgctgccgggcaagctactcagatgaaaaagataacgggtaaagtgacgggcgttaccggcgaacctcttataggagcgaatgtgcttgccgtaggcggtaagcaggccacgattaccaatcttgagggagaattttcattggaggtctctgacaacagtaagttgcaggttacctatatcggttatttgcctcaggaggtcagtaccaatggaaaaactcatttcgtcattcagttgaaagaagattcacaattgatggatgaagtagtggttgtcggcttcggaacacaaaagaaggtcaatttgacgggagcagttacagcggttaatatacaggaaacattgggagatcgtccgataacaaatgttacggcagctttgcaaggggtggttccgggattaaaaatagagggaacgaccggtactccaggtgacaatctatcatacaatattcgaggaaccacttctatcaacggtggtggtccgctggtgttggtcaataatgtaccgatggatatcaatatgatcgatccgcaggatatcgagtcggtttcggtcttgaaagatgccgcttctgcagctatctacggagcacgtgctgcgtttggagtaatcttgattaccaccaagcaaggtaaaaaggacatggctcctaaattcaattataataataatttctcgttttcgaaagcattggaactgccacaaaaagccggtccgttggagtccatcttggcatataaagagatgggatggcccaatgacacgtatgtagacggtaagaatattcctcaatgggagacgtatatacgtgattatatggctaatccttcccaatatcccaatggatatgtattcgatgaagatgggaacctgtttctgatgagagagaacgatatgtttgccgatatgatggataattatggctttatgcaaaatcatagtttttcagtttcgggaggaagttcaagaacgaattatcgtatcggtttgggatacaccaatgaagacggaatccttattactgataaagacaggtatgagcgtgccaatctctcaagtttcctgagtgtggaggtcaacaaatggctgaccactcaattggatatacggtatgccaattctacccagaacaaagtggagcaaggtggtagaaacggaatttggggaagtgccatgcaacttccttcttatcagaatatatcgccttatgaagaggatggtattatttatccggctgaaacttccgctacttacatccgttatggggaaccacgcattgttaaaaagacggatctccgggctttgggacgtatcatcatttcgcctctgaaaaacttgaagataacaggtgaatatacgtacaaccgggtgacaaactacaaccgcatgtatgtgaaccagtataaatacatcggaatgaactttaccggtgtcctgaataacacggaaaatacacggtatgcgctgacgcagggatttactaactataatgcaatcaatatatttgctaattacgacttttcaataggtaatcatcatataagtgttatgggtggattcaaccaggaagagaatcatgcggaatcgcagtggacagaaagaaaagatgtattgttgagtaacctgccgtccatatcgggagctaccgggaccacaacggcaacggatacctttaacgaatatgccctcagaggactcttttaccgtgtgaattattcgtacaaggatcgctacatgcttgaagctaacggacgatatgacggaacttcacgattccctaaaaacaaccgttttgggttcttcccatctttctcggcaggttggcgcatttcggaagaaccttttatgacagcgacacgcgatgttctatccaactttaaatttcgtgcttcgtggggatcgatcggaaatcagatcatcttgctggcagacggctcaccggacaattatccgtatataccggagatggctccagggcttaccaattggctggtagacggtcaaagacctacgactttgtccactccgcctatggtcagcagtgcgttcacctgggaaaaagtatatacgctcgacttcggtgttgacttcggattttttgataatcgcctgaatggtactttcgattggtatcggcgtgatacaaaaggcatgctggcaccgggaatggatttgccgtgggttgtgggagtggctgctgccaagcagaatgctgcgaatttgaaaacttatggttgggaactggaattgaactggagagaccgtatcaaagatttcaattaccgtatcggattcaatctttacgattcgcagagtgaaattaccaagtttaacaacgagaccaacttgctgggcacctatcgcaaagggcagaagattggtgaaatatggggatatgtaaccgatcgtttttatagagaagatgatttcaatgccgacggaacgcttaaagaaggcattcctattcctaaaggagtagggaaagtatatccgggtgatatactttataaaaactttgatgatgatgccagcactatatggagtggaaaaggaacagcggacgatccgggcgaccaacgtatcatcggtaactctacacctcgtttccattatggcatcaatgcaggtttgagttggaaagggttcgatctttctgtctttcttcgtggtgtgggcaaacgtgacttttggcgtaccgatcagattgcatggcctaccggaacgtggggaagtctgtttaaggaaacccttgacttctggacaccggagcatacggatgcctatttcccaagggtatatgcaaacaacggtgtgaatactgcttcgaaccgctggaagcagaccaaatatctggctaatgcggcttacttgaagttgcaaaatatcaccttatcctatactttgcctaaaacctgggctaagcagatttgcttcgatgaggtcaaggtatttttcagtggagaaaaccttcacacatgggatcacttgccggaaggtctggagtctgatatgctttcgaaaggagcatgggaatatccgtttatgaagaagttttcacttggatttaatgtcacattctaaataaccgaaatagtatgaagaaatatacatttgccctgtttatattctgtgcgatcgcttttaccggttgcctgaacaatgattttatggaaaggtatccgttgggcaacccgacggaagagactgcctttgtgacgtatgacaacttcaaggcatacgcctggggattgtatgagacactgccgaaattgggatacggtgatacctcgacagatgatatctcgtacaatcagactcgtggaagcagtgagagcaactggatcagaggactggtcactgtacccgataagcggaatgatacagcatgggactattatgcctttattcgtcgtgtcaatctgatgttggggcggatagacagctctcagatgactgaagccgagaaggcacattggaaaagtgtcggatatttctttcgttcataccgctacttctcattgctgtctgcttatggtggagtaccttggatagaccgtgtgctgagtgataacgatacagagctgattaatgggccccgtgcatccagagatgaaattgcgaagcatattcttgaagacctgcaatatgccgaacagcatattaatgttaacggagatggtaataatacgattaatagagcagtcgttcaagcctttatatcacgattctgtctttttgagggtacatggaggaaatatcacggattgaatgatgccgaaacttatctgaaagaatgtaagcgggtgtctgccgaagttatgaatagtttccccgagatttgcagcaactacgatgatcttttttgttcgcttgaattgaaggatgtccccggagtcatactctatcgggagttctcgaatgcggaaaacgtaatacatgctactagtatcggaggaaccacaggagcctcgtactataatccgacccgtgacttggtggacagttatctctgttcggatggtaaaacccgttggaatagtccgttatataagggagacaaagatatgtatgacgagtttagttgccgggatcaccgactctggttgcaagtgactcctccgtacagaatagaccgttcggcttctaccgatgcctggggtaataaatggcaatttaccgaagttgccaaggacagaagtttcatcgatagcttgaatatccgtttgggaataggctatggcagtgctaaagagagacagaaaactttacctttccgtcaaggctatgacgggggtatcctgggagcagtcccgcatttcgatttttatttggagaatcagccttggtacaagtcagctttcggctataataactggaaatattattgtacatatctgtcaatgggatcacagcgaaatgaagagaccgatatgccactgttcagggtggaagaggtgatgctgaattatgctgaagcaatgtgtgaattaggtgaattcgatcagtcggtagccgatcggacggtaaataaattgcgtagccgtgctaacgtggctcctatgaaggtggcggaaattaacgacagtttcgatcctaaacgtgatttgggtaaccctgcttatccgggtgattatgctgtaaatcccttgttgtgggagattcgccgcgaacgccgcattgaattgttttccgaaggattcaggttcgacgatttgcggagatggaagaagtgtcattatgcattgaagaagaaactgggcatgtacgtcaaagcatcggattttccggccggaacaaaagtgacagtcgatggtggaggaacggaaggctatcttgaatttcatcctgcacagaaccatacttggcctgattattattacctgaatcctattccccgcaatgaaagggtgctgaatcctcagcttgaacagaatccgggttgggatgacggaataaagtaggaaatgtttgattgacaaatggttttaaccgtgtgataaaaaactgtccggagaaaatcttatctttggacagtttttgcactcaaaatactacatttaaatgaaatacctgattttaatactactttccctgtgttcatattccatcgacttgtccggacaaatcatcatgcctacccccggtaaaatagagagggcagacggccggttacggcttcaaggtaaaatacgaatgtacgcagaggagtctcccggctctttcatacgtttgttttatgaaaaactggtgcccgaaagcgctgtggaatggtgcaaagaggaggtaaacagccacatctcctggaaaaaagatgttactttgccggcagaaggttatcgcatccgtgtgacgcctgagcgaataattgtccgggcagcggatgatgccggctttatctatgccattcaaagtctgaggcaatggaacacgggtgaggaaagaggactgatatttccttgtgtcgagatcaccgattttccacgggtgaaatggcgcagctttatgctggattccggacgccagtatcagaaagtgtctacgatcaagaaatatatcgacatggcttcgatgctgaagatgaattactttcattggcatctgaccgaaggacttggctggcgcatcgaaataaaacgctatccgttcctgacccgtataggagcttttgtagggcaggggccggaacagcagggcttctactctcaagaagaggtgaaagagatcatcagctatgcggcggaccggggcattacggttgttcccgagattgacatgcccggacatgccgaagcggcacttaatgcttatccccggctgggatgtttcaatgttgcggtaaaggttccccaaagcggatttacgcagaatatattttgtgcgggaaaagacagtacactcatcttcctgaagaatgtgttggacgaagtatgccggatgtttccgtccgcttatattcatctcggaggcgacgaagcacctaaagggaattgggataaatgtcccgattgccggtcacggattgaaaaagaaaaactaaaagacagtcatgacctacaattgtggttttcggcccggatggccgattatctgaaacaaaaagggaggaaggccatcttttggggagatgtgatttacaaagacggctatcccttgccgaacaatgtggtgatacagtggtggaactggagaggacaccgggatctggccttgaagaatgccgtcagacataattatccggtgatttgcggtacaaactattatacgtatctgaacttcccgcttaccccctggaagggatatactcaagctcgcactttcgatctggaagatgtgtatttgcataatccttcttataggccccgggaggaaaatccgcttattctcggaatgagctctgccttgtggacggacgacggggtgacggaaagcatgatcgatcgtcgggtctttccgcgtattctcgcacttgccgagcagatgtggcattccggcaatccggaaaattttgatgagttttatggcaaagtactctctaagcaactgtggtttgaacagcaggggtattcattcgggcctgcattgaaggaagatgcgggtacaaattataaatgggactaaaaaaagaaactaatcatgaaaagaatagaaatctatatcggactgtccgttttcgctttatcggccaaaagccaggtgaaagaatctcgacccaatgtcatatatatcataatggatgatctgggctacggggatatcggttgttatggttcggagaaaatagaaacaccgaacatcgatcggttgtataaggatggcatcagtttcacacagcattacacaggttcacccgtttcggcacccgcccgctgtgtgttgatgacaggtatgcactcgggacatgcgcaaatccgggctaatgatgaaatggcttatcggggcgctatcatgaattacgactccatgtatgtacatcccgatttggaggggcagtatcctttgaaagcccataccatgactctcggaagaatgatgcagcaagccggatacgtcaccggatgctttggaaaatggggactgggggctccgggcacggaaggtactcccaacaaacagggattcgacagtttctacggatacaactgccagcggcaggcacacagttattaccctgcctttttgtataagaatgaagaccgggtatacttggccaataaagtgctcgatcctcacacgaccaagctggatgcaggagccgacccccgtgatgaagccgcctatgccaagttctcgcagaaagagtatgccaatgatcttattttcgatgaactgatttcgtttgtcgggcagaacagaaagaaaccgtttttcctgatgtggactactccgctaccgcacgtgtcgttgcaggcaccggagaaatgggtgaagtattatgtcgggaagtttggagacgaagccccctacatcggaaaagccggatatatgccttgtcgctatccgcatgcgacttatgctgctatgatcagttattttgacgagcaaataggcaagctgatagagaagctgaagaaggaacgtctgtacgacaatacggttatcatgtttacttccgataatggaccgacttttaatggcggtagcgattcgccgtggttcgacagtggaggtcctttcaggtctgagtatggttggggaaaatgttttgttcacgaaggaggaatacgtatccctgctattgtcacctggcccgagaaaatcaaaccgtctacccagagcgatcatatctgcggatttcaggatgtgatgcctaccttggcggatatcgcaaacattgcttgtccggagaccgatggcatcagtttcttgcctgctttgcttggcgaaacggaacgccagaaagaacacgaatatttgtattgggaatatcccgatcccacaatcggcctcaaagccattcgcatgggtaagtggaaaggaattgtcaacaacatccgtaagggcaactctacaatggagctttatgacttggagagtgatctcagggaagaacatgatgtggctgccgaacatcccgatatcgtccggaaactgacgaggttgatggaaaagtcacataccgagccggagaatcccaaattcaggttctgatgggaccataggtctaaaacagtttgagtatccgatgataaaagtacataataggttgttcagattgtttttttagcattattctgtctctttgtgcggattttggtataattttgccccgcccaataatgaaataggattatggaacaatacacattcaatatagcgggtggcgtggcacgcaacccgcttgtgcgtttggcacaacctgtcacagcacaaatcgctaccggcgaacatatcgccatcgtaggacccaatgggggagggaaaagcttgtttgtagacacgcttttgggtaaatatcctttgcgtgagggtacattggactacgatttttctccttcttctacccggacggtatatgataacgtgaaatatattgctttccgtgacacctatggggcggcggatgccaactattactatcagcaacgctggaatgcccacgatcaggaagatgcccctacggtgcgggagatgttgggagagatcaaggatgaaagactgaaagaggaattgttcgaactcttccacatcgagccattgttggacaagaagatcattcttctttccagtggcgaattgcgtaaatttcaactgactaaaaccctcctgacagctccccgggtattgattatggacaatccttttatcggtttggatgcacctacccgtgaattgcttttctcgctgctcgaacgtctcacccgcttgtcatccgtgcaaatcattcttgtgctttcgatgctcgatgatatcccttcgttcattacccatgtgattccggtagaagacctgcacgtgcttccgaaaatggaaagggaggcttatctggcttcattttgtgtgaccgatgaggccgaagtcctggacgcactgcaacagcgtatagccggattaccttatgacggagcaaactatgactccggggaggtggtaaaattaaataaggtaagtattcgttatgatgaccgcactatcctgaaggagctcgactggacagtccgccggggtgaaaagtgggcattgagtggagaaaacggtgccggtaaatctacactgctcagcttggtttgtgcggacaaccctcagtcgtacgcctgtgacatcagtcttttcggacgtaagcggggtacgggcgaaagcatttgggagattaaaaaacacatcggttacgtcagtcccgaaatgcaccgtgcctatctcaaaaatctgccggccattgagattgtggcttccggattgcatgacagcatcggtttgtacaaacgcccgcaggaaagccagatggctgcctgcgagtggtggatggatgtgttcggcattgcggctctgaaggacaaaccttttcttcagctgtcgagcggtgagcagcgcctggcattattggcccgtgcttttgtgaaagatccggaattgcttattctggacgagccgctgcacggactcgatacgtacaatcgccggcgggtgaaaaagattatcgaagctttttgccgtcggcaggacaagacgatgattatggtaacccattacgaatcggaactcccttctaccatcaccgaccgccttttcctgaaaagaaatcgttgagcgtgaccgttttttattttgtcattctccaacctgtgttatcggtcgtttgggtggcggatatggaaaaaactttcctgtccgtgtgataactgccttttttgcaaatagacaacattggtacctattgttatatgtctttacatcgttaccgcattttctttctgatttcggaagaagatgattcggaacttattgccttcgggtgacttccggatctcggtttccatatccgtccggttatctaccggtttgccgttaatgcgcagaatcacgtcgttggcttgcagggcggttattcccttttcgacctgcactaccagtatgcctcgtattttgtcgagccccgtggccgaacgttctccttcggtcgacacctctttcaatgttaaccccttccacgaatacgtctgtaccgtctccggcttttcttccggaattttgaaaaccggcaattccggagtagccgccaaagctttcaggtgtgggcattgtacgccgaagtgctccatatcgaaattccggaaccccgtcttcaaggcaggcgaattttcttttacccggtagtctcctttttcaggagcgatgaagagtggatcaccgtaaagtgaatggaggtccgttcctctcttttgtgcctgttccagtccttgcttggtgacaaagaagttagtgtctgtttcctttccccattcctttacctgaatggggcgatagggagtcgtgacgatgttatgacggaaaatgtcttgagagtttgcaaaccagacgtgcggatggaatgtgttgttgaccataatgttgttttccaccgttcgcgcgaagccttcgcgcaatttcaatcctctgtgtaggcagaggttgttgtagatgtgatagttggaagaaccgtcgtccagatcgatgtcccatccatggtcgcacctccagcggttgttgcggatgacagtcgtttcggtagcgtcccggaataccatttgaggatgttcttttgcgaactcatccatcacattccggtcgggatgccaatagcggtcgcgtccccaggagttgaaggacccgtggtcgcctgtctcaagtacggtgtcgaacacatcgtttccttctatcagatgtcctccccaggtaccttcactgacgttgatgccggcacggggcaggtcgtaaatactgttgttacggatggtgattcgtgcggacatagatagttggataccggctccctgcttttctgtctctccgatcgagtgaatcagattgtcgtccaccaggcagtctgagggatagtcgggggtgaggggacctgtccctttatccatctgctcccaggtttgcgactttccgtactcgaacagaggggaacggacggcatccggagagcctacaaagcaaacagcactggctcctatacgggtgatatgattttggctgacacggtggttgcggttataattggagaagaagatagcattgcctcctatatcgtgcaggtagcagccgtttacagagcatttttcggcattttcaattatcagggctcctccccgatagattttccagtcactgcgcaataggggttcattggttttcataaaggtgcgcagggtttgtgtcagttccaaatggtctacggatacgtgacggaccggacttccggtttttcctttcaggataaagaggttttctgcctgcggcacttcgaacaaggcggtttgcaggtcgagttctcgcggcggatagaaatagagtgtatgggtttctttatcaaaataccattccccttcggcatccaactcttcaaagatgttttctaccatgcggtaggtgtggtgcatacccatctggcggttgttctgaaatccgcctttcagtatcagttcgcccttggcgtctttgccttcgatgctgtattggtagcctccccattctctgctgtgcatggcgtgcagataacctcccgcggggttgctccagtttttcacacgttcgggtgagcaggcgtcagctgcatatccgttgaagatgcgtatatccggatcaaaattcggataccgtgccgatatctgttttttcccgttcacaaagagctggtcggggatcagttcttcttccactttggcctgcatgataccgtttttatactctttccaacgcaggttccggagtatacgcgaaccgctgatgaccgccttttgtccgggatacgaagaaaaacggatcggatgttcgggtgtgcccgaagtctcgtttgtgataagaatcggagcggacaggtagttggtgccttcgcagtagatggtgatggaacgccggccggcctgccgtgaggcctttttccaggcatattctaaagtagccatcggcttttccgctgttccgggatgatggtcgctgcccgaaggtgatacatagagtgttatctctgtttgggcggatagcagaccggatacgaatagtagtaatggaaaaaagagctttctcatgtgttgttcatttaggaattaaataaaaaggttacttacagtgtacaaaggtaacttttatcagcatacttcagcatagatatttagaaaaagtttcgtgaactttgtactcagtacaaatgttctatagtaaacacctaaagaaaggagagttgaatgaaaaagattgtattgctccgtcatggagaaagtgcatggaacaaagagaaccgttttaccggttggacagatgtcgatctgacagaaaaaggaattgccgaagcctgtaaagcaggcgaactactgaaagagaatggatttaacttcgataaagcttatacgtcataccttaaacgagcggtgaaaacgctgaattgcgtactcgaccggatggatcaggactggattccggtagagaaaagctggcgcctgaatgaaaaacattacggcgatctgcaaggactgaacaaaagcgaaacagccgctaaatacggggatgaacaggtgcttatctggcgcaggagttatgatatagctcccaatgccctgtcggaagacgatccgagaaatccccgctttgagaatcgttatcaggaagtacccgatgcggaacttccccggacagaatctctgaaagataccatcgaacgtatcatgccttattggaagtgtatcatcttcccgaatctgaaaacggctgatgaaattctggttgttgcccacggaaatagtttgcgcggcatcatcaagcacttgaagcacatctccggtgaagagatcgtaaaactgaatctgccgactgccgtcccttacgtatttgagttcagtgacgaactgaatctggaaaaagactatttcctgggtgatcccgaagaaatccgtaagttgatggaagcggttgccaaccagggaaagaaaaaataagaggagagagacctcgtaaatgtttagaaatgaatacaactcaccacagattatacggaatctcacagaactttaatttcttgtttataagatattaggagaaaataatctctgtggaactctgtgtaatctgtggtgaactcaaaaccattacaattatgaataaaataatagaactgttgggaaatcaggctgaatattacctgaaccacacttgcaaaaccattgataaatcactgattcacgtaccgtcaccggatacaatcgataagatatggattgactctgaccgtaacatacagactttgcgcagtttgcagacattgctggggcatggtcgtctggcaaacaccggatatgtatccattcttccggtcgatcaggacatcgaacatacggccggagcttcgttcgctccgaatccgatttatttcgatccggaaaacattgtgaagcttgccattgaaggcggttgtaatgcagttgcatccactttcggcaatctgggtgctgttgcccgaaaatatgcgcataagataccgtttgtagtaaaactgaaccataatgagttgttgtcttatcccaatacttacgatcaggttctgtttggcaccgtcaaggaggcttgggaaatgggggcagtggctgtaggtgctactatctatttcggttccgaacagagtcgccgccaattggtggaaatcgctgaggctttcgattatgcgcatgaactgggtatggccaccatcctgtggtgctatctgcgtaacaacgagttcaagaaagatggtatagactatcatgcggctgctgaccttaccggacaagccaaccgtctgggagttaccatcaaggccgatatcgtaaaacagaaattgccgactaacaatggtggtttcaaagcgattcatttcggaaagacggatgaaagaatgtataccgagctgactacggaccatccgatcgatctttgccgctatcaggtggccaatggatatatgggacgtgtcgggctgatcaactccggtggagagtcacatggagcgtccgacctgaaggatgctgtcgttacggcagtagtaaacaaacgtgccggcggtatgggattgatcagcggacgtaaagctttccagaaacccatgaacgaaggagtggagttacttcacgccattcaggatgtctatctggatgcgtctgtcaccattgcctgatagagagggtgtagctatccgacagacagggtgtaaccatgcagtccggatggctacaccctaattggcggatggctacaccttactgcttttccttattttctctttatactgagtcggtgtttctccggtatattgcttaaatgatgtactgaaatagcgggatgttgtaaatcctatcttttctgctatctctgtgaaagtgagatcggtggttgatatcagttggatggccttttccatacggaatttattgatgtaatcgttggctcccatattggtcattgcttttagtttgttatagagtgaggcgcggctcaatcccatctccgtgcagaggaatgtgacgtccagttcgggactgtccagatggtcggtgatcaactggttcagcttccgtaggaaagtttcatcgggttggctgagttcctccttgacaatattcggactgcttgctatttcggcaggtgctttgcttttttcgccgttacggagacggttacgtatcagttctacgatttgcagttcccgttcccccttctccgtgaacgatgggaggagttcattgctgacattgacgaggaatcgaatcttttcttcatattcctgcaattcccgttcttttaattcccatttcaaccggttcttcctacggcgcaaaatggcgaagatgatagcggtgatgcctcccgacacaaatagtaacaagcagatgatgaaccatccgcttcggtaccagggagggagtatggtcagtgacaggatcgggtggaagggagtccagtcgccattttgagtactgcatgcagcctgtatgcggtagttgcctgccggtagtgagcggatgaccagttccggatcgtatgattcgatcggttcctcattgagtccgtctatccggtagcggtatcttttttttcggaagatgtcttcttcgtgagacatcacgcgcagggtgattgcccggctgtcttgtggtagggtgagtttgtcgggatttcctgccgtccggttcgtggccggttcaccgtttacacgtacatcggtcagtactacttccggatagttggaggaagttgccgggaagcggttatcgatacagagcaacccattgacaccccccatatagacttcacccttccctgagacgagccggggcttggcaagatattcattcggaatgaccccgtccgattcaccgaaaagaatgaacttccgggattgcagcatccaggcaaataacatgtggtctgcaccaatccatacttttccccgatgatcacatatcaccgaactggcttcgccgaacagtgaagtgatcaatgggtgatattgccgggtccggatgctgtattgtcccaaccctgtattgctgcctatccagaaatcacctttctcgtccatcgaaacggagtagagcagtgtatcgcccgtgcagctgaaaagttttttcagcctattgccggttcgatccagttcgtagagggtacgactgtcgtgcaggtaagtgaaacgttcgttatgcgcaatggcattcatactgcctgcgatctccataccttcttcttcatttactacgcgtattttctgcgaaccgatgtcataccggtaagtatgtcctgccaacaaaagtacgctgcccggttcgtcccggtagatattgaccgccataccgctatagtaaatatattgtttgaggtcgggatggtcgataggtagcggtttccgcttaccgttctccttgttataaacaaacaatcccttggaaaagaccgataaaaggatggattctcgggtaaatccggtgatcgagaccactttgtcaccccaggtagaacggtcgtgacggaactcttcggtgacagggtcgaggctgttgacacccccaccatctgtacctatccagattcgtccgttcggttcgtcttgatacagactcagcacggtggggtcactcagaccttgggtgcttccgggaaagacatcggtataggtcttcatggacacttctcggatattgatcaatcctttgcggatactgcctgcccacatgttattgtaattgtcattgtagagtgacaagatggagttaaccggaagcgaatagttatctcccggaatatgttcgagtaccgtgattcgatggctgtccgggtgtatgatgttgatgcctcctccgtctgtaccgacccagatgtgtgagtcccgttcggccatgctcagcaccacgttgttgctgagcatggaattgtcggtggtgtacgaagccagcagtcggccttcggggttgaagcagcggagtccttcattataaggagccagccagatgcggttgtgagaatcgatcaggagtgccatgatctcctttccgcagtcgaaaggggggagacggcgttcgcctgaacggagattgatcagtcggagcccttgccaacggctgcaacagagcagagtctcttcatcccaccgactgatggcggagatagcgaaataaggatcggaactaaaatccagcaggagttttatcgatcggctgtcatagtcgtagcgatagatgcggttgcgtccgccgaagattaccccttgttctgtcaggcaggcagagtaggcgaggatcggatgcccccgatcgtctagcggaatggcgaaatcgtcacttgacctgcgatattgcgctattccaccgtctgtcagtatccatatattatgttgaatatcttcggtaatttgatggatgtagttgtgcggcaacgaatgcacgtcctcttgccggtggacatattttctcagcttttgtccgtcaaatcgtcccaatcctgcattggttcctatccatacaaatccttttggctcggtatagacacaacgtacggtagagggaagtccctccttcagggaaatttgtttatagtagtaatggctggctttcagcgggaggcaacagacagtaaaaagtacggtcagccaggtcagaaagccggtatatggattgtttttcatggatgtatttctatcacgttaccggcaaaagtaacagtttgcatagacgtgaccaaaaaaatggaaataaaatcctatctttgcactgtcttgttttcctgcctgtcttctcttcctgattctatggaagaagaggtgggggcgaggcttcccttgtaactctaattaattaaaccatgaacaagaaactactatcccgtttagctcccggtttgtttgccgttgtgctattcacagcctgccgcccggcagccaccgtaaagggtaatttggacgtaatccctcaaccgcaggagattgtccttgcccgggacactactccttttattattgaccgcagcactacgattgtctacccggcaaccaatgaaaagatgcatcgtactgctgattttctggctacttttattaaagaaatgaccggaaccgaggttcgtgtatcggacaaagagaaaagcagcaatgctattattcttgctgtagactccacaatggggcatccggaaggttataaacttcaaatcactcctgaaaaggttcttttgacgggaggcagtgaagccggtgtcttttatggtatccagactattcataaagctcttccgatcctgaaagacggtaaggtggcagctgcccttcctgccggtacggttaccgactttccccgtttccgttaccggggattcatgatcgatgtaggccgtcacttcttcccggtcagctaccttaagcagatgattgacctgatggcactgcataacatcaactactttcattggcacctgaccgaagatcagggatggcgaatcgaaatcaagaaatatcccaaactgacagagatcggttctaaacgagactctaccattatcgattgggaaaccaagaaattcgacgggaagccccatagtggattttatacacaggacgaagctcgtgagattgttcgctatgctgccgaccgtttcattacagtagttcccgaaattgaccttccgggacatactactgctgcactggcttcttatccggaactgggatgtacaggtggtccgtacaaagtactttgctcattcggtgtcttccccgatgtactctgtgcaggtaatgaccagacacttcagttcaccaaagatgtattggatgaaattatggatatcttcccttccgaatatattcatatcggcggtgacgaatgtccgaaaagccgttgggagaagtgccccaaatgtcaggctaaaattaaggagttgggtatcaaagccctgcctaaacattcgaaagagaatcagttgcaaacctacttcatgtccgagctggagaaagaaatcaatgctcacggacgccgtatgctgggatgggatgaggtattggaaggaggtctgactccgaactccactatcatgtcatggagaggaatccagggaggaatcgaagctgcccgccagcatcatgatgtcattatgactcctattcagcggctctatttcagtaatccgcgtatcaataaaatgacgggattcgaatggatgaaccgtgtatacaactttgaaccggtacctgcagaactgaccgatgcggaaaagaagtttgtgataggtactcaaggatgtatctggaccgaatggacagccgattcaacgaagatggagtggcagattctgccccgaatggctgctttgtccgaaatacaatggacattgccggagcataagaactttgagcgtttcatggagcgcctacccgagatgctgaagatttattcttctctggattatggttatcgggaagatgtattcgcggcggataccttgaagactcataaataaaagttcaccaaaagctttttcaccacagagtaacacagagtaacacaacgttttttgtagataaactacaactttaaatagcttctgtgttactctgtgtcctctgtggtaagttcttatttctctcccggaagtaacgggaagttcgggttaggtatatgcgatgactgcatgatagccttcaattccgtcaccttttccggatattggttcagcacattatgtcgttccgacggatcagaattgagattatagagttcataatacggattcttgccacgaacattcatgtggaccagtttccacggtcctttgcgtacggcttggcgtccgttcatctcctgaaattcaaagtacagatattcatgttctttctgccctttgcggttttcgagcaacggtagcagactgacaccatccatttgctgattctttgctttcggattcagaatttcacggaacgtaggcattacatcccagaacgaacacatgaagtcggtttgagtactgggctgtacacgtcccggccatgaaataatcatcggtacacggattcctccttcgtacaagtcgcgtttgtatccgcgccagattccgttgctgttgaagaagtccggatcggctccaccttccatgtgcggaccgttgtcacttgcaaagatgatgatcgtattgtcataaacccccatctctttcaatttctgtacaatctgacctacatatacatccagacgatagaccatagctgcaaatgtggcgtgtggatagaattgtgagcagtaacctcccttgcggaatgcgggattacccggttcggttccatggaaaggtttttcgggatatttgccgcggaacttctttataatgctgtcttcgggtacaatcagttcggcgtgggggatgatggtgggataccacatgcagaacgattctccgctttttcccatccgatcgaggaagtcaagtgcctttgagtgaatcagatcctgagaataagtacctttaccgtactgtacgtccagtgtgttatctttcagttctactcgtttgtcattgtcccacagatgatcgggataataactgtgtgccagcaactggcagttgtagccatagaactcgtcgatgccctgttttttaggatcacccgtggaaccgataaaaccgagtccccatttaccgaaagcgccggtcttgtatcctgcgttctggaaatcgtggaagatggtttgtgcatctgccggtagagggaattgtccttccggatcgagttctacatttccacgaatggccgtatgtccactgtgggtaccggtcagcaggcaagagcgcgaaggggcgctgacagtggtacccgaataacactgggtgaagcgcattccttcctgagccaacttgtctatgttgggagtttcgaacttctcttgtccgtaacaactgaggtcaccgaatccgaggtcatcggccaggatgaaaacgacgttgggtctcttttgatcctggactttctttttttgtgcaagcgcctgttgtgttcctgctatgccgacaagcaacgcgctactgaacaataatttttgattcataaaagtgtttgttgattaggttggtatttagttcatttgagttagattttgaattcaccacagagtagcactgagtttcacggaggtttatttctcgttatagacgtttaagagagaaaagattctctgtgagactccgtgttactctgtggtgaaacagattcgtttttatcgggtgatgtcccggttttcgggaggtttttcatgtctgcaaatatacaaatttcagctaagacttgttagttagaggcttccgattttgtctatcggatgttcaaaaacgtctatttatgtcttttctatcctattattagacgttttcagaagaatcatagttgtttttgaactcgacggactgttaaaactctttatatttgcaccactaattaatccctaatagaaaaactacttatgatgaacaatctaccatccggaattctctactcgctgaccggtgcggcagctgtagcttctttgacttcatgtgccacgggcaaacagaaagaagagcaaaaacctctgaacattgtttatattatgacggacgatcatacggcgcaaatgatgagctgctacgatacccgttatatagaaactcccaacctcgatcgcattgcccgcgatggcgtgcgctttacgaattcttttgtagccaactcactgagcggccccagccgtgcctgcatgatcaccggcaaacatagctgtgccaataaattctacgacaatacgacttgcgtgtttgacagtgcccagcaaactttcccgaaactgcttcagaaagccggttaccaaaccgctcttgtaggtaagtggcacttggagagcctgccctcaggcttcaattattgggagattgtgcccggacaaggcgactattataatcccgacttcattacacaagataacgataccgttcagaaacacggttatatcaccaacctgatcactgatgacgctatcgactggatggagaataagcgtgacgagagcaaaccgttttgcctgttgattcatcataaagctattcaccgtaactggatggcagatacttgtaacctggctttgtacgaggacaaaaccttcccgctacccgataacttctttgacgattacgaaggccgtccggctgctgcggcacaggagatgagtatcgtgaaggacatggacatgatttatgacctgaagatgctgcgtccggataaggactcacgtctgaaatcactttatcagaagtttctgggacgtatggacgaaggacagcgtgcggcatgggacaagttctatggtccggtgatcgatgacttctacaagcaaaacctgagtgggaaggaattggctgactggaagttccagcgctacatgcgcgactacatgaagactgtgaagtcactggatgacaatgtgggacgtgtgctcgactatcttgaaaagaagggattgctggacaacacgttggtggtctatacctccgaccagggcttctatatgggcgaacacggttggttcgacaagcgtttcatgtatgaagagtccatgcgtacaccgctgatcatgcgtatgccgaaaggattcgaccgtcgtggtgacatcaccgagatggttcagaacattgactatgcacctactttcctcgaactggccggtgctcctgttcctgctgatatacagggtgtgtcattgctgccattgctgaaaggcgaacagcccaaagactggcggaatgcattatactatcacttctatgaatatccggccgagcacatggtgaaacgtcattatggaatacgtaccgaacgctataaactgatccatttctataacgacatcaattggtgggaactgtatgacatgcaagccgacccgacggaaatgcacaatctgtacggacagaaagagtatgaacctgtggtgaaagagctcaaagagcagatgctgaagttgcaggaacaatacaatgatccggtacgcttctctctggagcgggataaagaatagagttccctttcccactccaaacagaaatccattgactaaactgtatgaaacacattatatatatactcctgttggcgttctgcccccttgcaacgctgcaggccgataacttaacaccaatcgtttctgtagttccctgcccggtacaaatggtaccgggtaccgggaacttccttttctccgggagcaccgtgctgagggtggaaaatgcggaacaggcccgcgtggcacagaatttcgtcaacctcttcacccgggccgccggattcacccccgtgctgaaaacgggaaaggggaaaggtgatgtatgctttgtcaccgaccccttgctgaaaagcgaggcttacaggctgagcgtcagtcccgaacagatcagcatagaggcgtctgacgccaaaggattcttctatgccttacagacgatccgtcagttgcttcctcccgatattgaaaattcccgtacggtaaatgccatgtggacggttccttgtctgactattcaggatgaaccccgtttcggttaccggggattaatgctggatgtttcccgctttttcattcctaaagagagtgtgttgcgaatcattgactgcatggctatgctgaaaatcaataagcttcacttccacctggtggacgataacggctggcgactcgagatcaagaaatatccccgtctgactgagataggcgcgtggcgggtagaccatacggacgtaccgttccattcacggcggaatccgttacccggtgaacccacccctgtaggtggcttttacactcaagaggatatgaaggaaatgattgcctatgccgccgatcgtcaggtagagattattcccgagatagagatgccggcacataccaattcgtcgctggcagcttatcctcaactggcttgtccggtggtagatcaatttatcggtgtgttgccgggtttgggcggtgatcatgccagcatcatctattgtgccggaaacgacagcgtattcactttcctgcaaaacgtcatcgatgaggtggcagcactgtttccgtcacgttatattcacttggggggcgatgaagcccagaaaacctactggaaaaagtgtcccctctgccaggaacgtatgaagaaagagcacctcgcccatgaagaggaccttcaaggttacttcatgaagcggataggcgaatatgtacacagcaaaggcaaagaggtgatgggatgggacgagctgaccaacagcttcattcccgaaggtgctgtcatctttggctggcaagggatgggcaatgcggctttgaaagctgccgaccgggggcaccggtttgtgatgacccccgcccgagtgatgtatctgatccgttatcagggaccgcaatggtttgaaccgcttacttatttcggtaacaatacgctgaaagatgtttatcagtacgaaccggtccagaagaactggaaacctgagtacgcttcgttgctgatgggggtacaggcttcattgtggactgagttctgtaatcgtcccgaggatgtggactatcttgttttcccccgtttggcggcgcttgccgaagtgggatggagtcgtccggaacagaaaaactgggacttgtttctgaaagcgatggatcggtataatgaacacctcgatgtgaaaggtatcggatatgcccgctcgatgtacaatattcagcatacctcgactcctgtcgacggtgcattacagataaaattggaatgtatccgccccgatgtggaaattcgttatacaaccgatggttccgaaccggaagcaacttccaccctttacacccggccgttggaattccatactgcgcagacactgaagtgcgccactttcgccgccggccgccagatgggaaagactctcgtattaccgttgttacacaacaaggctactgccaaaccgatattcactcaaggagcttccggagcatttgttttgaccaacggagtgcggggcagcttgaagcaaactgacttcgaatggtgctcgtggagtaagagtgattgcatttcttttacattagatttgcagaaagacgaaaatattcatacttttacgctgggttccattacggtgtacgggatggcagttcataagccggagtccattagtgttgccttgtcttcggacaacgtaaactttacggaagtgggagagaagcatttcactcccgaagagattttccgtgaaggaacttatgtagaagacttgaaattcgatttgggaacggcaaaggccagatatgtacgcgtcaccgcccgtggagtcggaaaatgccctcccgatcacgtccgtccgggacaggaagcacgaatcttttttgacgaaataattgtggaataagagtccgcttttactttataaaacctaaggaacgttggaacttattaagattttgaatattaaatacctgataaacaatgaacaaaccaatcaaactaaccttcctgctgatattggcctgtctgatgttgttgcctgtaaatgcgcagaatactcccgaatggcagagccagtatgcagtaggtttgaacaaactggcacctcacacctatgtgtggccctatgccagtgctactgacgtgaaaaaaggggattatgaacagtcaccctattatctcaacctcaacggtaaatggaaattccattgggtgaaaaatcctgatctccgtccgaaagacttttataaaccctcgttctataccggaggctgggcagatatcaacgttccgggaaactgggagcgccagggatacggaactgccatctacgtaaatgagacttatgaatttgatgacaaaatgttcaactttaagaagaatccccctcttgtgccttataaggagaacgaagtaggatcttatcgccgtactttcactgtgcctgccggatggaagggccgccgggtagtactctgctgcgaaggtgtgatttctttttattatgtgtgggtgaacggacattttctcggttacaaccaaggttccaagacagctgccgaatgggatatcaccgatcagttggaagaaggtgagaatacgattgccctcgaagtatatcgctggagttcaggttcctatctggagtgtcaggatatgtggcgtctgagtggtattgagcgtgatgtgtatctgtatagtactcccaaacagtatatagccgattataaggtaaacgcaactcttgaaaaggaacgttataaagatggtattttcggactcgacgttacggtcggagggcctgcagacggtgtggcatccgtatcttatacactgaacgatccgctcggacgtcctgtactgtcgggtgagatgcctgtcaagtcgcgcggactgagtaacttcatcacattcggagaacagcgcctgaaggatgtgaaacgttggagtgccgagcatcccaatctctacaccctcgtgttggagttgaaaaatgcaggaggacaggtgaccgaagtcaccggttgtgaagtcggtttccgtacttcggagatcaaagacggacgtttctgcatcaacggtgtgcctgtattggtcaaaggaaccaatcgtcatgaacattcgcagttggggcgtaccgtcagcaaagagctcatggagcaagatatacgtctgatgaaactgtataatatcaatactgtgcgcaactcacattatcccaccgatccgtattggtatcggctgtgcgatcgttacggactttatatgatcgatgaagcgaatatcgagtcacacggtatgggatatggacccgcttcgcttgccaaagacagcacttggctgacagcacacatggatcgtacacatcgcatgtatgaacgttcgaaaaatcatcctgccatcgttatctggtcattgggcaacgaagccggaaacggaatcaatttcgagcgtacctacgattggctgaaatcggtagagaaaagccgtcccgtccagtacgaacgtgccgagcagaattacaataccgatatctattgtcgaatgtatcgcagtgtcgacgaaatcaaggcctatctggcccagaaagatatctaccgtccgttcattctttgtgaatatgtgcatgccatgggtaacagtgtaggcggcctgaaagagtactgggatgtattcgagaataatccgatggcacagggtggctgtgtgtgggactgggtagaccagtcgttccgtgagatcgactcaaacggtcgctggtactggtcgtatggtggagactacggaccgaagggaattccgagcttcggtaatttctgctgcaacggtctggtgagtgccgatcgtgtgccccatccgcatttactcgaagtgaaaaaaatctatcagaacatcaaatgcaccttgatcaataagaacaatctgaccgtaagggtgaaaaactggttcgacttctctaacctcaacgaatatatcctccactggcaggtggtgggtgacaatggcaaattgctggccgaaggtaacaaagaggtgaactgtgcgccacacgctacagccgatgtgactttgggaaaagttgccttgcctgccaatgtccgtgagggttatcttaatctgagctggacccgcaaagaagcttcaccgatggttggcaccgattgggaggtggcttacgaccaatttgtgttgcccggaaccaaaggtagtacagcctatctgcctgctaaggccgggcagacagctttcacggtggataaagaaaccggtgctctcaactcattgacactggatggacaagaattgctggcaactcctgttacgctgagtttgttccgtcccgctacggataatgataaccgtgatcgtaatggtgcatacctttggcgtaaagccggactcaatcagttgacccagaaagtggtgtcgctgaaagacggcaagaaagccgctactgcgaaagtggagattctgaatgcgaaagggatgaaagtgggtgatgccgatttcgcctattcactaaactctgccggagccttgaaggtgaaagtgactttccggcccgatactgccgtggtgaaatcgatggcacgcctggggcttactttcgagatgaatgatacgtatggcaatgtagcttatctgggtcggggcgacaacgagacttattccgaccgtatgcagtcgggcaagatcgctctgtatcagactacggccgaacgtatgtttcattactacgtcactccgcagtctaccgggaaccgtacggatgtccgctggatgaagctgacggacgaaaccggacagggcatctttgtcgattccaaccgtcctttccagttcagtgtcatcccctttgccgatgatgtattggaaaaagcccgccacatcaacgacctcgaacgtaacggtcatgtcaccgtacatctggatgccgaacaggccggtgtgggaacggcaacctgcgggccgggcgtacagccgcaatatcgggttcctgtgacggaacaaagctttgagttcacgctgcgtacagtgaagtaaatagaatactaaccaatccatttcaccccaaaaacataacaatacatttatgaagaaattaatcttatcgacggcccttcttgccgctatctgcacagccggacaagcccaggagaagaacgactattatgtgaagcacgtagagtttccacaaggagccactctggaacaaaaggtagacatggcggcacgtcttgtacctactccgcagcaattggaatggcagcagatggagttgactgctttcctgcattttggtatcaatacttttacaggacgtgaatggggagacggcaaagaaaatcccgcactcttcaatcccaccgatttcgatgcggagcagtgggtacgttcgctcaaggaagctggtttcaagatggccatcctgacagccaagcatcatgatggattctgcctgtggccgaccaagacaaccgggcactccgtggcggcctctccctggaaagacgggaaaggggatgtggtacgcgagctgcgcgatgcttgtgataaatacggcatcaagtttggtgtttatctttctccttgggatcggaacgcctcttgctatggagactctccaaaatacaatgaattctttatcgaacaactgaccgaactgttgaccaactatggtgaggtgcacgaagtctggttcgacggtgccaatggtgaaggtcctaatggaaagaagcaggaatatgactggactgccatcctttctaccatccgtcgtctccaaccccgtgctgtgactgccattatgggcgatgatgtacgttgggtaggcaacgaacgtggattaggacgtgaaacggaatggagtgccaccgtgctgactcccggtacgtatgcccgctgtgaagagcagaacaaggcgttgggtgtgaaggcgacttccaaggacttgggcggacgcgacatgttggtcaatgccaaggaactcttctggtatccttccgaagtggatgtatcgatccgtccgggatggttctatcatcagcaggaagacaatcaggtgaagagcctcaaacacctgaccgatatttatttcaaatctgtaggctacaactcagtgttgttgctcaatattcctcctgaccagcgcggacgcatcagtgatgccgatgtcaatcgtctgaaagagtttgccgattatcgtaaagagatttttgccgataaccgtgtcaaaggcggcttgaaagcgtggactgcccggccgggtgatacgcgtgtctaccagttgaagccgaaatcggaaatcaatgtggtgatgctgcgcgaagacatttcgaaaggacaacgcatggaggctttcacagtcgaagcgttgactgccgatggatggaaagagatagcgaaaggaactaccgtcggttataaacgcctgatacgtattccggctgtcgaagcccgtcaattgagggtgaaggtcgatgcttgtcgtctggcggctaatatcagcgaagtggctgcttactatgcccgtccgctcgaagagtcggctgcaaaagaagactggaatgatctgccccgtactgcatggaaacaggtaactgccgctccgttggtgattgatctcggtaaagctgtggatatgaccggatttgtatatgccccggctaatgcggaagcgaagccgacgatggccttccgttataaattctatatcagcactaatggcagagactggaaagaggtgccgactatcggagaattcagtaacatcatgcacaatcctgtaccgcagactgtctcgttcggtaacaaagtcagtgcacgctacattaaacttgatgctaccactccggatgctacgccggcccgggtagatttgaaagaaatagggatccgcttgcagaagtaagtcgttctgttgaacaactgttccgggttatctgtttgaatgtaagatattaaacactagtaggtatgaaattctttattgatacagctaacctggatcaaatccgggaagcacatgatttgggagttctggacggagtgaccaccaacccttctctgatggcgaaagaaggcattaaaggtgtcgaaaatcagcgaagacattacgtggagatatgcaatattgtacaaggtgatgtcagtgccgaggtgattgcaactgattacgaaggaatggtcagggaaggtaaggaactggcagccctcaatccgcatattgtggtgaaggtaccgtgcattgccgatggcataaaagccatcaagcacttttcggggcaaggcatccgtaccaattgcacattggttttttccactggtcaggctttactggctgctaaagcgggagctacgtatgtttctcctttcgtgggacgtttggatgacatctgtgaggatggagtcggattggttgccgatatcgttcggatgtaccgcttctacaattatcctactcaggtgctggccgcctctatccgtagttccaagcacatcatggaatgtgtggaggccggtgccgatgtagcaacttgtccgttgagtgctattaaaggactgatgaaccacccgttgacagatgccggattgaagaaattcctggaagattataagaaggtaaatgaatgataattcttgctgacagataaaaaaaggctgtattggaacgtatcgttttcagtgcagccttttttatttggactaaacctaaagcctgtttaggtgttatttggatagaatgaacattttaaaataaagacgatagttatgatagatttaggaagctggatgaacaaaatccttatcggttggggggtagaccctaaaattgcaaatacttttgatgaaacgattattgccatcctgatgatttttatagcggtcggactggattatctttgtcaggccatttttgtaggcgggatgaagcgtctggcacggaagacctcttataaatgggatacattgatggtcaaacataaagttattcatcacctgatccatatccttcccggtatcctgatgtatatgcttcttcctatggcgttcgtacatggaaaaacgctgctgctggtttcgcagaagatctgtgttatttacatgatttttgctttgttgctggctctcaacagtagtctgttgatgttgttggatatactcagtgctaaggagaagttgaaagatcggccgatgaagggctttatccaggtattgcaggtacttgttttctttatcggaggcattgtgattgtggctatcattgtcgataagtctcctgctacattgtttgcgggattaggtgcatccgctgccatcctgatgttggtttttaaagacagtattctgggcttcgtggcaggtatacagttatcggctaatgatatgatacgtcccggtgactgggtgactatcccttcgactaatgccaatgggattgtagaagaaataaccctaaacacggtgaagatacagaatttcgataataccatttctactgtccctccctattcactggtcaacggttcgtttcagaactggcggggaatgacggaatccggagggcgtcgggtgatgaagagtatctttcttgacctgactacattgaaattctgtacttccgaaatgcttgatacttttcggaaggagatacctttgctggccgattatcagccggaggaaggagtgattcccactaactcgcaggtgttcagggtgtatgtagaacgttatctttgcagcctgcccgtggtcaatcaggatcttgacttgattatcagtcaaaaagaagctacggaatatggagtacctattcaaatttacttcttttcccgcaataaaatctggaaagaatacgaacgtatccagtccgatatctttgatcacttttttgcgatgataccgaagtttgaactaaaggtatatcaatattcggattgattggtttcaaaatcgacatacaccggtaagtgatcgctgtatccttcctggtatttcattccgacataggttcggaagggttgcatgcctccgtacttttcatctttcgtcagaaggaagggcaagcgtgctacgtttgcctttttttcttcggtaaagagtgtgcccgaaatatcaagtagcgttcctgatacgatgagatggtccagtagtccccattcaccctgatacttataggaaccgaagttacggtcttttgcctttcgtgccagcaggtggtaaagtcggtcatgatgggtactcacttcgggagacagtgcctgtagcacttgtactactgatttatctgtaggataatcgttaaagtcccccataatgatcagtttggcggagggacgtacattgataagactatctgccgcatcctttaacttttgtgcagcgtaaagccggtaaggttccgactgtcgtactccgcctgagcgggaagggaggtgtgccaccattatgtccagcgtatcgcctgtgagcagtaatccgctgacgtgcagaatatctcttgtcgggcgatgacctttgaaattcccgacggagagggcagagtaggatagaagtttgaaccggtcacgttgatacagtaatgccacattgatgccgcgcagatcggagcagtgggtcatcacgtaccgataaccggcttctttcagtggggaataaagggtcaggtcacgcataactgtatcgttttccacttcacagagacctatcaatgcgggaaaattccattctccgatggctgtgagtgttcgggctacattatctaatttctttttatatcgtcggtggttccagtgacgcattgaatggggcagaaattccatatcgtttttcagtgaatcatgtcgggtatcgaaaaagttttcggtattccaaaagacgacacggaaaggaggtcgattctgtgcagaaagaaaaagggaagagagggaaataagtaatatgaagaagagacggagcatagattggattccttttaaatgctgttcggttgaagttcaccacagagtaacacagagtaatacggagtgacacagagcctttttgttaataatcaacaattacccgtctcctctgtgtaactctgtgtcctctgtggtgaaatagctttagttcttagccggaatatgtgccaacacatccagcagatgtttccagaatttatctaccgaaggaatatgcatccgttcgtccggagagtgaactcctgtcaaggtggggccgaatgaaatcatatccagggcaggatatttgtcgaggaacaagccacattccagtcctgcatggattgcctttactttggcatcaacaccgaacaggcgtttatatgactcttctgccacttttaggatttccgaatccggattgggtttccatcccggataaccttcaccccagttgacctgagcaccggtgagtctgaatacggcacggaccgttgttgctatatcgtcgcgagaagaaaggatagaactgcgctggctggtttcgatacggatggtgttttccggtttcatttttacagatgccaggttcgttgaagtttctaccagtcccggaatatcttgactcatggcatatactccgtgcgggcaaccgtatagcgaagtaatcagccgataggaagtactcgagtcgatggaccagtcccggtgcggctctgtttcaagaagaatgttcagatccggttccacccgatgaagttcgttttcgatttcggcggtgaatacgttcaaggctgtacgtatgtcatgtttgtaatgttcgggcacggagaatacagccgaagcttcacgcggaatggcgttacgcagattacctccgttgaattcatagaggtggaagtcctcctggtaagtagtcatcatctgatagagaaaccggttcagtatcttgttggcattaccgcgtcccagatgtatatcccctccggagtgtccgcctttcagacctttaacggttatgcggaagcagaggtggctgatgggtgtcatttcattttcatattgaaattcggccactgtatcaataccgcccgcacaaccgatgtaaagttcaccttcgtcttccgagtcgagattaagcagaatttctccgctcataaagccttctttcaaggcgaaagcaccggtcagtcctgtctcttcatctacagtgaacagacattcgataggaccgtgttcaatactgtcgtcagccagaatggccagttcggtcgctactccgatgccgttgtcggctcccaaggttgttcctttggctttcatccactctccgtcaatctccgtttcgatgggatcggtcaggaagtcatggtccgtatcattattcttttcgcacaccatgtctacgtgcgattgcagaatcactgtcttcagattttctttacccggtgttgccggttttttgataagcacgttgccggcttcgtctactttggtttctaaattatgtttttctccgaacgcctttaaataggcgatcatcttctcttccttctttgaaggacggggcacctggcagatttcattgaagaagtgaaatacaccggccggtttcagttctgatttttccattctcttttctttttatggaattaaaaattcaattttaaccccttattgctaaatatggttaatttacttgcgaattttgaactcgtttctctttttttatggtaaaaaaggaggcttagtcagtacaaaagtctatatttgcacccacaaaattaatagaaatgctctatacaatactgataactctgttaatagttgctatttgccttggtttattaggcataaaagtcttttttacaaagggtggaaaatttcccaacgggcacgtcagcggcaataaagcgttaagggagagaggcataagttgtgcacagtcccaagaccgggaagcacagaagaaacgacgtttttctattgatgaaattgaaaaagccttaaacgatagtatgaactaattaattaaaaaactatattttacaagtatgaagagaatgaattacctcattaacggatttgctgctcttgcattcctctttcttttttcacaatgcgctggtaaagctgataatgctgctcctgccgcttccggaaatgcgaacggcacttctggtttgaaaatcgcttatgtagaagtagatactttgttgtctcaatataatttctgcaaagacctgaatgctgacatgatcagcaaagaggagaacagccgcatggtgttgaatcagaaagcaaatgaactgcgtaaatctcaacaggaattccagaagaaatatgaaagtaatgcttttatttctcaggaaagagcacagcaggaatatgcacgcttaggtaaattggaacaggatttgcaggctctgcagaacaaactggctacagagatggcatcggagaatgctaaaaacagtcagattctgcgtgactctattaacgcttttctgaaagaatataataaaacaaaaggttataacctgattatcagcaataccagctttgataatctgctgtatgccgatagcacactgaacattactaaagagatcgtagacggacttaacgcaagatatactcctgtggctaagaaataaaatcggtttactatactatagaatagaagaggcaattccaattaccgggttgcctcttttttagttaagataatctccctgtttatcgtatctgtccgatattttatattactttgcagggaaagcgaataaaatacaatatatgggaagtcattggggtgaaaaaatacgaagctacctgcaaagcctttatccggttgcatatcaaagatggaaggttgtgttgatttcttccctggttgtatttctgatattactgcttttacagccatttgggatatccggcattaggcagcataagttctggatacttgtgggctttatgggcgtgacggcagtatctctgagtattccgatgtatgtctttggcaaactgtttccgaagttctataaagaagaaacatggactgtgtggaaacagattgtcaatctgttacagatacttttttttatagctatcgggaactggatttattctactctcgtttttggttggggattacgttgggatgtcttttgtgcctttgcattattcactttggtcatcggactttttcctactgtacttttcattttgttgaatcaaaatagactgttggccattcatctgaaagaggctaccgagatgaatctccatttgcaacgttcggtattgccggccgaatctgtggaaacaacacaagacagcccttttcttttgtttcaaggaggcatccgggaatccttggaattggactctaaagacttgttgtatgtagaatccaatggaaactacatccgggtaaattatcagaaagcaggtaaaaacgttcagtgtctgttgcgtgcaaccatgaagcaggcagaagaagtaacagccgtttgtccgttggtgctgaagtgtcaccgggccttcctggtcaacgtccgtaaggtggtgaaagtgaatggaaactcccagggatatcgtttgcttctggagggttgcccggaagagatacctgtatcccgaggctattcgaaacaggttaaagaactgatagaaggtatctctggcgactaactattgatcacaaaaggatgcagttcgtcacacgtgaggtgctgcttatcacatatccgggctgtccgtcccggatatttttttgctttgtgtcaatcctttatgtttgccgatgaaaacgttagcaaacagatcaccatgaaaggattttatgtaccagccgcattgagcctgatgttactctcgctcccgatcgctgcacaaagtgtagctacggataccattctcctggccactttcaatgatagtatatcgttggacgaggtagtaatcaaagcacataagacgccgagggctaacagtcgttggagtgatctgcaacctgtcgatctggtaacagtaggaggttccaacggagatttgtaccgggctttgcaaacacttccgggggctcaactccaaggtgaaagcggtcgtttactggtacgtggagggagcagcaatgaaacacaaacctatatagacggcatgcatgtgttgaatccctatactactaccgggactgatactcctgcacgcgggcgttattctgcatttatgttcagtggtgtcaatctggcttccggaggacagtcgcaggagtatggagaggctttgtctgctgttcttcctttggagaccaaagactatagtacggttaataagttcgggacgaatgtttcgactgtcggaatgggtggaggcggtacacgggctttcaatcgatcctcattgtcattgaatctcgattatcagaatctagctccttatgatcgggtttatccttcgcgtacggattttaaacggccgtatcgcatgctatccggtgcgacccaatttcgctacacaccgaatgaaaagatcctttttaaattttatgcgggatatgaccgtacggatttttcgaattacacagatatcgatcgtcatcttttcggtctgggtgaaaacaatatatacctcaatacaacattccgcaaacgtacagcttccgattggaattggtttatcggaactgcctactctttttatgatcggaaagtgaaaggagcagtgaaggaccgggatgtatggaacgaacgccaacaagagttccatctaaaagcaaagttcttcaagctgtttacttcgcggttgcgtctggatatgggtgtggagacttttgtgcgttcttatcggaaccactatcagttggaaacattgcgtgatacgcatcaaatgtatcccactatctatgccggatttctttcgtctgctttttatctgtcggagaatcttaaaactgaaatatctctccgccccgaatatacttcgttaaaccggacaatgaactggtctccccgggctgctgtcagttatgcgtggaatcatctgctggtgtcggtcgtagcagggcaatatacccaacttccggaaaacgactatctgataaggaatatctctttgccttctaatgtttgcagacaagctctttttagtctccaatatgaacagggaggccggttttacaaagcagagttctattataaaaattataagaaactggaattatcggttccggacggtatcactcctgatggatatggatacagtaaaggtattgacctgtatttttgtgacaatgccctgtggaagaattttgagtaccgtttgtcttactcttataacctctcgaaacgtaaatatcgggagtatacagaacttacggtgccacagtatgccacccgtcataacgcatcgctggtgttgaaatacagtgttccccgattgcgaaccatctttagcgtgaccgatggggtggcaagcgggcgtccctaccacaatccggaactgtccggactgatgaatgatgaagtaaaaccctatcattctctcgatttgggaattacggttctggcgggcaaaaaagtgattgtacatgcttctgccaccaatctgctgggacgtaagaatgaatatgggcgtatcgacggagaggctgtccgtacttcaagcgaccactttttctatctgggagtgtatatcacattgggtaggaaggtagcttatgatgtttctaatttttaaatattataccattatgaaaacaatgattatttcaattatcgtagtattagcaagtgtggccgtatccggtcaaagtctgacattaacagttaaagacgtggaacatgtggagggaactctttatgtggctatctattcgtccaaagagaactttatgaagaaacctcttttcggttttcgggtggctgtgaaagaccgtacaatgacaataccttgtaaaggaattcctgccgggacctatgccatctccctctttcaggatgaaaacggaaatggaaagttagacaccggttcattcgagcgccctttagagaaatttggattcagcaatgatgccgagggtatcatgggagctccttcgtatgaaaagtgttgtttcgaatttaaacgagatactacggtggtcattcatttaaaatgataatgcggcatcctgccgactgttgtcttgttgaccaaagctctgtcttacctatcggaaaacaaattctatttggaaagttctttttcttcttcctgcggaatacggaatgccgtgtataattccagtatggctgcgatagtaaggcaggcaatccattcattgccacgtgtggtgaacataaaagctcctgtcaatatcagtgctaatgcaccgaagatctgctggatacgcagtcggcggagcgtcttgcttttagcccgaagcggagtattcacctgagccaatgcgacaaaacctgccccgatggtatatatataaggtgcatagacccatccggtgataaagacagcggcccctatgagggccattactgcgcctacggcgaaaagtgcgggtatcagttgtttcattcttcctcgtcaaatacgtaaatgtcttcgttgggctttttcatcaggtatttttcgcgcgctatctgttcgatagcttcgggattggtactcagttcgttgaggcgctccgtattctcttcgtattctgcgcgatatttatcaatctctccctgcaagcggctgatttcgcgtgcgtagccgatgcggcggatcatactgttttcgtccagaaatccgatgatgacaccgaatgccacgacggtaatccagtatttatgtctgcctatgaactcccagatagtgattaatttgcccatgattttctcattaattccagttgcaaagataaaactaataacttaaaacgtatcatttccgctctaaaacttatttcgcttccttttttatccttgcacttttttgcgtacatttgcacaaactcaaaaatagagattatccggaatatggaaaactatatcgtatccgcccgtaaataccgcccttccacttttgagtcggttgtgggacaacgggcactgaccactacactgaaaaatgctatcgccactcagaaactggcgcatgcttacctgttctgcggaccgcgcggagtgggtaaaacgacttgtgcacgtatctttgccaagaccattaactgtatgaaccttacggcagatggcgaagcctgtaatgaatgtgagtcgtgtgtcgctttcaacgagcaacggtcgtacaatattcacgagctggatgcggcgtccaataactcggtagacgatatccgtcagttggtggagcaagtacgcattccgccccagattggcaaatataaagtatatatcattgacgaggtacacatgttgtcagcttcggcattcaatgcttttctgaaaacacttgaagagcctccccgccacgccatatttattcttgcaacaacagagaaacataagattcttcctaccatcttgtcgcgttgtcagatttacgactttaaccgtatcagcgtagacgatactgtgaaccatttgacttacgtagcgtctaaagaaggaatcacggcggagcctgaagccttgaacgtgattgcgctcaaagcggatgggggtatgcgtgacgctctctctatctttgatcaggtggttagtttcaccggaggaaatatcacctacaagagtgtgattgagaatctcaatgtattggattacgagtattacttccgtttgacagactgttttcttgagaataaagtgagcgatgccttgttgctttttaacgatgtgctcaacaagggattcgacggaagtcactttattaccggactttcatctcatttccgcgacttgctggttagtaaagatgccgccacgctccagttgcttgaggtaggtgccggtattcgtcaacgctatcaggaacaagcgcagaagtgtgcgttacctttcttgtaccgggccatgaagctttgcaatgattgtgacatgaattatcgtgccagcaaaaacaagcgtttgctggtggaactgactttgatacaagttgcgcagcttaccgtcgagggggatgatggtagtggtgggcgtggccctaaacaagctataaaacccgttttcacgcaacccgccgctgctcagcagcctcaggtagcacctattgcttcaccatctcagagtatgaatgctgctacacctgttgctccgcaggctgtgtctcaacaggttggtagtttcccggctgtcaatgtacgtccgggtggagcagtttctccatcgggtgctatgcccgatgcggtacggatggctcaatttaaagaggaaaagaagattcctgtcatgaaaaagtccagccttggactttccatcaagcatccgcaaaaggaggaagaacagcggggagcgggtgttgtccatactgctcaggtgtcgacgcagcagatcgaagaagattttattttcaacgaacgggatctgaattattattggcaggagtatgccggacgtatgccgatcgaacaaaaggcgatagccatgcgtatgcagaatatgcgtttgtcattgctcaacgacacgacttttgaggtagtggtagataatgaaatcgttgcgaaagatttcacggctctgattcccggtatacaagcttacttgcgtggttcgctgaagaatcgtaaggtgacaatgactgtccgcgtcagtgaagcaaccgaaaatgtacgtgctgtcagtcgtgtggaaaagtttcagatgatggctcaaaagaataatgcattgttgcagttgaaggaagaatttgggttggaactctactaaaaaagatactgcgttacctattttcaaaaaaagaggatcggccatgcaacgttttgtgttgttgtaacgtctaatagctataatcaaaaaatataatcgatatgaaagcaatttgtaataaagggatttgtgtatttctttttttgtcgttactgatgtcggcaactatggtaaatgcacagagagtgatcacagcaagtggtaagtatataacaaagaatatcaaagtgacccggtttgatcagatttatttgaaaggaagtcccacgattgaatatacgcagtccccgggagcatccaaagtacaaattgcaggatcggataatttggtcgatttggtggagtgccgtgtagaaggaagtacgttgatagtgaatatgaagtcacgtaccaatatttcttatggtaaagagggacgactgaaaatcttggtttccagtccgatgctgaagagcgcttctttgcaaggttctggcgatatccatttaggaagtctgaaagtggaagggctggatgtatcattgaccggttcaggtgatattgttgcggaaaatataacttgcaacagtgatttttctgccctgttgaaaggttcgggtgacattgacgtgaaggggcagcttcgtgctaaaagtgtgaatctgaatttgcaaggctccggtgacttgaaagtagcaggtgttaccggaagcgaaatcagtgcgatgcttcagggatcgggtgacttgaaagttggaagtactaatatcacatcgactgtaacggcaaagttgagtggctcgggtgatatggatgtattggatattcgtgccaatagcgtatccggacagttggatggctcaggagacatgactttgtcgggttctgctcgtaatgccacgttggttttgaacaggtcgggagaactcagtgcgcgaaaactggatgctgaaaatgtaacggctcatgtcaatggatcaggggaaatctcctgtacagccacgaagacacttgaaaccaatatccaaggtagtggagaaatttcttataaaggaaatccgagtatacggtcgacaggtaagaatcatctgaacagactctaaaaagtattacattctgccgacaggcaagacggataaagcgtctcctaacaataaacatccattgttagggggcgcttcgtctattatcccctatagtaatcttgttttctatacgaagtgatggagccggccggatatgatttctgttatgtaaaaaaggtgataaccgtcttacactttgccgatcgactgccggaagaggtgattgctacgttgtctggcagagtatctgtatctacgttgatgattgttaagtaaacacctaaatgtaggtatcgtgcttgtgaatggatatactattatacctaatttttggtattgcctctgctgtgaatatcttatacttttgcgagctaatagaaagtaagatgattcgtaaaattgcatatacatttttttcttttctaatttgctgcaatgtatctcttgcgtggggacagacatttgcattccgaggtactgtattggatgaacagactcataaggcattggattatgccaccattcagttgtttgtggaaaagcaatttgcttatggaggaataacagatgcaaacggacattttgaacttcttcatatccatcctgggacctatcggattatcatatcttatttaggatatgattctaccgagaaagaaattaaggttgtgggaaatacttctgatatattttatttaaagccctcgaacatggcgctgaacgaagtggtagtgactgcttccgaatcaaagcgtgcgaccagtgcttccatagttgaccgtaccgccatgaaacatcttcaacccagcagtttcagtgatttgatggaattggtgcccggagggaaatcggctgatcctcagatgggacaggctaatctgatccgtatacgtgaaacgggtaagacggaaaatatctcttcattgggagtcggattctatattgatggtatctttcagaatacggatgcgaatctgcaatatatgccgagtagcacttctgccgtaaatgcaacgagtacgatatcaaaaggggtggacatgcgtactatcccgactgataatattgaaaaggtggagatcattcgtggtattccttcggtagcttacggtaacgtggcaaacggtgcggtgattattcagcgtaaaaccagtgaaagtccgttatccgcacgtttcaaagccgataagaccagtaagctgttttctgtaggcaaaggattccggttggatgggaacggacgttatgtcttgaataccgatttgagttatctggattcaaagatagatccccgcaatagtgtgaaaaactatacccgcctcacagcttccgcccgtctggatggaaagtggttatggaatgaacgcaatattcactggaatctcagtaccgattataccggttcgtttgatgatgcaaagagggataaagatgcgacagtaaaggaagactcctataaatcagactttagcagcttcaaaatggcgggaaaatggaatctgaaattttcgaatcattcatggattcgtgagattcatgcggcaacctctgttagttggcagtgggagaagatgcgtgaaacaaaatccgtctctctgaatcgtccggctgccattgccactcagacagagaccggagaatctgacggtatctatctgccttataattatgtggcacagatggagattgacggtaaacctttatatgtcacggtttccgcacgtacacatttggcttttccactgggtggactgcaaaataggatgaatttgggagtggaatggaactaccagaagaatttggggaaaggccaggtatttgatgtgacacgacctatcagtgaaggtttaagtacgcgtccgcgccgttttaaagatataccgggactgcaaccttttgctttctatgccgaagaggtgttgaatcttcccgtaaaaaggcataaattggcttttacagccggtatccgtttgcagtctttattggggctggaccgcaaatatgagatgcagggtaagatttatccagaccttcgtctggatctgcaatggagtttgcctacatccaacggatggaatattgccttttcgggaggtctgggctggatcagccgtatgccgactaccgcacagctgtatccggacttcaagtatgtggatttgattcaattgaattattatcataaccatccggattatcgccgcatcaatatgatgacgtataaatgggataatactaattatcagttggaaccggcacgtaacatgaaatgggaagtgcgggcggatattggttacaagggaaaccgtttgtcggcgacttatttccgcgaacggatgaataatgcttttgatgacctcacatactataaatcattggcatataagttatatgatccggcaagtatcgatggttcggctttgacagcccctcccgaactttctcagttgacttatgccaatgaatacaacctggatgtgtattccacgcaaggaaatggaatgaaggtgcataaagaaggagtggagtttcagttcgcttccagacgaattgaatcgcttaagactcgcgtcacagtgtatggagcttggataaagacagtttatagttcggattctcccaaatacaaggcctcttctatattgctggacaacaaacagttgaaatatgtgggattgtaccagggggagaacgggacagaaagtcaggcattcaatacaaattttatgtttgatacttatatacagcgtttgggacttactttctccacatcggcacaatgtacttggtataccaacagacggaacttatggaataatggcgttccggtcagctatatcgaccaatccggtgaaacacatctatttcgtgaagaagataaaaacaatattcagttacagcatctggtagagaaatattcggctacctattttgagcgtaccaccgtacctttttatatggatatcaatctgaaggcgagtaagcggatcggtaaatatctgaacctggctttttatgtaaaccggcttttaggtatttatcctgattataccctacggggtgtgttgcagcggagaacctccgagtcgccttatttcggtatggagatgaacctgactttttagtaaatgaacaataaaacaaaatagaaatgaaaatgaaaaagaatcaattgacaatggcaatcctttttgcgaccatgctgggatttaccgcatgtagtgatgatgacaaagtaaatatatccactgtaagcattaccactactgtagataccactatcgagggcctgcagctgaccggtggaacctatacttttgaaaatataaatacatcggttaagacagacgttgcctatccgctccaaagcattgaattggcagatggattgtataatgtgacttttataggtaaaggtacttattcacaaaatggaacttccgtggaggtcgatgtacagggagtacagcagaatgtgactgtttccggaggatcatgcaagttggaactgacagttcatgtactcaatacaggcgagcccggttttgtgattgccgagatatttattcccggaacctataatgaagctggaaagcaatataatggcgatcagtatgtacgtatctataacaactcggataaagttttgtatgccgatggattgatctttatggaatcacaattccaaactacccaaaaataccagtcggtagatccggatattatgaatgaagccattgcagtaggttctgttgtagcggtgccgggcagtggaacggatcatccggtacaaccgggagaatcttttattctgtgtgacaatgcgatcaatcataaagaggctaatccgaattcaatagatttaagtaaggccaattttgagtggtacatagagtcaaaacaagatgtggataatccggctgttcccaatctggatatttattattgttattccaaaactatttgggtgttgaataaacagggaaattgtgcttatgctatcggcagattgccccaaggcatgacaaaagaaaagtatatttcagaccatgcatacaattatacgtatatcatgcaaaacgggacagccagcaaaccccaaagcaaatataagttccccaatgaatggataattgatgccgtaaacgtgggggcttccaatgaatggcagtggaatgttacttctaccggattggatatgggacatacttatgtcggtgtgaacaatactattgcagaaaacatcggaaaatgcgtaatgcgtaaagtagcctataaggatggtgagcgtgaagtattgcaggatacaaataattctactgttgattttacacctgcagccactccgagcctatttaacaaataattgaatccatcttattgatatataaatctttattattcatgatgcgaatccgaattatcattacgttgctgattgctttatttgtggagagtcggcaggaagccttcgggcagactgtcgacacactctccctgtccgataaggtaatccgtaccgcttcatttgcgaccggatttcgtggtgaggtatggaggaatccggcactttattattactatactccgtatacatggacaaggttggacgtaaatggagcttatcatgataaaggaaaagcatctttgaaacaggaaggtgataaggatacccatatcggggtggatgttcactctttcgtcattctttcgggacgtgatcgtgtattcggttcagcaggatacaggagtgagaaacaggagaatgtgctatggaacgaaaatatagactggaaactgatttctccttacgtgaccggtgattctattggaggttttttgaaaggagaaacttactttttcaatggaggttacgccagtgagtcgggttcttggacatggggaatcactggtggttatagggcttcccataattatcgggataaagatccgcgtccgcgtaatacagcttccgatctttcttttgctttgggagcaggatatcgtttgggagcgtatcgtttgggagtttctacagatttccggctttatcagcagaaaagtgagatttcgttccttgcggataaaggctctacttcagtataccatatgttgggattgggtatggattatgtgcgttttgccggaaatcagaccggaacgaagcatcaaggtaccgagtggggaggaagtataggtatcctgccggttgatacggagaaaggcatatctgccactgtttcggtcgatcgcatgtcgatggacaagaaattaagcaatgccaataatcttactttattgaatttggcaacaacggatttgaaagggaatgtgacttggatgcggaaacttcagcagtcggagcaccttgcagtaaagctggatgcaggctatacagtccgtaaagggacggagaatctgtacggtgaggcaggcggaagttcttatggtgcattaatcagtacatctccgggaatgaaagtcacgaattgtcagattgctgccagcggtttatgggagaggcttttgaccgataagtcagtatggggaggagcaatcattccaagtataatttttcatcggtcggaaacagattacagtgctatatcccggtttgttcatctgtcggctctggagagctctttacgtgcccgtttgcagtatcagaaggggctgttacgattgactgcggaggccaatggcgggtattatgccaatttatcggccgaacattctttaccggggctgaatcttgcgaagtcggcctctcaagctttgttggcgaatatcgactatttgtccgatagctatgggatggtaggtattcgtttacaaggggattatcctattatgaaacaatataatctgtctttgtcggttcaatggcaggccgcatattataaaaaaagtggaacgacccggtatgtcgcttgttcactgggcatctttttctaacaaataaaaacaattaagcatatgaaaattaaatttatggtcgctgcaaccttaatagcagctttggtaactactacttcttgtggaaacagtaacaaacagagtcagtccgaaaaaacggagctggcagctccggcggcattaagtgtcgataacctgttggcacatgccgattcattggctaaccgggaggtgactatagaaggtatctgcacgcatacctgtaagcatggagctacaaaaatcttcctgatgggcagtgatgataccaaaacgattcgtgtggaagccggaccgctgggttcatttgacactaaatgtatcaatgccattgttacagtgaccgggacattgaaagaacagcgggtagatgaagcctatttgcaaaactgggagtctaaattgaaagcgcagaccgaaaaatctcatggcgaaacagctgccggatgtgattcggaaaagaaagcgcgtggcgaaacagctaatactcctgaagcccgtattgcagactttcgtgcaaaaatagcggaaagaaaagctgccaccggaaaagattacctatcattctattatatggaagcaagttcttatgaaatcgcggaataaaggtactgtatttcgcaaatggagccggatcatccaccgtgatttatctttcttctttgcgggaatgattttgatttatgctatttcgggtatcgtgatgaaccatagggatagcataaatcctcattatacagtgacacgaacggaatataagataacagaggacctgtcggataaaagtaaagtcaatgagaaagtgattttggctttgctggaacctttgaacgaagccggaaatttcactaaatattattatccaaagccggatcggattaaagtttttctgaaaggtggttcgagcctggtggttaatacccggacaaaggatgctgtttacgaaggagtgaagcgtcgtccgctgatttcttccatggtacagcttcatttcaatccgggtaaatggtggacttggtttgccgatgcctttgctgtcagtctgattgttatcaccgtcagcggtatggtgatgataaaaggtcctaaggggttatggggtagaggagggatcgagttggtgggcggtatcctgattcctattcttttcctgatgtgtttctagtaacaaacaaaaaatgatttataaagcatgagtgcaattatagaatgtaagaacctgacccattattacggtcagcgcaagatttatgagaacttgagctttgaagtgcctcaaggacgtatcttgggactgttgggtaagaatggtacagggaaaacgacgaccattaatatattgagcggttatcttcagccgcattcgggcgaatgtcgcatctttggtgagaacattcagaccatggatcctgctttacgcaggaacatcggtttgctgttggaggggcatgtccaatatcagtttatgaatatcacacagatagaaaagttttatgcttctttttatccgggacaatggaagaaagaagcttattatgacttgatgaacaaattgaaggtagctccgggacaacgtatttcgagaatgtcgaacggacagcgttcgcaagtggcattagggctgattctggcacaaaatccggagttgttaattctggatgacttctctttaggacttgatccgggttatcgtcgtctttttgtagattatttacgtgattatgcccgttccgagaacaagacggtttttctgacttcccatattattcaggatatggagcggctgattgatgattgtattattatggattatggttctatccttatccagcaacctattgaaacgttgatgaaagggttgagaaaatatacttgcactgtccccgaaggttatcagcctcaattgccggtgacttgctatcatccggctgttattcgtcagactttggaaacatattcttttttgcccccttcggatgtcgaggggctattgaaggaaaatcaagttccctttactggtttgcagcacgaaaatgtaggtctggaagatgcctttatcggtctcaccggaaagtattaataatgtaaataaatagagaagaaatatgatacaagccatattttataaagagtggataaaaacgcgctggtatttgttgctggcaaccctttttatgataggaatcacaggatattccatgcttcgtattggtcgtaccattgccatacagggaatcgatcatttatgggtggtaatggtccagaaggatgctatatttatcgatctgttacaatttgttcctttactgaccggtatattgctggcagccgtacagtttttccctgagatgcaacgcaagtgtttgaaacttaccttacatttaccttattcacagaagaagatggtcatggctatgttagcctttggagtacttgcgctgtttacatgttttgctacgagttttattatcatgggagtttatttgccgcaacactttacaagtgagctggtacagcgtatcttactctcggctgctccgtggtttttggccggatttgccgggtatctgcttgtttcatggatttgcctggaacctacatggaagcggagggtcttgaatctgattattgccgcattgatttttcgtgtctatttcctggctccgggagcagaggcttataacagtttcttgccctgcctgacactttatacgctgcttatcgcttctctttcatggatttctgtggtacggttcaaagccggtaagcaagactaaccgaatgtttattaccaaaaaaattaaacgaacatgattcgattcagcaaaatgtttttttatgttactgtggctgtgctgcttgtatggcagttgccttggtgctatgcttttctcacattgaagcctgccaagactccttttactatgtatagttccgtgcttggtgattttgtcattacgcaactggatgagaataagcagcttcaccgttatgatacgaaaggcaatacatatacacaacaacaggtcgacagtctgttaccttctctttacgtacgtcagcttacggcagacgaacgttttcccgatactatttgcggtagggcagttagtccgaaagacatccagttgactaactttactttcaagagtgtgccgtcagctatcaatgctccccaaacaggactttatttcctgatggagtccatgtccaagcgggtggatttgaaaatgcccgaagatgcttttcgctttaccgataaaggtatcgaatttattcgtatggagacgaatcgtatagatgaggcgaagagtgaattgtttacggagatgctggttcagaaagggtttgcttttcccgcaagctatgcttcgggcaatccgactacccgtaaagactatgatgaggggtatctggttttggatgccaaccataaactgtttcatctgaagtgtaccaagggacgtccgtatgtgaaactgattcagctgcctgaaggcgttttgccggaatatgtatttattactgagttccgcagtcgccggactttggggtatatggtagacagccagcatcatttttatgtgatcaacagtgatggaagtttggttaaatcagctcttcccggtttcgatcccaccaaagacgagttgactatctttggaaatatgttcgattggactgtaaagttatcaacggataaagatgactattattatgctttggatgctactgactattcactaattaaagaatacgcttataaagatatgcgccgctctgttccgggattatcctttacatcccctgatgacaagtttgttatgcctcgtttttaattgtggtctgacaaggtgcattttgttttaatggtttacagttttctgtagaggcgggattttgatcctgcttctgcagattttttataatcctgtgtctttggcggacaggtctttcacttacgttgatccttaattgccttatataaacaaagagaggaaattcaataatgaatttcctctctttgttgggtggcagatgggactcgaacccacgacattcagaaccacaatctgacgctctaaccaactgaactacagccaccatgttagcatctctctcaaatgcgatgcaaaggtagcgattctttttgaatctgcaaacattctgcgaacttttttcttcaaaaaatgtattcattaattccgcggttatgcttgcggaagagttcccgggtgtcattaataaagattttcaggtggttacgttcttctgccgataaagagtctgtcggaatgcttgccgggtataaaacgtaatttttctttttggagagtgtggggcgtgcagtccatatcagactatacccgcaattgctgacagatgtgcctatactgtttttcgttaattcgagtttaaagagcagtcccccgtctgttttgcgggcagacatgttcgaaataaaattacctaaagagtaaagcaccacattttgctgtccgctgagcgtatcggttcgcaactccatgggctgtaccacgtgtggatgggagccgatcacatgggtgactccccggctaagcaaccagtcggcaagagatgtttgttccttgttgggcagcgattggtattcgatgccccagtgcatacatgcaatcaatgcatccgggttcaatgctttggcagtttcgatgtcccgggccatgatatccttatcgatataattgacgatgttgggggcagataccttgatgccgttagtgccatatgtataattgagcaggacaatgcggaagccattctgttccagcaagagcggataccgcgaggcacgggccgtgctgtcggtgtaggtgccggcatacggaatttgtagggaatccaacatcaggatggttctttccaacccttttttgcctcggtcgaggcaatgattgttggctgttatcaatacgttgaagccggcatctttgattgcggtcagatattcgtcgggggcactgaaggccggatacccccgatagggctttccaccgagggttacctccagatttccgatggcgatgtctgctttgccgatttcttcttttatcagtttaaagtagtctgtatagtcgtacccggttgctgtccgggctgcgtctatctgtgcctgatgctgcatcaggtcgcctgcaaagaggagggtgatcttctgtgcgggtattgtgtcggccgatgaggtagggacaggttgctcttgcgcgttgctactgcaagatacagaacaaaaaaagagaaaaagaagaatcagatgtttcataaattaccgatattaaagttctttctggagaatacgttccacctcttcggctgtagggttcacggcaagaatgattccttgggcgttcacgaggaaagttccgctggcagcgttcggtatccggtattttgaccagatctgttgaacgtcattcagctcgataaggttcagccagggataaccgtctttccgtatggcttctctcatacggatatcgctgttctgctcgcgtgcgacgccgatgacggtgaatccacggtctttatatttttcgtagatgggaatcaattgcttggaggtcgtacggcacggaccgcaccaggaagcccataggtcgatcagagccacttttccccgtatctgttcggacaactgaaccatgttaccattcaggtcgggagcggagaagtcgatgaaacggtttcccgtcttgggttggttattgtcgataaacatttgcatttcccgggtatagggatgttcgggatagcgggaggcatacactttttgaaatacttccagataggggatgacatcttcatctttccgtgcgttctccaccttcattttcaggataaatagtcccaccagcgaagggtgttgcgaggcttgttccgtttcccaaattacttttttccgaaagagttgttccctttcctttataagtgcttttgcttcttctgtgaatgcttcgccactttcttccaggcggtctctttctctgaaaagcttgtttctttcttcgggattgtctttcacctgatcgaattttttccagagtgcttgcatggcttcactttcaaaacgtccgtatttttcgagcgtatctcttcgtgcgttgagttcatcgaaactgaacttatcctccccttccgcttcaaatagccggagggccgtcgtcagtgggttgagggtctctatgcgatagggtgggcgtgcgtctatggcagatatggtgaaagataccgttccattttctgcaaagaaagtgaccggataccagcaaccgtttaacaggtcgtcccagcaaataagctcgtaagccttttcgtggtcggtatagaagtcgtactcaaagacaccgttgcgcaccggtatcgaaatccacggggtaccgcgtgtattcttgttgctttctataagtatcaggcgactggtttgtggtcggtttgccattttgccggccaggtggcagtgtactttctttttggggacagatgcgtcaaggcaaattccctcgatccggaagtcttcttcattgttgctttctacaaagtctatcgtccggtcctgcggatcgataggggcaaattgcagagtaaacgtcacattgcccgaagccggcatgtatacctgcttgtccagttcgaaaccttgcgatcggatgacagggtaattcttcccgctttgctccccgtgtagagagagctctgaagccagccgtatccaatagttagggcgcgagtaagcatccatatacagaatggtagctgtgtcattacggacgatccggctgatttcaagtgcgtcggtatttcttttttgatatgagggatagtcgatagaaaaattttgtgcggcagcccatggggtacatgcgaagagaaagacgcacaagcctgtggttttaaatatcgtattcatgatactaaggtattgaaaagcaaattctccgtttccccttctatgaagagggaaacggaggagtgggttattgatagatcgccttcttacctgccagcaatgtatttttcatcagtgacacgatggtcatcgggccgactcctcccggaacgggagtgatgaacgaacatttcggggatacttcgtcaaacttcacatctcctgtgagcttgaacccggacttcttgctggcatcgggcacccgggtggtacctacgtcaatgaccacggcaccttctttcaccatttccgcctttacgaaattgggttgtcccaatgcagcgataatgatatcggcttcccgacactctttcaccagatcttttgagcggctgtgacatacggtcaccgtagcgtctcccggataagccttctgcatcatcagtgcagccatcggtttgccaacaatattgctgcgtcccaatacgacgcactttttcccggatgtctctatccggtagcgtttcagcagttcgaggattccattcggagtggccgatacatagcaaggcagtccgatagacatgcgtcctacattgatcgggtgaaatccgtccacatctttgcggtaatcgatggtctcaatcactttttgttcggagatgtgtttgggcaacggaagttgtacgataaatccgtctacatcgtcatcttcattcagttcgcgtactttggcaagcagctcgtcctctgtcacatcactttcgtaacggatcagtgacgacttgaatccgcacacttcgcaagcttttactttggcggctacatatgtctcgctgcctccgtcgtgtcctacgaggatggctgccaggtgagggcgtttgcctccatgagccactatttctgccacttcggctgcaatctcctgctttacttgttcggagatggcttttccatcaatcagtgtcatttcttattcgtttattgagttatttattgtttagtacttcggctactttatttttcattccttctcctctgaggtcacgtgcgatgatggttccgtcaggtccgaagaggaggatgaaagggataccttttacaccgtacagatccatgggcgtcataccggtgtcgataatttgcggccagtcgatattgagttccttgatcgcttttttggtattttccggtttgtcccagactgctactcccagaacagtcagtcctttgtctttgtatgtgttgtagagttcggctatatgaggcgattcggaacggcaggggccacaccagcttgcccagaaatctaccaaagtgtattgacctttgcccacaaaatcggataaagagcttgcggcgccgtctatggtcttaccgctgaagtcggtaaacttttgtcctactgccgtcgctttcatgccttgaaactgcttttcgatgcggtgatatacgctcagtgacttcaaccaggggccggaagccgcaaatatggtgtccatctcttcgggcaaagcgcacatggcaagctctctgatggcaaactctccgagtgcattgtccgggttcttcataaacatgtctttgtatagtcgggtataagtcggatgccagtaagtatcggcgtattcttttttaagccggagttgttccgatttgtcttctgtttgctgttcgatggccgcatgtctttttctcaactctgtgaccagctcggatgtcttatcagatatgtgggtatactcctcattcattggcgttcccttcgggtcattgtgagtcagtacattgacctggatgttgcccccttcgaggatgaagttggcatactctctccccgcatcgatgcggcaaaaacaggggatgtccgcttttccggtgaatttaaattgcccgttggtcacttgcgtgctatccactttcattccgtcgtcataacggctgatatagagtgtctgtccgttcagggtagaatcgtttatcaaaccttctaccgtataggagtgcccattgtgttgtgcgttggctatcccggctatggaagcaagcgccagagtgaagagaatgtgtttcattgattcaatgcttttatggtatcaggcaaaagtaatatcatttaccatcccctgttttttgtcaagagtagctttatagattattaacagggtggggaggagttccgaaggcaaagaggaacttctgggaatagagccgggatccgatgcgggtagagccggggggttactgaaatgcagtaagcatctgactgcaatgcagccggtattcgggagtggagcaaccgtctccgggacttcaagcggcgggttatggtttcttactccggtaggtacataaaaaaaggaggaaacagcggcttcctccttctattgcattctaattgaatttattgaatgattacatagacaaagatacatcatcccgaagccaaagtcaagctttcgggaagaaaagtgcagtcttatttcatcttcggcatcatcttgcccatcttgctgctggtcaccatcttcatcattttgcgagtctggtcaaactgtttcagcagacggttcacctcctggatagtcgtaccgctacctttggcgatacgtgtacggcgcgaaccgttcaggatgcctggattgctgcgttcctccggagtcatggagtagatgatggcttcgatgcttttgaaagcgttgtcgtcgatatcgatatctttgatggccttgcccacacccggaatcattgaagcgagctctttcagattacccattttcttaatctgggagatctggctgaggaagtcgttgaagtcgaactggttcttggcaatcttcttttggaggcgtttagcttcttcttcgtcatattgttcctgtgcgcgttccaccaacgaaacgatgtcacccatacccaggatacggtcggccatacgggcagggtggaactggtcgatggcatcgagtttctcgcccgtacctacaaacttgataggtttgttcactaccgaacggatagagagggccgcaccaccgcgggtatcaccgtcgagcttggtcagcaccacgccgtcaaagtcgaggcgttcgttgaactctttggctgtgttgaccgcatcttgtccggtcatagagtctaccacgaacagaatttcgttgggctggatggcttctttgatggcagcgatctcattcatcatctgttcgtcgactgccagacgtccggccgtatcgacaattaccagatcgtatcccttggcacgtgcttctttgatggcattctgggcgatggaaaccggatctttgctgtcgatctccgagtacatcggtacgtcaatctgttcggccagtacgcgaagctgctcgatagctgccggacggtaaacgtcacatgcaacgagcaacgggcgtttgttcttcttggttttcagcatgcgggccagcttacccgagaaagtggtcttacccgaaccttgcaaaccggacatcaggatgactgccggctgacctttggtgtcgatttcgacagtttctccacccatcagctgggtcagttcgtcatgaacaatcttcaccatcaactggctcggttttacggctgtgagcacgttctgtcccagtgccttttccttcaccgtatcagtgaatcctttggctactttatagttaacgtcggcatcgagcagtgccttgcgcacgtctttcagggtttctgctacgttgatctcggtgattttgccttcacctttcagaatcttaaacgacctttcgagtctttcgcttaaattgtcgaacatatctttgaattatgaattactaatgatgtgtaaagcccgccgcaaattgtacggatcgacacggattttatatctgacatagagaatatctgtgctaatctgtgcaatctgcggtgaaatcagccgcaaatgtacaaaaatctctcgtactttatatctttttgttctgccattttgcttttttgaaataaatatagcttgtggcgagcaacagtgtatagtacagaatctcaatcgtaaagcaccattcgatgggagctttcacccacattccgatgaaaatgatgtacgatccgtagattgcaatcgtgatggcttcgagcatcagggctgcttgagtattgcctgtacccgatattccgttgaagacgatgttagcaacagaggcaatcagcatggccacgcagatgacatataccgatgataccgattcattgatcaatgccgtttcgttggtgtataccgagagcaatgcttgtgggaacagggcggttatgatgaccagccccagcatgatcaggaaagagaagcgcccgattttgtttatcaacggcatcacgtagttgatgcctcccgcgccgatggcgttgctcaccaggctgttggttgtggtggccagtgcatttaccggaatcagcataacgatgtagatgcttctcacgatgttggcaatagcgagttcgcgctgtcccaacctctccactgccacaaagaaaacaaaccaggtggccatcgacaggaaatactgaagcatggtgaagcacgatatactgagaatgcgcatcaacaaaaccgggtcgaacgaccgcaagcggttgaggccatactttttcaggttgacggtgatgtacgtataaatcaggaaaaagagcagagaagccgcttcggcgattacggaagcaatggctgctcctttgatgcccatttccggaagcccgaagtgtccgaatatcagggcatagtccagtaccacattggtcagcgccataaccactgcattgatggtgagcaccttggtgcgggtgattccgatgtagagtgcccggaacatcacgttgacaaatgagaagaagaacccgaagatgcgccagtcgagaaactccatcgtggcatcataaatgctttcggaagagaccagcaggcgcatgatgtttccgccgaacgctttggtgaatccgaagagcaggagagccatgaccaacaggaacaagactccctgaatcatgaccggacctacatcgccgtaacgtgcttcaccgttgcggcgggcaatgacgatctgggaaccggtgctgaatccgaaggcaatggtgaaaatacaaatatagaaaagcccacccatggcagaagcaccgagggctatctcactgacacgtcccagaaaggcagtgtcggtgacgttgatgacattttgcgcaagcaagctcaggagaatcgggtaactgacactccagatctgtttgttggtatacataaagaagggtttaagtttgcaggttgcaaagatacaactttctgtagaagtagacgagcggataggggaagaagtcaatttcttcctgagggaaacgtgaagaggatggtcggctttccgtccggatttgtctgtactttgtagtttcctccgaaatactcaaatagcaggcggttgatttcgtgacggatgcatacctcttgcgaagtaaatctttcgtcagccagcggagagttggtgatgcggaagttgatgaagttcttctccgtgtcgagtgtcaccttaaagtcgatttcccgtttttctttgtacttctgcggatatgtcagtgcactcagcaacgcctgtgtgaaacggacggtgtctacccggatgttcaggtctgtgtcaatttcgttttccaaccggatgacggtacacccttcactatgcatgcgcgccatataggtagcttcattgcagagttccgccagtccgtactcctgaatgttgaacttcatcataccggcttcgagccgtgataaatcaagtacatcattaaccaggcgcatcaattcttcggagttcttctgaatgatggaagagtattctttacggagctcatcgggcatgttgggttcggaggctatcaattgtgagaaacccactacaccgttcagcgggatgcggatgtgatagcttatgttcgacaaaaagcgatttttcatttcgttggcttcttccgccatgcgggttgtttcccgtgtttctttttccgatcgttccaaagccttgcgtacgtgtgaaatgcggagcatgaaagcaaccagaattatcaggataatgaccaccactattaaggtgccgagttggatgtagcttttcagccgttcctcttccaatgccactttgtcgatgttgtatttggcttttatctgttgcatctgtttgtcgagaacggtcgtttcgatagagtctttaagatggagcgtttcgatgtacaggggaatggcttccgcacttcgtccggcttctgccaggaggtcggcttttgtcaatttttggtggatgtaattgctgttgaagtcctcttgcagcagtatgatggtggagtctatcttggcaagtgcccggtcatacgctttgcaagctcggaagtatgctgcataggcatcgtaatagagcaccctgtagagaaagaaggtgttgccattgagaaatttgcccgcgttaaccagatttttatgtgcttgttccggctggcctgcatatagataataataggtgtaatatacttcgcagaacaggtaaacatcataaaatgcctctttgagcatcgggttcgtggaggtatggtgatgcagtgtttcttttagcttcgcaaggtattcggagagtaattggttgtttttctgatccttggttatggaaatcagttgacagagaatcgagattcgtactaccgcattatctgtttgtaaagagagttgataggcagcttccaatgctttcattccttcgtcccatctctctgtactgatatagacgttgcccaagcattgttttgctccgatcagtccgcgggcgcagttcactttttgggctctttcgtacatcaggttcgcttcgttgatggcaagttcatactgctcttcgtaggtgcataggtctatctgaaagcggagcgcatcgaaatagagatcccaggtttgcgatttgcgggcataaggctccattgtgtcaagccatttttttacgctgtcccggttgttttggttatagtagtacactgtgtgcagataggcggctatggcgttgtatctgtcattcttctgcaaggtggcttcctcgcgcaacagacccgagaaggtgatacacctgggagtcagctgctctatttgtgccagtctcttgaacatttccagacgagtcgagtcatgcggaagtgactgtgccacccgatacaggctgtccgtttccgtttgtgtatttgcatgacaccatcctaaggcccggcaacatactatgatgataagtatcagtcgcttcatctttctgcctccttttcctttgcgggccggacggggtgtgtaaaccggaatcgcgcaccttcggtgtagtccgggtcaatccatattctccctccgatttgctcgatgataagttgacagatcgagagtcccagacctgttccctgtgcaccttcgttcagtttctcaaaacgattgaatatctggtcctgtttttcacggaggataccacatccggtatctgtcacagtgaacagagctatggtttctgattctttttctaatgtcagggtgatgcttccttcggtagtgaacttggtggcattgatcagcaggttgatcaatacctgttgcaggcgtgcctcgtctgtacgcaaagtcagtttatccagtgaagtgacaaaactgactccggcttgtgtctgcttcaccttctctacggtgttgattacgttacggcatatattgacggcgtcacattctttaaaattgaaagtcagcttgccgggatcgagatttgacaggtctattacatcattgatcagctttagcagcagttcggagttttgctggatgatgtcattgcattgataccgtgtgtcattgtcgatggattcgtcggtcaggatggatgagaatccggaaagtgcattcagtggtgtccgtatttcgtgactcatgttcgacaggaacagacttttggtacgtattgagttctcggcatacttacgggctatttccaattcttctttggagcggagaagtcggttggactcctgccggatgcggacaatcaacagcaaaacaagcatcaatataaagatggaagctatgatgatccacaagatgatttggtttcgttgaatttggttccggatttccatccggtctatctgatacattccccgtaggtcattgatttgccgggcatagctcagagcgttcaaagagtctttttgccggttggccttttgatagatacgataggcttcttccgttcgtcccatttgagtcagcagttgggcacactcaagctgcaaaccgatgtgtttgttgggggcaggtgctttagggacctttgtcaggcgttcgtattgttgcagggccagttcatacttcccgacagcctgatagtactgggccaatatatagttgtagatactacgcaggtagagataattcagttgttcgtggattttcctggctttgtccagttcggcttttcccttttcgggatcaccggactcgatgttatagtaggcattgcacgcacatatgaaaaagtggaatgtaggattagggttatcggcatacaggttttcaaacttttgcagatagatgcgtacctcgtccatgtgcgaggtctgaatcagggtcaggatgaatttcggaagaatctcttgttcgaggatttcgctacccggtattttgtcaagcaactccagagcttctttataagattcgatggcgggttcctgcatgttggcattcaagtaggcatccccaatggcacggctggaaagagctataccgatgggggaattcaattctttggcttccttatacatccggcgggcatggtcgatggccatattcatgtctcctcgtgaggcataagctgtcacaatcagttgtttcaactgaaatagagttttatattctttctgctttttcaggagaggagccaattcgttgccccattggataatactgtcgttgggagcttctttactatagttgaggctgttgtcgatcaggtccagcagcgctgacacgtgccttgttgctttgttatcggcagcatatgtagtgacagagtataaggttactgctattactataagcgctatattgaaagactttcccacagtaaatgttgttttcccgatgtttgttttatgcttgtttatgatgcatgtagtgcaaagctaaataaaaagagtgagattcaaacagaatctcactctttttactatattttgttcacaaaaggaactctttagctgttcatgctcatcaggaactcgtcattgtctttggttttttccaatcggtcttttacgaaatccattgcttcgataggattcatatccgacagatacttgcgtagaatccacatgcggtccagtgtttgcttgtcgagcagcaagtcgtcgcggcgggtgctcgatgccacaatgttgacagcagggaagatacgtttgttacttaggttgcggtcgagctgcaactccatgttacctgtacccttgaactcttcaaagattacttcgtccatcttcgaaccggtgtcgatcagggcagtagcgataatggtgagcgaacctccgttctctatgttacgggctgctccgaagaaacgtttcggtttgtgtagtgcattggcatccacaccacccgagagtacctttcctgatgccggagatacagtattgtatgcgcgcgccagacgggtgatagagtcgaggaagatcactacatcgtgtccgcactctaccaatcttttagctttttcgagtacgatgccggcaattttcacatggcgttcggcaggttcgtcgaatgtagaagcaatcacttccgcattgacactgcgggccatgtcggttacttcttccggacgttcgtcaatcaacaacatgatcatatatacttccggatggttggcagcgatggcattggcgatttctttcatcaggatggttttaccggtcttgggctgagccacgatcaaggcacgctgtcctttaccgattggtgaaaagaggtcgactacacgtgccgacatcgagtcggagtagcctcctttgcaaagcttgaacttttcgtctgggaacagcggagtgagatggtcgaacggtacacggtcacgtacgaaagcggcatcacgtccgttgattttagaaacctttaccagcgggaagtatttttcgccttctttgggcggacggattacaccttctactacgtcaccggtcttcagaccgaatagtttgatctgggattgcgaaacgtagatatcgtccggtgaagagaggtagttataatctgacgaacggaggaatccgtaaccatcctgcatgatttccaatacaccggttccggtgaggatatcatcaaattcataaggtttctcacgttcaatcacgcggcgttcctgaacgggtgcggcttcggcggcattttgttgcggcatgggacgctgttgtacaggctgacgctggttattgttgcgttggttattattattgttgttgttattgttgtctcgtgggcgaatcacacgcgggcgttggggttgtgccacaggttcgggggctgttgctgcttcggctttggtcgattcaaatttgccgaatagttcggttggcaattctactttttccgaaggcaggtcttcgatggggataaaatcatcgtctgcatctatatccgagaggatcgagctttcttcgtctacaacggccggtttgggtttgagaatcggtttgctgatgggacgtttttctgtttccggttgggcagcgggcttttcttcttgtgccgatggtactgtttccggtttttcggtagtttcttctgcgggtttagcttctgtttctacctgatttttacggggacgtcccggtttctttttcggagtggcataaggtgtcactttgacagattcggccggagtggcgtttgtttcggcgtttgcctctttagctgtttctggggtcggttctgttgttttaggttgtggctgtgttttggctgcgggtgttttggcatctgttttagttagttctccattcttggtagaagagaaaaccttgtcggcgttttccttctttactgtcacccgagagcgttttttcttatcttctttgcgttcctctttcagtttgtcggcagctacctttttagtagctccggctatggcttgttcgtcgaggattttgtagacaagttcttctttcttaagtgagtctgtttttttgatacccaattcctgggcaatagcttgtagttccgacaaattcttgtcgttcaattgaatgatgttatacatacagtatagtgagttatttaaatattttaattttattcgttgaaatacgtacggctgaagctgcgacgcaggggtcggaaacttaacaaacgcaataatctttaaatgatgaattagggatgtttggctgaatcggaaatccgaatttgtctcccgttggaggggttcggaatgtttcaacgccgcaaagataataaataattttggtttttgtcttcgtttactctttttttcttcataaaagtgtacctttgttgcataaaaagtaactattatgacagcaaacgaagtccatttgatttatttctcgcctacccacacctctaaacaagttggagaggcaattgttcgtggaaccggaataacaaatgtgataaacacgaatttaacacaacaggcaactcaggatttagtgattgccgaatctgcattagctattattgtcgtgccggtatatggaggtcgtgtagcccctttggccatggatcgtctggcaagtgtgcgcggaagtaatactccggcggttatcgtggtggtatacggtaaccgtgcttacgaaaaatcgttgatggaacttgattattgggctattcaacaggggtttaaagtgattgccggtgctactttcataggagaacactcttatagtacagaaaaatatcccgtagctgccggacgtcctgacgaacgtgaccttgctgtggcagccgattttggaaagcagatttcagataaaatagcatctgctaccgaaccggaaaaattatatgcggtcgatgtccgtaaaatccggcgtccgcgtcagcctttttttccattgtttcgctttttgcggaaagtgattgccttgcgtaaaagtggagttccccttccccgtactccttgggtggaagatgaatctttgtgtactcactgcggtgcgtgtgcgaaaatgtgtcctgtaagcgccatagccaaaggtgacgagttgaatacggatgccgaacgctgcattaaatgttgtgcctgtgttaagggatgcccacagaaagccagagtatatgataccccgtttgccgtactactgtcgcaatgttttgttaagcagaaagatccctgtacgttggtttaatgaaaaaaggttagtggcatagcattgtgcaagattttacttattattggagtttgtttcaattaacattgttaacgtcatttccttataatttgattcttgtgtgcaaataacaagtcttttgtattttaataacttgttatttgtatcccaggaattattttttatgaagagatttttctacttacataaatttaattagccagttgtgaaaagtataactaaaaatgattttagtgtacggtaaattggtcaggattgggggatctgtcagtgtcatttgataaatggagattctgtttcctgaactattgtactcaattattgttttaaataaacgtttaagatacagttaccttaatataattatgctgacatttaccgataactttgagaatgataaagagttgatacttcgtgatcatctggcacttgaaagaaccaagctggctaatgaaagaactttgtttgcatatatccgtatggcactttaccttttgactgtggggatagggatatttcaaattgaaagcatttcacgtttggatgggctggcgtggggatgtattatagccggaatcttcttgtttttcttgggctttgtccgtttcgaacaaatgagaaagcatctgaaacagtatacgaaaacatgtcgtgatactgagaatgaatcgtcacggaagaagtgatttttattctagattattcgataggcttgtcttcgtgtatttcaatggttttggtggctactgcatattcgtcggggaaaattttacctcccatttcgtttgcccatgctttggtaaactctgcaccggtatatatgatgatggaagaataataaatccaagtgacgaaaaccaccatgaacgcagcagccccatagacggtccccacattggctattcctatataaaaggaaattccccattgacctatcagtagcagtgtggtggttacaacagctccgatgcaaacgtctttgcttttgattttggcatcgggtaatattttaaatatgagtgtaaagatgatggtagtgacactcatatttatgatgattcctaccacttttaccaacgaatcggctacttccggatacttaaagatgaatttttgactgagttctccgattatattggtaatggtgaatgtaatcaggagaatgaaggcaaatacaagtattattgagaaagaaagtatccggtttttaataaatttaagccagctctttttaggaacggcttttattccccaaattgaatttaatgaactttgtatttctgcaaaaatagtggtggcaccaaaaatagagatacctaagctgacaaaggcggccgacctggaggagtctgtattttctgcattttctataatagaacgaagggcctcggtaacttcagggcccacaatcggttgtagttggacataaagttgattggccaaatccatatggaaaaagacaccgacagtgactagaagggaaagaaaaggaataattgaaaacaaagtcgcataggctaatgaagcgctcaacctcataacgctgtcgtctatgaatccccaaactgtatcttttattattttgaagagcagggataaactaagtcttttctttctttcggaatggatttccattttaattcttttttatccaaacagcaatattacgggtattaacagaaaattctccacttcctttttcgtctaatgtgatttcttgctgaatatttccggttatttcatgccatatttcacctttatgttcttcgcccaaatccatctttttactgccggcttcatcattagacattaaaaagactaaaccggaaccgacatgttcttcatctcccgtacgaataaagccgatggcggaaggatgatcgaaatactcaatctgatcgccataagcatattttcttctggcatccagaagaatattaatgatttgggtatgaggtgagttttctcctttgacaccataataatctccgtagaacaaacaaggataaccgtctttcattaataatatcagaccataggccaatggtttgaaccagtcttctatttgtgattccaaggaactgcccgattgcgaatcgtgattgtcgacaaaagtgactgccagatcacagtggtgctcgactaatgtgttttttaggatattctgcagatcataattcttgccttcttgtgatgcttggaataaattataatgtaatggaacatcaaataggttgactttgtgacccacggattttatgtatgcatcgagtgtgttcaaatcaccattccaatattcgccaacagcgtagaatttgtctcctttttcgcttcttaccgcatccaggaattgtgcaatgaacttgtctttcatgtgtttgatggcatccagacgcattccgtcgaggttcagctctttggaaacccattttccccaacgattcaattcggtgactacttcaggatgatccaggtctatatcattgcataataagaaatcgtagttgccattttcattgtcaaccccttcgctccacgctttgccttcaccctgtatctggaagatgccactccgctttttggcatcgtcaaaaccggttcctgaaaaatgataccaatgccatttgaagtctgaatatttatccttacgtccatggaagctgtatccggtccagccctgtatttcgaacggttttcctaatacttgggttctatcattgggatcgacttctacaactatgaacttttcagtgaaatcacctcctgccttatgattcagtactacatccagataaacggaaatatgatttttatgtaattcatcgatcatttctttcagttcttctttcgtaccatatttcgttcttacggttcctttttgatcaaactcgccgagatcatacaaatcgtaggttgcataaccttcgtcttgttgttcgtcggctttgtaagcggggggaatccatactgctgtcacaccaatctcatgtaaatgtgatgcatcttcttttaattgtttccataaatttccgtcatttggcagattccattcaaaatactgcatcattacaccattttccattatccaatgcatttagttatcggaaaataacaaagaagtgtatgataaggtttcttgtgtttacccaaaagcactgaaagaaaagatatcggcgtttgtgattagactaacatgcgttatttgtcttgccatcatatccccatttaacgtaaacagctccccaggcaaatccggctccgaaagcggtgaaaatcaaattatcaccttttttgagtttattttcgaaatcccaaatgcataatggaagcgtacctgcactggtattgccgtagtgttcgatattgatcataaccttttctaatggtacatccagacgttgggcaacagcactgatgatacgttgattggcctggtggggaacgacccagtctatttcatcttttgtcagttggtttctttcgatgatcgactcacatgcatctgacatattggctacagcatatttaaatactgtacgtccttcttggtgaaggtaatgcatgtggttgtcaactgtaaaataagaaggggaacaaactgaaccaccggctttcatgtgtaaaaaaggaagtcctttgccgtctgttcttaaaacggaatcgataactcctaaatgatctgttgtgggttccaacaagaaagctgctgcaccatcagcgaaaataggacaggtggcacgatcggtatagtctatcacagacgacattttatcggcaccaacaataatgacttttttgtattttcccgaacggataaagttagccccggtttctaatgcatataagaaaccgctgcagaccgcttgcatgtcgaaggcaaatgcatttttcaaccccactctttcgcataaaatggaagccgttgaaggaagccgataatcgggagtggtggtagctacaattaccaggtcaatatcatccggattactttgagtacgttgcatcagttgtttgacagcttttcgtgccatgtatgaggtgccgagtccttcttcattcaggatgcgtctttctttgattccgatacgtcccatgatccattcatcggtggtatctacaattctggatatctcatcattagtcaggatataatcgggcacatatcctccaactcctgtaattactgcattgatttgtttcattaactttgtctaaataagtaagttcttaagcgggggaagtataaaatgactccgaaaacttacaacttctcggattgcatctaaaataccgggcgcaaatatacagaaaagaaagatttattcaatatcttgtaatctaaatgcgttgaatttcttagtgagattaggataagttataatacagaaatagaattagggaaatgattaaatgaaggaagataggttgctttgcaagaaaagaaagaaataatcaggtctgattttcttagtaagagtgaggtcttaatctgatttgtgtatctgttggttcaagcgtttttgctacttctttacttctttgggtaaccatactttagtctgtttctgtatttctcgttaatgcttagtaaatggcctatgttattccgaaagtatttaattttcacgtttttgtttataaaaagaaactcctgtaattgtcaaaattacaggagtttatatcatttgatcaagaaacggtggttactttgccaatgcctgagctacatctaccgcacaagccacagtacagcctaccatcgggttgttaccaattcccaggaatcccatcatttctacgtgagcaggaactgatgaagaaccagcgaactgagcgtctgagtgcatacgacccattgtatctgtcataccgtatgaagcaggaccggcagccatgttatccgggtgaagagtacgacctgtaccaccacctgaagctactgagaagtatggcttacctgccagtacacgttctttcttgtaagtacctgcaaccgggtgttggaaacgcgtcgggttagtagagttacctgtgatagatacatctacaccttctttccacatgatagctacgccttcacgtacatcatctgcaccatagcattttacttttgcacgaggaccgtcagagtaagcaatttctcgtactactttcagttcacctgtgaaatagtcaaactgtgtttgaacataagtaaagccgttgatacgagagatgatctgagcagcatcttttccaagaccgttcaagatacaacgcagaggttctttacgtactttgtctgcttttgcagcgattttgatagcaccttcggcagcagcgaaagattcgtgacctgccaagaaagcgaaacatttggtttcttcacgtaacaacatagcagccagatttccatgaccgataccaaccttacggtcgtcagctacagaacccgggatacagaatgcctgcagacctataccgatagcttcggcagcatcagcagcgtttttgcaacctttcttgatagcgatagcagcacctactacgtaagcccacttagcattttcaaaacagatcggttgagtttcttcacacgttttataaggatcaactccagcagcttcgcagatagcgttagcttcttcgatgtctttgataccgttagcgttcaaggcttcgatgatacctttgatacggcggtcctgactttcaaattttacttctctaatcataatttcttttcctccttatattattcgtgacgtggatcaatgtgtttaacagctccctgttctgcagtgaagcgtccgtaagtaccggtaactttcttcaatgcttcattcgcatcagtacccttcttgatttcatccatgaatttgcccatgtgaacgaattcgtatccgcagatttcatcgtttttgtcaagagcaattgtcttgatgtaaccttctgccatttcaaggtaacgaggacctttagccaaagtaccgtacaatgtacctacctggctacgcagacctttacctaaatcttcaagacctgcaccgatgatcagaccaccttctgagaaagctgactgagtacgtccgtaaacgatctgtaagaagagttcgcgcatagcagtgttgatggcgtcacaaactaagtctgtgttcaatgcttcgaggatagtttttcccgggaggatttcagcagccatagcagctgagtgagtcatacctgaacagccgatagtttcaaccagagcttcctggatgataccttcttttacgttcagagtcagcttacatgcaccctgctgaggagcacaccaacccacaccgtgtgtcagacctgaaatatcaacaatttcttttgattttacccattttccttcttcgggtatgggagccggtccgtggttaggacccttctttacaacacacatgtgttccacttcgtgtgaataagtcataattagctcttttttaagtgatataattaaaaatacgtagtcacgattctcaaatcgctcacaaaggtagtcgttttatttgtttttgcaaatcgggttttattacttttttatgaaaagagaaaaatagaatttgtggttttgttagattgtaatgtggagatgacattttagataatctttgttttgttgaactattactctgattctttgtttcttctgagaaaaattgatcggttatgaatttgaatgaggtagatatacattatttaattgcagccattagtgtgataacttcggcattggtgttttacacaataggagtgtggggagagcgattgcagaagaggttgaaattttggcatctggtattttttttgttgggactgctggccgattctgtgggaacggctttaatggagaatattgcgcgactcacacacttgcatgatgaaatacatactgtgaccggtattatcgctatcctgttgatgtttattcacgctatgtgggctatctggacgtatgtgaaagggagtgaaagagccaaggaacatttcaaccgtttcagtattgtggtgtggtgcatttggttgataccttactgcataggcgtatatcttggtatgtcattgcatcattgattatcaattataaggattgagaattgaatcccgtctgtttctttgtattgtgtagattgctttgaataagatgctatacttgtcaaatctttaattatctacctttagaaggtattagtgaaattctcggagaacaaattgatgaacctgttattcttttgtaaattagaaggttactatgacttgctgtttgtcggtaaaaggcttgttttaacacactgttaaaacaaatgttttgatgatagagaagaaggcttttaaatgtaaaacacttgtcctttgcattcaagcacagaatgcaaagaagatggcattaacaacgttaattgataacgcttgttgcaataccgaactacaatgaactgacatgcgatccggcagagaaggtgatcaaattattcgttataggattattattgaagaaaattaaacgggtttctaaaaaacttatcaaaaagcctttctgaaccatatatttccgtatttttgtttcctgatatttataaatatagaattcaccttattatatatagtggaaatgatagaagttacggatgcctctttgcaaaaagctgcgggtgagggaatggatgaatttatccaggtgtttacagacaagtataaagaagtgattggcggggaacttactgccgaaacaatgccactgttgacaggggagcagcactctttgctggcctatcagatttttcgggatgaagtcatgttcggcggcttttgtcaattgattcagaatgggtatggaggttatatctttgataatccttttgcaaaggtaatgcgcctgtggggagccgaggatttctcgaagttggtttataaagctaagaagatatacgatgctcatcgccacgatctggagaaagagcgtacagaggatgaatttatggctatgtacgagcaatacgaggcctttgatgatcttgaagaagaatatctggatattgaggaggaggttacagcactggtagcaagctatgtagacgatcatttagagttgtttgcaaaaatagttaagtaatagatgcagtattttttaagtctctgcatttacttattgtgaattagaatttatatctttgcaaactctaaaaaatagatttatgaaacaattgaaattaatggtgttgaccttaaccctgttgatgggtactatgtttacttcatgtatggattccggagaaagcggtcctcagcagtgggccggtgtggtgaaagtgaatgatagaatcggttatgttacattcacagatgctgccggtacagagctgatccctactaacacgattcctgtaactttgaatgcaagaatggcttacatttattgccaggttgatgaaggtcaggacctctcaacaaatcctaagtcaattaaaattacacttttagcagatcctacaggaattgatgctacagcaataaccactccgaaagtagaatcaagtgatgtgactactaatgcacctgttggttcgttgagttttgcatcaggatattcaactgtggccccatttcagtttagtgaaaatacgattgtattaccagtactttatcgtgtgaaaaatgtgactactacagaagatattaaaaatgagcttgctaaacatacttttactcttgtctgctatacagatgatattaaatctggtgataccattttgaaactttatttacgctataaagttgaggatgaacctgctgctattgctgagcgtgcaacacgtacttccagctttaaggcttatgaaatcagccaaatcttaagagaatatactctgaagagtggacaaactaaacctgctaaaataactatagtagcacagcaaaatgagtacaacaataagttggaagatacttctactatagagaaggtatatgaaatagaatataaaactgcggaataatttgaattacaaagcattatttcaaatagcaatgtcattgatttcctctccggccaaggcctgggaggaaattcgtttagaggatagacgggcagttcttactgtttttgtctatcctatgattggtttatgtggtttatccgtattcattggtgctttgtggactaatggttggggaggaccacaaagtttccagttggccatgacgcagtgttgtgcggtggcggtagctttgttcggaggttattttctggcggcttatgctatcaatcagatggggataaaaatgtttggtatgaccaatgatatccctttggcacagcagtttgcaggttatgcgttagttgtcacttttttgttacatatagtaaccggattgcttcctgatttcagtattatcggttggctgctccaattttatatcgtttatgtggtatgggaaggagcaagggttgtgatgctggtagaagaaaagaatcggttgcgttacaccattttctcgtcgattttgttaatactatgtccggcggtaatacaagttgtgttcaacaagctaacagctatattaaattaagaaaataaaatgaaactggctcctataaatataaagaataaacgtgctactttcgactatgagttgatcgatacttatacagcaggtattgtgttgaccgggacggagattaagtccatccgtctgggtaaggcaagcttggtagatacgttttgctattttgcgaaaggcgagttgtgggtgaagaatatgcacattgccgaatatttttatggctcgtataataatcatgcggcccgacgtgaccgtaagttgctattgagcaaaaaggagctgaataaattggaaagagggacgaaagacgccggattcaccattgtccctgtgcgtttgtttattaatgaaagaggtttggccaaagtggttgtagctttggctaaaggtaaaaagcaatatgataaacgggaggctttgaaagaaaaagacgaccgtcgtgatatggacaggatgtttaaacgatgataggtttgtacctttagcaatgaaaaaaactattcaacagctggtactcgaacgtatccttatattggatggcgctatgggtacaatgattcagcaatataatcttagagaagaagattttcgtaatgaacgctttgcgcatattcccggtcaactgaaggggaataatgatttactttgtctcacacgccctgatgtgattcgggatatacaccgtaagtatctagaagccggtgcagatatcattgagacgaatacttttagttctaccactatttctatggccgattatcatgtacaagagtatgtgcgtgaaatgaatcaagcggctgtaaagctggcacgtgaagtggccgatgaatatacggcactaaatcccgataaaccccgtttcgtagccggttcggtaggtcctaccaataaaacatgttctatgtcgccggatgtgaataatccggcttatcgtgctgtgacttatgatgaaatggctgatgcttatcagcaacagatggaagctatgcttgaaagtggggtagatgctttattgatagaaactatctttgatacgctgaatgccaaagctgctattttggcggcagaacgtgcaatgaaggctacaggagtaaaagtgcctgttatgttatctgtgacggtttccgacaccggaggacgtactctttccggacagacgttggaagctttcctggcttcagtgcaacacgctgatatcttctcagtcgggttaaactgttcgtttggtgccaggcaactgaaaccttttttagagcaattggctgctcgggctccttattatattagtgcttatccgaatgctggtctacctaatagtttgggaaaatatgaccagactccggcagatatggcccatgaagtaaaagagtatgttcatgaaggattgatcaatatcataggcgggtgctgtggtactaccgatgcctatattgcagaatatcctgcattgattgccggagcaaaaccgcatattccggtttgtaaaccggattgtatgtggctttcgggattagaactgttggaagtgaaacctgaaataaatttcgttaacgtgggggaacgttgcaatgtagccggttcgcgcaaatttcttcgtttgattaatgaaaagaaatatgacgaggcattatccattgcccgtaaacaggtagaagacggagcactgattatcgatgtaaatatggacgacggccttctggatgcaaaggaggagatgacaactttccttaatctggtggcttcggaaccggaaattgctcgtgttcctgtaatgattgattcttcgaaatgggaagttatcgaagccggattaaaatgtcttcaaggaaaatcaattgtgaattccatctcgttgaaagagggagaggagaaattccttgaacatgctcgtacggttcgccaatatggtgcggctgtggtagtgatggcttttgatgagaaagggcaagctgatacagccacccgtaaaatagaagtttgcgaacgggcctatcatttgcttgtagataagataggattcaatccgcatgatatcattttcgacccgaatgtattggctgtggcaacagggatcgaggaacataataactatgcggtagattttatagaggcgacggcttggattaaaaagaatcttccgggcgcccatatcagtgggggagtaagtaatctttcgttctcattccgtggaaacaactatattcgtgaagcgatgcatgccgtatttctttaccatgccattcagaaagggatggatatggggattgtgaatccgggtacttctgtattgtatacagatattccggcggatgtactcgagaggattgaagatgtagtattaaaccggagaagtgatgccgcagaacgattgatagaattggctgaccggttaaaggaggcttctgcgggtaatacttcggccgggcaaccggtaaaacatgatgcctggagggacggtacggtagaagaacgcttgcaatatgctttggtaaaaggaatcggggattttctggaagaagatcttgctgaggctttgcctaaatatgataaagcggtggatgtgattgaaggaccgttgatgaatggaatgaatcatgtgggcgaattgtttggcgcaggtaagatgtttcttccacaagtggtgaaaacagcccgtacgatgaagaaagccgttgcaatcttacaacctattatagaatcggaaaaggtggaaggtactgcttcggcaggaaaagttttgctggccactgtgaaaggggatgtgcatgacattggcaaaaatatagtctcggttgtgatggcatgtaatggttacgatattattgatttgggagtgatggtaccggctgaatcgattgtccaaaaagccattgaggagaaagtggatatgatcggacttagtgggttgattactccttcactggaagagatggtacatgtggctatggaattagaaaaagccggattggatattccattgttgataggaggagcgactacctctaaactacatacagcattgaagattgctccggtttatcacgctccggttgttcacttgaaggatgcttcgcagaatgcgggcgttgctgctcggctgatgagtccgaaatcgaaagaagagttggcaaaagaattatccggtgaatatgaagcccttcgtgataagagtggcatgatgaagcgtgaaaccgtttcattgaaagaagctcaggaaaacagattgaaacttttttgatataaaaagaaattatggtaataaagaaagcggtttatgtatgggtgatcgggatactgggaatgatttcattcgcagcttgttcatctgcttctcaaggagaagtcccttcgacatccaatgctgcgttggataatatttttgcacgtaaaagtgtgcgggcttatttagacaaggaagtagaaaaagaaaaaatagattggatgctacgtgccggaatggctgcaccatccggaaaagatattcgtccgtgggagtttgtattggtcaccgaccgggttgctcttgattcgatggccgctgctttaccttatgcaaagatgctgactcaagctcgctatgccattgttgtatgtggagatgtagctcaatcttcctattggtatctggattgttcggctgctgcacagaatatattattggctgccgaagcacaggggctgggtgcggtatggacagctgcttatccttatgaagaccgtatcagggttgttcgtaaatatacggagcttccggggaatatagtgcccctgtgtgtgattccgtttggttatccggcaactacccaagagcctaaacagaaatttgatgagaaaaaaattcattacgataagttttaaaccgtttattggcttttctgaaagctgcttctgataaaacgaggcagcttttttatttttattcctttccttctgataatttctgcattttgtttctctatttcaataaattccttacatttgcaccaatattaatcgaaatctgatacacgaatgtttggaattagcgactcacttatcattttgccatacttgctttcggtagtatgtgtgctctttgctgcttggtttggcttcaaatactggaataaagacgacgaaaaagataaaacacgatgaatacatttacacttggactgattgtgatagcctatctgctgtcactggcctatcttggttttttaggttataagaaaacatcctccgccagtgattacctggtaggaggtcgacagatgaatccgtttgtcatggcactctcttatggtgccacttttatatcagcctctgctattgtcggctttggtggggtagcagcagcttttggtatgggtattcagtggctttgctttttgaatatgtttataggtgtagtgattgcctttatttttttcggactccggacgcggcgaatgggtgctaaattgaatgtaagtacatttcctcaattgttaggcaggcattatcgttcacggggaatacaagtctttgttgccgcagtgattttcctcggaatgcctttgtatgccgcagtggttatgaaaggtggtgctgtctttatcgaacagattttccagattgattttaatatttcacttttaatatttacattggtaatagctgcctatgtgatcgcaggaggtatgaaaggagtaatgtatacagatgctttacaggcagttattatgtttggctgtatgctgtttctgcttttttcgttgtatcgggtactggatatgggctttactgaagccaatcaggctctgacggacatagctcccttagttcctgaaaaatttaaggcgttgggacatcaagggtggacggctatgcctgttaccggttcacctcaatggtatacattagttacttcacttatcttgggagttggaatcggttgtcttgcgcagcctcagttggttgtgcgttttatgacggttgaaagtagcaaacaactaaaccgtggggtttttatcgggtgtttttttctgattattaccgtaggtgctatttatcatgcaggtgcattgagcaatcttttctttcttaagaccgaaggtgttgtagctacggaagcagtcaaagatatggataaaatcatcccatactttataaataaggcaatgccggattggtttgccgctctttttatgctctgtatcctttctgccagcatgtctacactgagttcacagtttcatacgatgggagcttcggttggttccgatatttatggtacttacaagcctcgttcacgtggtaaattgactaatgtgatccgtttgggagttttattttcaattttagtgagttatattatctgctatatgttgcccaacgatattatagcccgtggaacttctatttttatgggtatttgcgctgcagctttcctgccggcctatttttgtgctttatattggagacgtgctacccgtcagggagtgatggcaagcctttggatagggactataggtagtttgtttgcgctggcctttctgcaccagaaagaggctgcggcaatgggggtatgcaggtggcttttcggtaaggatgtgttgatcgaagcctatccttttccgatgatagatccgatattgtttgcattgccattatcggtagcagccgttattattgtgagtttgttaacagagaaagggaaaaaataaaatatactatatgctgtcaagggcttgcaattcttataattgcgagcttttgccctatttcaactttttattttcttcttatatgattcatatcttgagttaatgtctctgacgaaattgtaggtctctattccacggaaatatccgtttttgcataccggatcagtgaaatattcttcattgctttttagtaggatgtaattttccacattgtctgtccatacggttttattcttaccgtatttatctgccagtgcaattgcgtcaaaaatatgtcccagcccggcattatatgaagcgagtataaacttaatccgttcctgtttatccggcaccatgcttaggctgcgatctgtcgctgcaatgtatttcaccgcagctttgatactttcttccgggttttgctctttgcccggtggaacccccattgcacgggcggtggcaggcattaattgcatcagtccctttgctccggcccatgatacggcagttgtatcgaagttcgattcggtataggccaaggatgccaacagacgccagtcccaacctatctcttgcgcatatttcttgaataagttgtcataatgagagattttaccctcttttaaggataaaatgggagaatgaggcattgctttactgatctcaaaatatcgtttcatacttgcggtatatgccggcgaagtcatattctgtttatgccatttgtctgctgctgctgccagttgcggacaatctttacgtacggcccaggaagcgcgttggtcaaaactgatagacagactagtgttcaggttaggataataagttgcattcaacttagcgacatcattatcagccactgtataaggaattttaccttgtgcaacttgggttatcaaatcctcggcagtaatgctgtcattggttacttgatgaatcagaatgcctcctcccagctctttattcaagttaaccaatcgttcgtaatatttgcccggtttcacatatatattttttccgaccaactcagttacatcttttagcggttttgttttcccattggttcgttggacaattacctggtgggtgattacttcttcgccacaatagatcaggctgtcttttaattctttagtaatcggaatattgtatgcgataatatctccttcgccatttagtaactttcggatgagttccggtacgtttttggctacttctattcgcaatttcactcctaaacttttggcaaattgttcactgagttcgtattggaaacccatgtcttgcccacgatagatgaaataagaagtagaactataaagagtcagaacaacgagctctccgctatctttaatttgttccagatcgtgtgcagaggactcctctgtagttactgcttgtttgttgcggcaagacaatacacagaaaagaagaaaaagcagggagtaaattatcagatgccgtttcatggcctaccgatgtgtttttttatatacatggtcaatatatcgatggctacttgattgctccctccttcgggaacaatcaaatctgcgtagcgtttacatggttcgatgaactgtaaatgcataggtttcagcacgcgcgtatatcgctccattacagcctctgcagtgcggcccctttccactacgtcacgttggatcacacggatcaaccgttcgtccgggtcggcatctacaaatattttcagatccatcatattgcgtagctttttgtcacataaagctaggataccttcgattatgaccacttcacgtggttcaatatggatcgtttcgggttggcgggtacaagtcaaataagaataggtgggttgttcgatacatttgccttctttaagcagggcaacatgtttagacaaaaggctccattcaaaagcatcgggatggtcaaaattgatattctggcgttcttcaaccggtacgtggctactgtctttatagtatgaatcctgaggtagcaatactacttcaccagctggtagactctcaatgattttccgtacgacggtggtctttcccgagcctgttccgcctgctattcctattattaacatccttttatagtgtatatttgaaacaaatagagtaattttgcaactgtaaaaaacagctttggctgacaaatataaaaacaaataattaaaataacaacgtaatggtaaaacacattgtattatttaagttaagagacgacgttcctgtagaagagaaactcgttgtgatgaatagttttaaggaggctattgaagcattacctgctaaaatctctgtgatccgcaaaattgaagtcggattgaatatgaatccgggagaaacctggaatattgcgttgtatagtgaatttgataatctggatgatgtgaagttctatgctacccatcccgagcatgtggctgccggtaagattttggcagagacaaaagaaagtcgggcttgtgtagattatgaattttagttataaataaataatagctttttaagattagccaaaacctcaaaccgggaaaatccgatagctgttatatttctagaaacatcataaacaattttaaagaatgaagaaattatcctcttttctgcttttgttgctggtcgtatttacggcgcaggcacagatacaagagcctgtgaagtttaaaacggagctgaaaaccctgtcgggagccgaagcggaaatcgtttttacaggtacgatcgatgccggttggcatgtatattctaccgatttaggtgatggtggtcctatctccgctacttttaatgtagagaagatgtcaggtgccgaagttgttggtaaattaacccctcggggaaaagaagtttcggactttgacaaactgttcgaaatgaaagtacgctattttgaaaaaacggctcaatttatacagaagataaagtttaccggcagtgactattcaatagaagggtatctggaatatggtgcatgcaacgatgaaaattgtctgcctcctacacaagttccctttaaattttcgggtaaagccgctgctactgccgaagtctcggcaaaagaaacccctgcaactccggtaaaagagccagtcgccactgttacagacagtattgtagaaccgacagctacaactgttaccactgcgataggcagtgttgacttatggaagcctgtaattaatgatttgaagaaattcggtgaggcaaactctcaggaagatatgtcatggatctatatttttattacaggatttttaggaggtttgctggccttgttcactccttgtgtatggcctatcattccgatgactgtaagtttcttcctgaagcgaagcaaggacaaaaagaaaggtatccgggatgcatggacttatggggcatccatcgtggtaatctatgtagcgcttggccttgccattaccttgatatttggtgccagtgctttgaatgccctttccactaatgctgttttcaatatcttgttctgtctgatgttgatcgtatttgctgcttctttcttcggagctttcgaactgacacttcccgcaaaatggagtacggcagtggatagcaaggcggaagctacaagcggattactgagtatttttttgatggcgtttacattatcgcttgtatctttttcttgtacaggtcctattatcggatttttgttggtacaggtttctactacaggtagtgtagtcgctcccgcgattggtatgttgggctttgccattgcattggctctgccatttactttattcgctttatttccgtcttggctgaagtcaatgcctaagtctggcggttggatgaatgtgattaaagtgacattgggttttctggaattagcttttgctttaaaattcctgtctgttgccgatttggcttatggatggagaattctggatcgtgagactttccttgctttgtggattgttatttttgctctgcttggtttctatctgttgggtaagattaaatttcctcatgatgacgatgatacgaaagtaagtgtatctcgtttcttcatggcactggtttcattagcttttgctgtttatatggttccgggcttatggggagcacctttgaaagcggttagtgcttttgcaccgcctatgaaaacccaggattttaatctttataccaatgaggtacatgccaagttcgatgattatgatttaggtatggaatatgcccgtcagcataacaagccggtaatgctcgactttacaggatatggttgtgtgaactgtcgtaaaatggagcttgccgtatggaccgatccgaaggttagcagcattattaataatgactacgtactgattactctttatgttgacaataagactccgcttactgaaccggtgaagatcatggaaaatggtacagaacgcactttgcgtacggtaggtgataaatggagttatctgcagcgtgtgaagtttggtgccaatgcccagcctttctatgttctgatagacaatgagggtaatccgctgaacaagtcgtatgcttatgatgaggatatatccaagtatatcaatttcttgcaaacaggacttgaaaattatcggaaagagaaatagataatacagtgttctcaataaataaagggctgtcttcgctattggaggcagccttttattcttttgcgaaatgaatactcatttttatcgcattggtacttccattagcaataaggtcgcttcttgggttatttccactttaaagctctttgtatcccaaagaccgatgccgtcacgtcgtgacaatcggttgcctgcaacttccacatctccttcgatgataaaaagataaactccgttaccttcctgatgcaacttgtattcgaaactctttcctgcgtcaaatgttcccatagaaaaccatgcatcttgcttaatggaagcgggtactttaccgtccggtgaaataattagagcaagttcgtttcttttcaataaaggacgaatatcgtagttgttatattccggctctgtattttcaattctcgggaatacccatatttgcaaaaattccaattgctctttgtcacttccattatattcactgtggaagatacctttccccgtactcataacctggatatcgccgggtgtgattgtccgggtgttttttacgctgtcgccatgtctcagataccccttcagggggatagaaatgacttccatattctggtgagggtgtgtatcgaatcccatttcagggtcaacgctatcatcattcagtaccctcaatacgccgaaatgcattcttgacgggttataatagtttgcaaaactaaatgtatggtgggttttcagccaaccatgattgaaataaccccttgaagaggctttgtctactactgttttcatacttttcctttcttaatagaacatctgtataacaaacggattatagataaagttctggtggtgagatgggtgcattttgcgaaaagatttatatctttgagcattctaaaacgaaaaaggtatgaaaaagattattaacccgtggaaggggatggaaggatataattgctttggttgtgcccctaacaatgaagccggtgtgaaaatggaattttatgaggataacgatgaagtgattagcatctggcgtccccgtcccgaataccagggatggattgatacgctacatggaggtatccaggccgtacttttggatgaaatctgtgcatgggttattctccggaagttacagactacgggggtgacatcaaaaatggagacacgttatcgtaaatcaatcagtactaatgattcacatgtagtgctcaaagcacatattaaagaagtgaagcgtaacattgtgataattgaggcacgtctttataataaagatgaggaattgtgtacagaagctctctgcacttactttacttttccgaaggagaaagccagagaagagatgcattttttgtcatgcgaagtagaagatgaagagattcttcctttaatttgaaagaaaaatagaagaatttctgataattgtttggtgattcagaactaatactttatttttgtcgcataaacaataaagatatgaacattactattacacatcgccatcatcattactcaatcgaataactcggtgggcaagatggtattgtgtatatatatgatagaatacgaggcttaccgataaggtgagccttttttattttctatatatcgaattataaattgtaaattaagatattgtaattatgttaagaatcgcagtacaagccaaagggcgtctttttgaagaaacgatggcccttcttgaagaatcagacatcaaactgagcacaaccaaacgtactttactcgtacaatcgtccaactttccggttgaggtactttttctccgtgacgatgatattccccaatctgtagctacaggagttgccgacctgggtatagtaggagaaaacgaatttgtagagaggcaggaagatgccgaaatcattaagcgtctcgggtttagcaaatgccgtttgtctttggctatgcccaaagacattgaatatcccggtttgagttggtttaacggaaagaagatagctacttcctatcccggaattttagatgcttttatgaaaagtaacggggtgaaggctgaagtgcatgtcattaccggttctgtagaagttgctcccggcatcggattggcggatgctattttcgatattgtcagttccggttctactctggtcagcaatcgtctgaaagaagtggaggtcgtaatgagatcagaagctttgctgataggcaacaagaatatgagtaaggagaaaaaagagatattggacgaattgcttttccgcatggatgctgtgaaaactgctgaagataaaaagtacgtactgatgaatgctcctaaagataaactggaagatattattgctgtgctaccgggtatgaagagtcctactgtgatgccgttggcacaagatggttggtgctctgtacatacagtgctcgatgagaaacggttttgggagatcataggtaagctgaaagcgctgggagcggaaggtattttggtgttgcctattgagaagatgattatataggaaaatctgttggttgaactcttaaattaaaaattatgaaactgattaaatatccggaccggtcgcaatggaatgagatcttgaagcgtcctgtgcttgagacagaaaatcttttcgatactgtacgcaatattattaaccgtgtgagagccggaggggaccgggtagtcatggaatatgaggctgtgtttgataaagctgaactcacctcattggctgttacttctgcggaaatagaagaagcagaaaaggaggtacccatcgaactgaaggcagctatttatctggctaaacgtaatattgagacatttcattctgcacagcgttttgaggggaaaaaggtggacacgatggaaggtgttacttgctggcaaaaagctgttgctattgaaaaggtcggattgtatatccctggagggacagcccctctattctccactgtgcttatgttggctatacctgctaagattgccggatgtaaagagattgtactttgtacaccgcctgataagaatggaaaggtacatcctgctatcctgtttgccgctcatctggctggagtcagcaaaatctttaaggttggtggagtacaggccattgccgctatggcttacgggacagagagtattcctaaagtttataagatctttggtcccggcaatcagtatgtcaccgctgccaagcaacttgtcagcctacgggatgtcgccattgatatgcctgcggggccgtcggaggtagaggttctggccgacgaatctgccaacccggtgtttgtggctgccgatcttctttctcaggcggaacatggagtggatagccaggcgatgctggttacgacttctgagaagctacaaacggaagtcgtttacgaggtcgaacgccaattaggctatctaacccgtcgcgatattgccgaaaaatctttggccaacagtaagttgatattggtgaaggatatggaggaagctttggaacttaccaatgcttacgctcctgagcacctgattattgagacgaaggactatatggaagtagccggacagatagtcaatgccggttcggtatttttgggtgccttctctcccgaaagcgcaggtgattatgcttcgggaactaaccatactttacctaccaacggctatgccaaagcctatagtggagtgagcctggacagtttcatccgtaagatcacttttcaagagatacttcccagtggaatgtcggctattggcccggctatcgaggtgatggctgccaatgaacacctggatgcacacaaaaatgcggtaactgttagattggaggagataagaaaatgaaaacattgcaagaattaacccgtccgaatatctggagactaaaaccctattcttcggcccgtgatgaatatagtggggcagcagcatctgtttttctggatgctaacgaaaacccgtataacctgctgcacaatcgctatccggatccgatgcaacgggatctgaagttggaattgtccaagataaaaaaagtagctcctgcccatatctttctgggaaatggcagtgatgaggctattgatttggtgtttcgtgctttctgtgagccgggcagagacaatgtggttgctatcgatcctacgtacggcatgtatcaggtttgtgccgatgtcaatgatgtggaataccgcaaagtgctgcttcacgatgattttcagttttctgccgatgaattgttggcagttgcggatgaacggactaagatgattttcctttgttcacccaataatccgacgggaaatgatctgcttcggtctgagataataaaggtgatcaatgatttcgaaggattggtcattctggacgaggcttataatgatttttccgatgaaccctcatttttgtcagagttgggtaagtatccgaatctgattatcttacagactttctcaaaagcgtttggttgtgcagctattcgtttggggatggcttttgcctccgaggggattatcggtgttttgaataaaatcaagtatccgtataatgtgaatcagctgactcagcaacaagctatagaaatgctccacaaatactacgaaatagaacgctgggtaaaaacattgaaggaggagagggggtatctggaagaagctttcgttgagttgccttgcgtattacaggtatttccatcgaatgccaacttctttctggcacgtgtgaccgatgctgtgaaaatttataattatctggtgggagagggtattattgtacgtaatcgaaattccatatcattgtgtggcaactgccttcgtgtgactgtaggtacacgggctgagaatgccaaactgattggatcgctgaaaaaatatcaataggaaaaatgaaaaagaaagtactgtttattgaccgtgatggcacgcttgtcattgagccgcctgtcgactatcagctcgattcactggagaagcttgaattctatcctaaagttttccgcaatttgggctttattcgcagtaaacttgattttgagtttgtcatggtgaccaatcaggatggtttgggcacctcttctttcccggaagaaactttttggccggcgcacaatctgatgttgaaaactctggccggagaaggtattacgttcgatgatatcctgatagatcgcagtatgcccgaagattgtgcttctacgaggaagccgcgtacaggaatgttgactaagtatatttccaatccggaatatgatctggagggcagctttgtcattggagatcgtccgacagatgtagaattggccaaaaatataggttgccgtgccatttaccttcaggaatccattgatttgctgaaagaaaagggactggaaacttattgtgctcttgccactactgattgggatcgggtggctgagttcctttttgcaggagagtggaaagcagaaatacacaggacaacgaaagaaaccgatatcctggtagctctcaatctggatggtaagggtacttgtgacatttctaccgggttaggtttctttgaccatatgcttgagcagattggtaaacattccggtatggatttaacgatccgggtgaagggggacctcgaggtagacgaacatcataccatcgaagatacggctatcgcattgggtgagtgtatctatcaggcgctgggtagtaaaagaggaattgaacgttacggttatgctttgcccatggatgattgcctttgccgggtatgcctggatttcggaggacgtccgtggttggtatgggatgccgagtttaagcgtgaaaagataggagaaatgcctaccgagatgtttttacacttttttaagtctctgagtgatgcagccaagatgaacctcaatattaaggctgaggggcagaatgagcatcacaagatagagggaatattcaaagcgctggcccgtgcgttgaagatggcgttgaagagggatatctatcatttcgaattgccgtccagtaaaggagttttgtaacgattcactttttaccaaataaatttatccctccaactataattcgataagtgtttattataggttggagggataatctgtaaatcacctaaaaagtttttatagccgtttctttttgaatactcataaaagtgatttctatttctcttttacaaaagagccgggatatgtacatacattcagttttgccatatttcctttttcccgaagccaagtatcgaattcacgtttaccttctttcaatacgatgatacgactacctggtgttttatctccgtaagtattttttccgcccgaagctcgtccatatcctaaagcgatgttatagagagtagcgatgtaatcgtttacgtggtcgtgtccggcaaaaacacccataacatcaccgcattccagcatattggcaaacataccgctgtttatatggggactgcattctttttcgttacggtctccgtaacgtttggtttcgaacgattcccatgcttgggtgtactccggtagcggaatatggaggaaggtcaatgcaggtaatggttgtccctcattccgttctgtgtacttccggctttcgcgagagtaccagtctatttgagatcgtccgatccagtcatatccttttactgtttttatcttcgaataagcatttgtgtccaggcaataaagcaatgcggctgttttatttccgtctttcgaactgtaaatagggagaatatggttaccttctccttttattccttctgccacttgtttcatcatacaatacggttgttcccggatgatacgaatgatttcatcacgctttacggcatattcgtcatcatgatttcccaatacggctgtccaagggatccggcgggccgacagttcggcagatatggcttcccaagcttgccggacttcatccatagtagtattgtctcctgtaaatatcacgaggtcaggcttttcagaatcaagtacttctttgatcatatctcccactattcggtctttctcctgatcatgtcccaagtgcatatcggtaaattgtgctatcttaaattcaccattggaattaaagctgattttatcgggagcttgttgcgcttggataaagaagccggatagcaataatacgctgcttaaaataatctttttcattataaatatgggttaagagtatatattttattctatgattttttttgccaccaggtagcttggtttattttgtcatttcctgcaccgaattggcgtgtaatagccgtttctacgttagcaccgttgttatcatattctccttgcggatacatccatcgtttggggatttctgttccggctgggcgacggaagtccgggtagccggtacgtagttgttcgtaaaaggaatcccagttgccttggtagaatgtaaccaggtatttctgcatgataatgcgttctatctgctcttcagtacccgatgcttgggtgaagtcgaccaatggttctttcagatattgggccactgcgttctcgttcagatagccggcataatcttttgcatgggtttcgtagaaagagaatgaggcgcggatacctttctcgtaatacgtttgtgcattgccactgatccatccccgtacaacagcttcagcaagaatttgttgtaattcggcatatcccatcagcatggtgggctctacaatcggatctgtacggaaacggtcgttgatgggcgatatggtaccctcactaactttgataatagcatcgctataaggggcggcagggtctcctccttcgtaagagctgaagtcgtcgataggttttccttcagtctttcctttgttggtctgtgcgctgaagatgaacaagcgtgggtcccgacgtgcgcgcatacgttggataaatgtatcatccatataatagccggaccattgggcattgaattgaggatatcggttgccctgctgatccaggtaaaccaactgtccattgtctgccaggctattcatcaacgggctgtttgtcgcaatgtttttaaactcagaagcgatatttatattccctactgttgtatgattggagagggtcatcagcactttcagacgaaaagagttgatcagtttcctccactgggtgctatttccgttatagatgatgtctccgtcaatgacagatgcgtcatttgccagtatttcgtctgcttctctcaattcttggaggattcctgcaaaaacatcctcttgtgcatcatattcgggagtgtatatttcttctttttctcctttcaaggcctgactgtaggggatgtctccgaaacggagagtcagttcatagaagtagtaggcgcggaagaacttagtgagtgccgtatacaccggagcatttacacgttctgcctcttcacccatcttttgtacattgcggagattgtcatagtagccaaaacttccgcgggtccatttgtaatattgatctgcactctctccgtcggcttgaattacttttttggtagcatacattccgtcagtccctcttttaaaagcattcatgcagatttgggtaagcaggagtttggggtgggtctgggtggcattgtccggatcaatgttcatctcttccagatttccacaggaaacgcacatccacacagatacgatgagtaatattatctttttcattttataatttcttattagtttcttattcgtttagaattttatgttgacgcccatgccgatatagcgtgcggttggatcgttggcacctccgtcgttgctgtctccggtgtagtccggatcgacaaaggggacttttttccagacagctaggttgttgccaaacactgtagctgtaagtcctttcacggggctttgtttcgaaagtagtttggtgaagttgtaagtcagtgccactcggcggagcttaatgtagctacggtcgaatacattggcaaatttggcattttctttcgaagatacataagcttgataaggatagttctggcaccattgttgccaatcgaccgctgtcgtgttacgtttgtaggtgcgtgtgtcagagattacattaccgtcgatgtcacgtttcagctctcctccggttacgactaccccattgggtacatatatcgggtgtccgacggcatattgtgcatccctgtactccactgattccggatgctttcctccccaccataacttttcgctcaatacagaatagattactcctttataagcgccgtccagatcgacagacagtgtgaagtctttgtagcggaaagtattttgcatacccattcggaagttcggatccagatgtcccagatattgtttatatgcgtctttggtaggcataccgttttcatccagaatcaattctccatcagcacttttctgccattgtgaaccgtaaaatgcatcggcacggtcgcccactttcaggtcaccgaactttttctgtccgccatatatttccgtcagtttttttacactcttactccagttcaaggagaaatcccattgaaaatctttatttttgatagcctgtacattggccatgatttcccatccgttggtggtatattggttaccgttcactttacggctggtgaaacccgatgcattcgaaatattcaggtcgataatctggttttcatcgatcgtatgataataagtcaggtcgaaagataaccggttacggaagaatgcagttgacaatccggcttcccaggatgtcgttttctgaggtttaatgtagtagttgaccagagaagaagggtaggaaatagatggattcgaaccgtaattggaatcttttgtataagtggacatgatctggtagggagacaggtcggtagagacaaccgcccatgaaccatacattttgagatagtccataaatgttggcaatttgatgtattcggataccatagtactcagtgcgacagaaggatagaagtaagagttactgccttttgccagagtagatgaccagtcattacgtcctgtcaacgtcagataggcatatttgtaaagatcaaggttgattgatccataaatactacggattgatttttcatttcggttggcatcggtaatggaaggaccttgtgtgtttttgatactgtatacgaatggaacaatcaaaccgtcggtagactgatattcctgacggtaattacggtagaataccgaagttccggcattcagggtgaagaggatatccggagtcagatcttgagtgtaggtagccagtacatcagcgtctacattagtttgacggtcattccatactttgtagtcaccttcccgggagtcaccgtagttcatgtaagttttgggtactttcatttcctgaagaattgttttctggcgtaaggcggcacgtccctgtatgttcaggttagggaggatttgataattcaggcggagttgcccgttcaccacatcccgactttcggattgctggagctcttcggctgcaaagtaaggattattataccatgcataattgtaacttgcctgccgatacccttcctgcccgggaacgtatttgtgtttttggagttctttaccgttcacatcgtctcccatccatacaacgatggtgtacatgtggtttttaggtccgtatccgtagcgcggataactcggggcaactattttgttgtaggccagattggcatccagctgcaagtttttagccagatcaaaggtagagttgaagttgatacctccactgtgcatttcagtagaaggcacctgtcctttttggtaagcatattgtccggtgacgaagtagcgtgctttttctcctttataagctattgagatattattgttggttactagtccggtttgcagaaagtctttcaggttgtcatgggatacccagtcgataggtacacgttcatagcgcgatttgtcatcatactgagtaccttttacatctccccaccagggaatctcttttccagtcactttatccctgatcgggctgttccactgagctactttggttcctacatttaatttgggtccccaagtcatgtcaccgtccgaaatgccgccatctgcaccatcccagaattcatatttaccatttgaaccgctaccgtattgatgttgtgtctcgggaagcactgcaaagccggctgtgatcatgttgttggtagagaagttgatttccaagccttcttttttggccgttttactggtgatcagaattgctccgtttttcccgcgtgaaccgtataaagctgaggctgccgtaccttttagtacattgacactttcaatattctcacttgagatgtcgaaaaagtcggtttctaccggaactccgtccagtacaaccaatggtgcgttgccgcgcagtttgaaactcggtgcctggaaaataccggtagggttggctaccaacagaccggctacttgtccggaaagggccgagcccacattcagattgggagtggcattcaatacctcactgttgatttgttgggttgtgtaaccgatcttcttcttttgctgcttgataccgattgcagtgaccactacctcgtcgatggcctgaatgtcatcggacagttcaacattgattacagtgttgttacctacctctttctctactgtgctgtaacctacgaaagagaatagtagtgttgcgtttttaggaacttcgatgctgtaacgaccatctatatcggtgacagttccgtttgatgagtttttcaccatgatagtggcaccaattactgcccccattttgtctgtgactgtacctgttactttgactgattgtgcgaatgcaagtgatgtgcacaataacatactacagagtagcaggagaaatttactgttcataagtactaatcattgagtgtttagtcatggcgagtgcgggggcaaaagttttcttttgcccaagacttgccattaatattaatttacctattgaaaaaaagaattttagatttctgtcagttttacattttgaaatacggagagaaggtcggttgcatttttgcgatttatctgtaaagcgtcttcaaatgattcgctttcggaatcataggcagaaatcgctactttcagtacatttgtgaactctgcagctacttgctctctggtcatttggttgcttttgagctctttgttcagctgtttctcgatggagcgtactgcgttgtagatagtgggtttgcgaattacggtacggcgggtagggtctccgggaaccacttcttccctgactacatagatcttcatgaattggttatagagataaccggcttcttgcccgaatttgtagttacccgcattagccagtgcatcggcagaaggttgtttgatggtggagtagaactcccatgtctttttgacgacagaattgagttctgttttgttcttattgtcggatttatcatcgtccggcaatgaattgactgcatttaaggcaacactggatgccaataaagcaaatgctaaaataagatgtcttttcataactttacctctttttaatatggtgctgcaaagatcgcagtgtcatgttaaaaagaggtatcgtctttgttacaattcggctatttctttcagccatgcagccgaactggcatcacttggcatgcgccagtctcctctggggctgatggatatacttcctactttcggtccgtccggcaggcaagagcgtttaaactgctggttaaagaagcggcggaagaaagtttgcagccattttttgattgtttcatcatcataaactccactgaatgcagtttgtgccaggaagtagatttttgacgggcggaagccgaaccgtaagaaataatacaggaagaagtcgtgtagttcgtaaggaccgacgaggtcttccgttttttgtttgatttctccgttttcatctgccggtatcagttccggactgataggagtgtccacaatatccagcagagttgctttggatgtttcatccataccgttttcggctacccactgtactaagtgtttcaccagtgtcttgggaatacctgcgttgacaccatacatcgacatatgatctccgttgtacgttgcccatcccaatgcgagttccgacaggtctccggttccgatcaccataccccatgtttggttggctatatccattaagatttgggtacgttcgcgtgcctgtgaattctcgtatgttacatcgtgtatattgagatcgtgtccgatatctttaaagtgttggatacatgcttccctgatactgatttcccgtattgaaactcccaaggaattcatcaggtcgatggcattgtgataagtgcggtcggttgttccgaatcccggcatggttatacccagaatatctttgcgagataatcccaatttatcgaatgtcttgacgcataccaataaggcgagtgttgagtcaagtcctccggaaatacctattacggctgtttttgctccggtatgtagcagacgttgtgccagtccggctatttgaatcgagaagatctcctcacagcgactgttgagttcgcttccttgcggaacaaaaggatgtggattgaatgtacgggttaggttcagatctttactgttgacaaactctgtagaaattctgatagcctctttacccggacaattagccttgttggcagcaaaagttgtgttgacccgacgctctgcacggatacattccacatcaatttcattgataatcaactgttcctccaagcagaaacgttcacttcgtgccagtagatatccgttttcgtaaataagtccgtttccggcaaaaacaacatctgttgtcgattcaccgaagccactcgacgaaaaaacataaccggagatgcagcgtgcagattgctggctgatcagagagcaaagataattgtgtttaccaataccttcgtcatcggcggaaaggttaaagatgatttcagccccttgcagtgcgagtgaggaactgggcggaacggtagcccaaaggtcctcacagatttctatgccgaaagttgtttccgcagtttcgaacaacagattgttgcccatcgggacaatctgtccgcaaagccgcacactgttttccgagacttgtagggcggatgtaaaccaacgttgctcgtagaactctttataattaggcaggtaagttttgggcactactcccagtattttgcctttctggataactactgcagcattaattactgtggagttgactactaccggcatgcccagtatggaaatgatgtccagttggcgggtactgtttagaatctgtatcaaagccatttctgcctgttcaagcaaaagttgctgggcgaacaagtctccacaagtatatccggtaatgcacatttcgggaaaagtgagaatctgtactcctttaccttcggctatggtaataagaccctccaatctttcagaattaaatttgcaatctgctacttttacgcggggaacggccgccgcaacttttacgaatccgtagttcattttctattagagtttatcatttcttgttgcaaaagtagacattttaatcgaatctttgtatttttgtcaaaattgaattgatacattatattattaaatcgcacaaaaacatgaagaagatgtttatggctgccggaatggccgccgtgatgactgcttgcggcacagccggacagaaagcagccaccgatgccggaaacccttttctggcagagtattcaactcctttcggtgttccaccgttcgacttgattaaagtagagcattacaaagaagctttcctgaaaggaatggaagaacagaaaaaagaaatagatgctattgtcaatcagcgttcggttcccgatttcgataataccatcgctgcattcgatcagagtggagagttgttaaataaggtgagtactgtgtttagtggtctgaacagttgtaacacgaacgatgaaatgcaggcttttaataaagagattactccgttgctttcggcacatcgggacgatattagtctgaatccggctctttttgcccgtgtgaaagaagtttatgaacgtcgggagaaactgggattggataaggagcagaataagttactggaagaaacttacaagaagtttgttcgtggaggtgccaatcttgattctgtggatcaggcgaagttgcgtcaactcaatagtgagatttcgatgttgcaattgacttttggacagaacctgctgaaagaaaccaacgcttttgagttggtgattgataagaaggaagatctcgccggattacccgaaagtcttgtggcatccgcagccgaagcggctaaaggggcaggtatggaagagaagtggcttttcactttgcacaatccgagtgtaatgcccttcttgcaatatgcagataatcgcgagttacgtgaaaaaatctttaaaggatacatcaatcgcggcaacaatggcaatgaggccgataataatgaaatcgtgaaaaaattggttgctttgcgtctggagaaagccaaattgatgggatatgccgattatgcttctttcattttggaagaccgcatggcaaagaacgaggaaaatgtatatcgtttgctgaatcagatctggactcctgcagtggcgaaagccaaggaggaattgtctgatattcagtctgaaataaagaaggaaggcgctaactttacccccgaaggatgggattggcgctattattttgagaaagcgaagaaagccaagttcagtttagacgagaatgaagtgcgtccttatcttgaattgaataatgtgcgtgaaggtgctttctatgtagctaacagactttatggcattactttcaccgaaattaaagacattccgaaaccgcatgaagaggcacaggcttttgagtgtaaagataaagacggaacccatcttggtgtgctgtatatggactttttccctcgtaatagtaagcggggaggcgcatggtgcggaacttatcgttctcaaacctatcgtgacggtaaacgtttggcgccggtagttacgattgtgtgtaactttaccaagccttcttcgggacagcctgccctgcttagtgccgatgaggccggtactttattccatgaatttggtcatgcactccacaatttgtttaaagatgtacactttcatgccgtatccggtgtaccgcgtgattttgtggaattaccttctcaggttatggagcattgggtattcgaaccggaggtgctgaaaatatatgccaaacattatcggaccggtgaagtgattcctgctgcattgattgagaaactcgataagagtggaaagtatggccaggggtttgccacaaccgaatatcttgccgcttctctgcttgatatggattaccatgtactgaaagagattccccggaatatggatgtcactgaatttgaggctgctgtgctgaaagagcgtggcttgctaagtcagatacctcctcgttatcgtactacatacttcaatcacatcatgaacagcggctatacggctggttattacagttatatttgggccgaagtgttagatagcgatgcttttgaagcatataaggaaaccggtgatctgtttaatcaggaagtggcttcccgtttccgtcgttatattctcactcccggaggcatcgacgatgcgatggatatgtataagaactttcggggtaaagaaccgggcatagaacctttgttgaggaataggggactatagatcggcttgtatagggctttggcactatgttgttgggtgaaaggctagctctttttttattttttgctaaaaataaatgcggaaaatataaaaaatataaatagtagttagtatatttgtggcagtttataggaataaacacaaaataccaacaattattaactattaaaagatttgaaagatgaaagagtacattgatgttttaaagaagtggaaagatttcgacggtagagccagaagacgtgaatactggatgtttgtcttgttcatggctatttttgctattgtcgcaagtattattgatgctattttgggtacgatttgtgtatttgtaggtctttattatttggctatgcttctgcctatgattgctgttagtatacgtcgtatgcacgatatcggtaaaagcggatggtggttgtttatcactttcgtaccggtgatcggcagcctttggtatctcttcctgactattcaggacggacagccgggtagcaaccaatacggtgaaaaccctaaaggaatttaatacgtacatattattgtcataagaaacggcatacgaaagcaattttgtatgccgtttttctgtttaatcaaaaaatattcgtattttgtttgcgaaaataaaagaactctttatctttgcatcagatttaaaattgtaatgaatacaattttggaaaggagaaagaaaatggaatcatacaaccgattactagagcacaacatcaaaccgtccatgcagcgaattgctatcatgaattatttgatggaacataagacacacccatcggctgatgaaatatatacggagttatctccctctatgccaacactttcaaagactacagtctataataccttgaggctgttttctgagcagggagcggcacaaatgcttactattgacgagcggaacaccaattttgatgcggacacttcacaacatgcccattttctgtgcaagcgttgcgggcgtatttatgatttgaaatgccaggttgagatgaaacaagtggaaggtcttcaaatggatggacatgaagtaagcgaagtgcactactattataaaggtgtttgtaagaaatgtttaaataatatacgtattgactaattaatttaaaattaagacgaaatgaaaaagtttagatgtactgtctgcggttatgtttatgaaggtgacgcagctcctgagaaatgtcctttgtgtaaagctcctgcaagcaaattcgtagaagttgttgaagaagaaggtggtgcactcacttttgttgacgaacacgtaatcggtgtagctaaaggttgtgacgaagaaatgattaaagacctgaacaatcacttcatgggcgaatgtactgaagttggtatgtatttggctatgagccgtcaggccgatcgcgaaggctatcctgaagtagctgaagctttcaaacgttatgcttgggaagaagcagaacatgcttctaagtttgctgaactgttgggtgattgcgtatgggatactaaaacaaaccttgaaaagagaatgaatgctgaagccggtgcttgcgaagacaaaaaacgtatcgctacacgtgctaaagctttgaatctggatgctatccacgataccgtacacgaaatgtgtaaagacgaagctcgtcatggtaaaggtttcgaaggactttataaccgctatttcggtaagaaataatctacgtaaatgatttatagagaaaggcttgtgtccggtttgggatacaggccttttttgttaaattttcttttgaaataaagatgttgactgatgattcttttatatttgtgctttactaaaaaagatacataattatgaaaaagttacagtttttagtgtgtttcctgcttttgtcggtggcaagttatgctgccgagcgaacgattcagttacctaagcccgacatgaatcgtgccggactgctaatgaaagcgttatccgaacgtcattctactcgtgaatatgcttcgaaggctttgagtaataccgatttatccgatttactctgggctgccaatggcattaaccggtcatctgaaggcaaacgtacagctccgtcagccatgaatcgtcaggatatcgacatatatgtggtgcttccgcaaggaacttacctatatgatgctaaagggcataagctcaatctgatttctgagggagatcaccgttctgcggttgctggcggtcaggcctttgtcaacaatgcgccggtatcgttggtgctggtcagtgatctgtctaagctgggtgatgcgaagagtaatcatgttcaattgatgggagctatggatgcagggattgtttcgcaaaacatctcgttgttctgttcggctgcacgtctggccacagtcccgcgtgcatcgatggatctggcacggctcaaaactgctttgaaattaaaggatactcaaatgccgatgatgaatcatccggttggatattttaaatgatgtgtcttggcagatgttctgccaatctcgttaacagtgttaatttatcaggagatacttgattttcttagtaccaaaagacttgatctttgttaccaaataactaatgttttgtggttaaaagactaactttaacattatgttaattctaagcttttaatagcaaaatataaaagaaacaaactggtgaatattagatggttgggtaaacacatcagataggcaaagcttttatgtcccgatcttagatgtagggaataattgttttattgataacttgatattcgttcggagtgaagatagtgaagacggcagcatataaaaagggcatggttccgttgagaaaaccatgccttttttattattgaatttattcagtcctatttctgtttcaacaggaactcgtcgattgcttttttataagtggctttatctgctgctccacgaaacagttggggttcgccctccattgggataaatacaaagaggggaatacttgttgcattgaatagtgcagccagttccttttctttatccacgttcaccttatatattacgatttttccgtcatattctttagcaagcgatttcataatcggggctgtcatgcggcagggaccgcaccaatctgcatacaggtcgataatggcaggtttatcacctttatatttccactcttttgaattctggtaatcaaagacatcgttgataaacatctctttattcatcacgataacctcaccgctctttgcctcttttttgttttgatctgctttgactccatcgtttacagcaaacataatggtgctgatcatggccaaagctactaatgataatactttcttcattctttgtttttatgtgtattgttcaataactcctttcagttcgctggcttgaatcataccggaatggcgccagacagcttctccctttttgaaaaggataaaagtcggcacagcctgaattctgtattttacagctagttcttcgtgtgtgtccacatcgatttttacaatacgggctttctcgcctacctgctgtttcagatcctcaagaatcggtttcattgctttacaggggccgcaccattctgcgaaaaaatctactaaaacgggactttgtgactgtattaaatcttcaaatttttccataatttttcctttcttttgataaatatagagccctcgtttacagggggcaaatatagttatttgttttattataataacagagaagtcccgattttgttcatcatatagtaaccttacattcatcctcctgtaatccggaaacgggatctttgcgtaacgaaaaaaacaaaagttatgcatttacggacgtattatcccacagtagttctctcggatattcatctgggaactcaacactccaagacagaggaagtcactcacttcctgaaatcaataaattgtgatcgcttaattctgaatggtgatatcattgacggatggcatttgcagaaaagcggtttgggtaaatggaaagctaaacatacggatttcttcaaagtaataatgaagatgatggagaatttcgggacacaagtgatttatgttcgtggtaatcatgatgattttctagataatctggcccctctgaatttttataatatccggattgtgaaagactgtatctacgaaagccacggcagacgttattatgtgacacatggagatatttttgatacggtgactactcaaatgaaatggctggctaagttgggcgacacaggatatacttttctgttatggttgaataaggtatacaatctccgcagaacgaagcagggaaaaccttattattccctttcccagtctattaagaatagggtaaagactgccgtttcttatatttctgattttgaaaaagagcttgttggcctggcaagggctaaaaagtgtgatggcgtgatatgcggtcatattcaccatcctgccaatactttttatgaagatatccattatctgaattcaggcgactgggtagaaacactttcggctcttactgaagatgaagatggtaactggactatccgctattttgatagtggattactaaaggaagataatcataaggaaaaacaaactatatccataacaatagcatcatgaaatttctgtttattgtgcaaggagaggggagagggcatttcacccaggccattacccttgaagacatgttattacgtaacgggcaccaggtagtggaggttcttgtcggcaaaagttcgtcacgtaccttgcctggctttttcaaccggagtatccaggcaccggtaaagcgtttcaccagtccgaattttttgcctacagccgaaaataaacgggctgatctgaaaaagagttttgcatacaatctgatacacgtaccggaatattttcgcagtatgtgttatatcaatcagcgcattaaggaaacaggggcggaagttgtgatcaacttctacgaacttctgaccggacttacctacgcactcttccgtccctccgttccttatgtttgcatcggacaccaatatctgtttttgcacaaccactttgagtttccccgaaaaagtgtgattcaactctccatgttgcgctttttcacacggatgacgagtctgcgcgctagcaggcggttggcactctcttttcgtaaaatggaatcggaccggactgaacggatatccgttgttcctcctctgcttcgcagggaagcgaccgctatgcagccggaacagggtaactacattcacggatatatggttaactcaggttttgcagatagtgtagaggctttccatgccttgcatcctgaaattcctgtgcactttttctgggataaacaggatgctgacgaggtgactaaagtggatgccacactgagttttcatcagattgatgatgtgaaatttcttaatagaatggccggttgcagagcatatgccagtacggccggttttgagtctatctgtgaagcgatgtatctgggcaaacctgtactgatggttcctgctcatattgagcaggattgcaatgcttatgatgcccggcaggccggtgccggaattattggagaatctttcgatttggagtcgttgcttcgttttgccggaacgtatgttcccaaccgggaatttattcgttgggttcgtagctgtgaacgacagatcattggagaacttgaacgacttgctgatcagcattcggctgtcactgtacctacattaactaattattttccgatatgaaattgaataagactgattatatgcttgagcgcacatccgatggcggttattatgcttggcttactgtaaatatgcagtgtaatgcgtatggggattcacccgaagaagcggtaaaaaacctggaacagaccatggaagacctggttgaagaaatgtatttggtagaggattttatataggacaagagtttatagcatatcagatgctgaaactgagaaaaaacttcattgataataaaaagagacagggtacgccgtttgaacggaagtgtaccctgtctttttattattcttctacaatatccagctccttgatgatgtgtgaggcacctgcatacttatcaataataaatagagtatagcggatgtctactactgcggcacgttgtgaagaaggccggaaagcaatgtctcctgtcaggccttcataattacgatcgaatccggtcccgatcaattgcccttttccattgaataccgggcttccggaatttcctcctgtattgtctgtattgacaatgaagcaaacaggcatttctccgttttccatcgcgtaatgtccgaagtcttttgcatgatacagttgttttagtttttgaggcactacgaactcccaattatccggatcttctttttgcattacccctttcagtgttgtatagtaattgtatactgtcccgtcggcgggctcgtacggcaatacctgaccataagttaacctcagggttgagtttgcatccggatagataggcgtaccggcagcttgacgcatatccatcataccttttacccatactttatgagctgcatcatagttcttattggcatccttcatggcgagtgccgttttcaacagtccgtccgtgatggaatatttaaagaggaccatccagtctttatccagtttgttaagagtggggtgagcgataaacttgttgaagttctctttcgaaccaaagatcgagtacttgaagcaagcatcgataaaggcatccttgttccctttaaaacggctgtctattactttgaaaataccgatttgctgatcttccggaatatatccggcataggtttccagcattttctttcctacgagtcgttctacttccggaaacggaacagatgcgaaatatttatctgcttctgctttcagcttatcggtttcttctttaatctttgtggcatttttgctttcaagtgcttttttcaatccgtcggttgaaggaattttcatgaaatcgagtgccgttaccaatgcttcgctgatggcttgctgatgatacatggcatcatgacgatgcgccacaatcgagcgtatctcatcaaaagccttttgataagagtcatcgcctttctcacgtcccattgccaacagttgttcttgttgcttttctttggtatccaacactttcagtcggaccaaaccttcgttcataccgatggcatttttccagtaattagcggaggaagcatatttgcttgcataatgtatgcgtactgccggatctttcagcatttgatccatcagtacggcctgccgtgcctcacgtacgtggtggcgcatgaagttggttgtttgcattcgttctttcacttcgtcggaaatcatgtagcgccagttgcgtccgggaaatcccatgacaaatgtaaaatcaccttctttaactcctgccaggctgattgtcaaatgtttctttacttgtaaaggaacattgtctttagagtattcagccggctgaccgttcttgtctgcataaatgcggaataaagaaaagtctcctgtgtggcgtggccacatccagttgtcggtatcagctccaaatttgccgatcgaagaaggaggggcacctaccatgcgaatgtcattgtagactgtctttacaaatagatagtatttgttgcctccgtaaaatggtttcagctccaaacgtgttgccggagtgatttggatattttctgcttttgcaaaccggtcggcaaccgttgccagatatttgggagacaaataattgatgccgttgggatcgtcatcttttttaagttgctcgtttacataggttgtcacgtccaggatacggtcgatgaaggttactgtcaaccctttgcagggtaactcttcgttccggttcattgcccagaatccatttgtcagataatcgtgatctacactgctatgttgttgaattgctccatatccgcagtggtgattagtcaataccaatccctccgccgagatgatttcaccggtacatccgcctccgaaatgtacaacagcatcttttaaagctattccatccggattgtagacttcctctatagggatttgtaacccgagatccatcatggcagcttcattctgtgctttcaggtcagtcagcatccacattccttcgtcagcactgacggccaatgccatcagtgcaaacgcagcagataataagtttcttttcatcattattcaacaatcgtcatttcgttaatcaaatgtccgcatcctcccagcttttcgagaataaagagtacataacggatgtccaggttgatacagcgttgcaggttattatcgaaattgatgtcaccgctcagtgattcccagttaccatcgaatgcacaaccgatcaattcgccgttttcgttcagtaccggacttccggagttaccgcctgtgatgtcattggtagacaggaaacaaaccggcatttcaccattgggcaatgcatagcgtccgaaatcttttttctcgatcaactctttcagtttggcaggtactacgaattcacggtcttccggattttctttttcaaggattccgtcggttgttgtgtagtatttgtaatatacaccatctttcgggctgtatggtttcacattgccataggtcaggcggatagtgaaattggcatccggataagatggtacaggcaatttcatttcacctagtccacggatatatgttttgtgtaataaagccagttcttccggcaattttcccatttgctcggccagattggtgtatttgtcaaacttggcacgtgaatattgagtggctatatctttttcgattgcttttacagtcggttttttgatgaatttatcaaagtttgcctgattggccaaaattgaagtatcgtacattgcatctacgtaggcattgtagtcgcctttgtactctttctcaatcacatcgtagatggcaggacgctgtccggcaggaatcatttctgcgtatagtggcaacagggctttggccactttacggtctacttcgtgatcatagtctttattatggatgtcgttgaatacctctttcagcactttgatgttagcttcaatacttgaatcgtttttctgttccaatgcttctttcagtttgtccattaccataaatgggctaccgaattcaataccgccgaagaatgtttccgtcagacaggtctgttgatatttgattggagaagttttagctacagcctcgtcgatctttgccactacattcatgtagtcggtattatttttttctttggcaaacttagcgaatttagcttcctgttctgcttttgttcccaaaacattgttatcgatgatagctttgttcatgccgatggagttcttccaatagttgcttgaacctgcatatttattggcatattgaatacgtactttatcgctggcattcatcgcttctttcaacacgtcctgacgggttccgcggatacggatacggggggcattgcttgcctccatgcgttctttcacttccgagacggtgagataacggctggtgcttcccgggaatcccataatcatggcataatctccctctttcagccctttgatagagatgttcaggtgttttttggttttcagggggacattggaagcactgtattctgccggttcgccattcgcgtcggcatagatacggaacattgaaaagtcaccggtatggcgtggccacatccagttgtctgtttcaccaccgaacttaccgattgatgaaggaggagcggcaaccatacgtacgtccggatataccttcttataaaacatatagaatttatttccggcgtaaaaaggcaaagcttgaggaacgattcctttttttcctttcaagtcgctcttttcaaacaactccttagccagtttattaagaaatgtactgctgaatgattctgattcagtgatttctttagcggcaattcttaaatttacaatatccgtaatgtcttctatgcgttcgataaatgtaaatttcagtcctggagtcggcaattctttgtctcttgaagttgcccaaaatccatctgtcagataatcatgctctacagagctatgttgttggatggaagcgtatccgcagtggtggttggttaatatcaatccttccggtgaaataatctcgccggtacatcctcccccgaagatacctacggcatctttcagtgagactccgttaggattatacaaatcctgtgcctcgagtttcagtccctgttttttcatcatatcgatagagtgttgctgctgcattaattgcagtaaccacataccctcgtccgcctttgcggaacaaacggccagcgcagtcagcgccagtaagtaaagtttgagtctgttcattagtttataaaaaaattagaatgattcgttgttttactattttaatctatgatcaatttgttttctttgatagcgtccatcacattggccggcggccgctggttcatcaattcgtttttcatgaaatccatataaggagccacatgcttgaaaaattgatgatatcctttgcacagatagtttagtcccggttcaccatttgctgtgcgacaaaaacgatttttggggcattcaccattgcaggcaaataaaaattcgcactctttacactgggtgggaagtgacttttgtttcatttgtccgaaagcagtctggcgttcactatacatcatctctaccaaagtttgattgtaaatgttgcccagtttgaattccggaaacacgaaatggtcacatgagtagacgtctccgttgaattccattacgccggcgtgtccgcatgtttttgccatggagcatactcccggttgttcgcctacccagttggcaagggtagaatcgaagagttggatataatagtcgcctacatcttctttcacccattcatcgaagagtgtacagagaaagtttccccattgctccggtgttacggaaaattctgccagttctcctccttcgcgctgtgccagtgaggccagatgacgtccgtcctgatgcgggaagatccgttccacaatgggagcgaactgaatataatggcaacctaattctttgaaaaagtgataaaagtccaacggataatcagcattaaagtcatttactaccgccatggcattccattctactccatgctttttcaaaagattgatgccattcatgactttcacaaacgagggtttgccaagcttgtttttccggtattcatcatgaaactcttgaggaccgtctatcgagactcctaccagccagttgttttcacgaaaaaactcacaccactcgtcggtcaacagggttccgttagtctgtatgcagttgtctatgcttcttccacgggcatatttcttctgcaactccattgcttttttgtagaaagagggtggacgcatcaatgtctctcctccgtgccaggtgaagagtacttgcggcatggtttgcgaattgatgtattgctcgataaacttttcaagcagttcatcgctcatcacatgtttgggattttcttgataaagccgggacttttccagataataacaataatcacatgcaaggttgcatacagcccctacgggcttgagcattacgtatagcggcttggcaaagggtgcgtaggtagacatttctataatatacggttacaattttacggattaacggattgacggcttcaataactcattgactatttgtcaactccgaaagtgcaaatttaggtaaagtaaatgaaaaatccgtccttatgtagatgtttataaggattattaaagaaaagagtcttacaagttttaaatattgataaaatgtttcatttgcatacgaatccgttgtacctttgtcgtcgaaaaagttgtgtatcctatgaataaagtattgccttttttacttttgctttttgtttttacctcttgtagtcgcaagtataagattgaaggcgcctcttctgtaaccagtctggacggtaaaatgctttttattaaagtgcttcagaatggcgagtggctcaatattgattctgccgaagtggtgcatggactattttcgatgaaaggtaaagtcgattcggtagtaatggctacactctatatcggtgacgaaagcatcatgcctttagtgattgaaaaaggtaatattcaggtttcaattacaaatacagaattggtagcaaaaggaaccgctctgaacaatgccctctacgcttttattgataaaaagaattcattggatgttcagatagaagaattgcaacgtaaagaagcccgcatggtgatggatggtgccgacttggctgatattcatgagcaattgactcacgagggcgattcgttaatgcaagatatgaatggctttatcaaaaaatttatctcagataactacgaaacagttttaggtccaagtgtatttatgatgctttgcagtacactaccttatcctgttatgactccccaaatagaggacatcatgaaagatgctccttattcgtttaagaataacaaattagtgaaggattttattacaaaagcgaaatcgaatatggagctgattgaagagcatcagcgcatggaacaaaatgcgaccttgaaccattagctaataagtttttttcgtatttttgcgaaaaaacttaatgaaaatgaacacgcactcactatttggttacctttttattgctttatttagtcttttagttgtatcatgttattcgacgccggatggagtcatgtcatctctgtctcaagctgagaaaataatggaatctcgcccggatagtgcaatggctattttgcaacatatcccaactccggaaactcttcatggtaaagcgcaggcggactatagcctattgatgacacaggctatggataaaaactacataaattttacttcagattcgctgattaaatttgctgttggttattatggaggccatactgaagatcttgtagctaaaggaaaatctttttattattatggaagggtgatggaaagccttgataaagtagaggatgcaatgacgttttatttaaaggcgaaagatgtacttcaaagcagtgatcagtttaaattattgggacttgtaacagagaaaattggagatttaaatcgccggcagaaattacttgatgcagctttaaatgattataaagaatcgtttgatttttatgcttcaataccagattctttatgtatgctttatgcgtataggaatttaggtcggggattcttatataagaatcaaatagacagtgcttactattattatgataaagcattatatattttaaaccttaaaaagtattctgctgtaggatcaatacttttagaattaggagtaattcatcgttctgaaaaagattatgttggtgctgagcaatattttttatcttttatagaaaaagaaaaagatccagaaaaattattttcaggttatttagcattgggaaatctgtatttatatatggacagattaaaagatgcagagagatatctcttattatgtcttggaagttctaatctcgttataaagagagatgcttgtgaatgtttatatgatttggagaaagaattgaataattttaaaggtgctatcgggtataaagacatagctgactctttacgaattattactcaagatattgatattcaaaatagcatagcaactttacagagtcggtataatagtgaaaaatggcagagggaaagtctacaatccagtattgagaaaaagaatattcttttaataagttcatttgtgagttttattgcaataatggttattatttatatttattataaatatagaacgaatcagaaactggttaaggatatcaatgaaagaattcgtaaaaatgatgctgacataaagatgtatcaaaggcaaatactcaattatcaggacttacaaagagaaacattgcaggattatcgaaatcagataggagaattgcatgggaaaatgtctgtccttgaagatcagaataaagcattatctcttcgtttaacagagaagaagcatgatataccggaaagtgaagccgatgatctctatgctatttatatgcaagcacttcatatactaataatgttaagagggaaaaatatagagaatacttcaggtaagaaattgcttttggatgccgattgggataagttatttcatctatctaatgctatacatggtgattttattacgcgtattaagaatgattttcctactcttaccaaacatgatattgaaatttgctgtctattaagatttggtattgaacatgaggtcttaggaagtatttttctgacggagactgattcagtgacaaaagctaaaagacgtatgaaaaaacgactgaatctatctgcttcggatgatttggacgtttttttgctaaaatattagtttggcttgaggggaaattgtccgggtaaatatctgttccttattttttatctattgattttaagataattagatgccattaaccctacctgaatttgtccgggtaatttctttggctgtctgaaaaatatgcgctacatttgacgaaaccaaaacaaataaaatatgaaattgcgtgttattttatcgttaattgtggtattgttcattggacagtccatgtgtgctatgtccactcaaattcttcgtagacctattgttttagatggtgaaattatcgaagaaggtaatcgctccatcaatccgttgattcctatttctgcagatattgatggcactactttatttattgaatttacaaaggttataggtaatgtggatattacagtgaaagatgataccaaaaaagaagtttattcatcttctgtggatgtaactgctgctaatcaagctacttcgttctctattgccgatttagcaccgggaacttacctgcttgaatttaccaattcgaatggtggttatgtatatggacaatttattgtagaataaataattttagtttagatgaaaagcatattattttctgtggcgatggaacgtataagcaatcaggcaatcaagaggatatagctcatttactggaagggagatcagctatatgtcggaagtaagtgaacgagagtgggacaattggagatgtttgtttaccaccccttgtgaaaaatggattaatcttacagatgctgagcttccgagttaatatgctgtaggctttacagacaaacctgttaaatctgatgatggatatttttcaatagcaaattactccatgaagataagcaggtatgtgaaaagattctaagagtagtttcatctctatgttagcattcattgatgcaacactggatttggacttgtttttttatatagtactatcatatgtttttagtttaattgtttaatacttaaatggttgttgtgtgcggggtgcgtgatgtatcccgcatactttttattatcttatccttatatatctatattttttctgctgatttatccctgattagtacatagtattcctcattagtcttgtcggtgataattgtatacttactgttgatttcctctaaaattttctttaatttattgattgcgcttgtcatgttattggttggatcactgtttttaggccaaaattcttccttcaattcgtgtttgttcactctgtagttaggcctatttaagaaaaatattaatatcttttgttgttgattaggcattttgatcggacggtcattgaataggacaaagtctttctcaaagacaaattgatccttgaatgataactcctcttttatggtagaattagtctgtttttctgtttctacagtattgtcaactggtgtggggtccgtgataatattgggatctgatgttatatcaactgtagatacagatctgttcttttgctgtttcctatagtatagtacaaatagagtaatggtgtagatgagaatcacttcgactactaaattgatgtagatattggttttaggcattcgcttccacaaagttgagaaactatagtcgatatacattatgtaatctacactaacaatgtcatcttccaagtgatagataattttttctgcattacaaggaatgctactttgaggctgactccatatttctctttgtaggtgtttggagacaataagaccgatattgatatatccttttatatcgtttttatttaaacttttagttattaaattttgtatgtctgcgctttgtaagctatccatcataagtaacccaaattggcgggtgaataatatttcggtatccatatcttgaattttatgctgataggtaaacaaagtatcttttgaacagaaagtacgagtttcgtatgtgcctattttgttgggtgagttattaaaaccatttaaaggtatatatttacacttttggactatgttgttgatgacggtttctttcaggatattttcaatttgtggcttgaatgcttctttttctttttgaataagggagtgagtgattgtataggttgaggcgcctatagcaagcataataaaaagtataatgactccgattactaaaaatattcttttattcatatttgccagatcttgtgttggtgttgcaaagttactttaaaagtttgaatttaccactctatttgttgaattaatgataagaacaattgctatcttattaaaacttaatatattgatatttagacgtcattaaataaaatgacgttatcaataaaagtgttgacgtagaatgtttgcatgcttctgtccgctcgcttatctttgctgatatttattgatatttattaaattattgatgaaatgaaaataaagattttggcagtattagccgttgttacagtagttacagtttctatgtttatgagagaaaaacgagaagatccttcatcattaatgatgatgaatgtagaagcgttggcaacaggggagggcacttcacctgctatgtgttttggttatggttcagtggtttgtcccaatgatggatccaaagtattatattattggtaataagaatcatgaaatactgtctgacatttctctttcttttggtaatctttaccgggtgcacttcagatttgccgaaagatcggatgttgtatgcttcttttcctaaggaggagacactacattctaaggtaattcagcttgattcggtttatatgcgttatccgtttcgggtacatgtgtccggtgatcaggctgttgtcctggatttacatggtactgatgtgtattgccatctttttcattatcctgatttccattatctgtcttcgtttggcaggagaggagattcaccggaagagatgctttcagtagaaacagtgaaatgtatagatggttcattttggactttagatgccaacaaaggcgagttaactaggtttgagtttgtttcggatagagattcgcttctgcgtgcagaagcgatctctttcgataaagacagcattctgcgtgctcttgattttgtggcattcaatgatacgacttttctgatacctgactattcgggagatagccgattctgttgggtgaaccgacaagggaagtttttgaagaaaagtggagtgattccttcattgaacgaagaagcattgaaagaggcgcgtcctgccttagcacaagcttggcgcagttttatagattataatcctcataacggagtgttggttgctgctactcaattaggtgaagttcttgagatttataatcttcaaaacggttttcatagggtctgtttaggtcctaaaggggaaccggaattcaaacttgcgggcgggtatgctattccggatgggatcatgggattctcggatgtgcaggttacgaatgaggctatttatgctgtttttcatggtcacacttttaaagagattatggcacagcaccaaaaagagggaagagctacagatggtggacaatacatttatgttttcaacttacaaggggaacctttatgtaaatataccttagatcgttatatcacaggtttccatgttgatgaaagaaataagactattacagcaacagatgttaataacgaccaacccattgtggagttccgctttggctaaagtcaagtgtaacaggttcgaaaaggagcgggtaaagccaacttgttgatggggaagctattttcccgctcctgacaacctttagaaaaggaggtttaacaggtacaaatataataaaaaactaatggaaaacataaatgaagcatttaggttttctgccggagaaagctggctcttccgagaaaggagacagaaatatacaaaactacattaataaaaacaaacatatatgaaaaagagaacttatgtggcattaagtattgtccttgttattatatctgctggttataacatttatcaaaatcaaaagactgaaacaactttgtctgatttggctttagctaatgtagaggctttggctaatacaggtgaagggggaggtgaaacagttaaatgctactgcaaggcctcagatggtagatatgtctgctcagctcttggtaatcttgcttattgtggagctgacccttgttctaatcatgatggaaattgtcgttaaacaagtggattaataataaactaagattcatatattttttattatatatgaatcttagcctttaaaatgaagttattggtttatattatgaaaaaaatagcattcttgttgcttctttgttctttgtttgcatgtagtcgtcaagcgaagaatgttcctcattctggagagcggctattaaataagagaatatatttggattcggtagttgttgatgccagttataccagtggttggggaaatttttatttagttgactctatcattacatttgctgatacatattattctaagttttatgattataaagctaattctggtgattttgttgcagaacattttagaaaaggtaatggtcctggagaattaaatgaatttatgtttgcttatcctattcgtaataaaaaggatcagtgtttaattgttgataattcaattatgcttcattcttttaaacaacaggattatgaattatttcatcatggccgaattaatttcggttggaatggattatgtaaagattatgactctccgcgagcgtataatataatgtatttaactgactatggggttgatttctattatctaaatgactctattatagcttttcctgtaaatctgatagatcgtttcgtttcggagaaagagatagaatcagatcgttatgataagttgcatatttttggggaattgaacgtaaatactatgatagttgaacgtattacgggaaaaatgcccgagatttatcatgaaaaacctattccgaattttgaatcttttcgttttgcaatgagaggagatactgtatatgtaaatcattatgtagattcattgatttatgtttatttgtatccggatgaacttatttacactatggggtttgaaggtcgagatattgatcgtaattatacgcaaacaacagaactggatgaggggaagacattcatgaaagattataaaactgttggttcaagtgctggattagattatgtacctgaaactaatatgttgattcgaacttatgtgaaagagagagttatgagaaagacagggctacagttgtatcaaaactcaaacatgttggctgatatagatgtacccaattactttatgtttcttggatacaataatggttggtactatggagtacgtaaattacctttagaaacagagaatgatatacgttttgttttttataaattccgaatagaatgaaattttttttatgttttatcacttttctatttatgaatatctgtatctgttttagtcagaaaagtaaagatgaggttatttttaatagaaggagagttgatgttggtactattatgaatgattcattactgaaatgctctttcaaatttactaatgttagttctcatgatataaaagtaaataaaatatatcgatcttgtaattgtactaaagtttttgttacagattctttattgagaataggagagtcatcttatatatatatgattgtagatacatctagtaaaaatggacattttgaggttgcttctgtgattcagttgaatactttacaagaaaattatgcattaaaggtggtagggaataaaaaagattagaaatgaaatattatagtatattgttgttaatttcggttgtattggggatttgttcatgtaagaaccaaaatatggaaaaaaatctttttatagttaaggatttgttgggacaaaatcttgtgcttcctgatagtttaatattttttaattcggatggtcaaagtatagacgttacaattcaaaaaactaaatataggattgtgatgtatgtggattctatcggttgtattagctgtaaattgaagttggctaaatggaaacaatttattgtcgatgttgatagcctgtccgaaagaaatacttcttttctttttattttttatcctaaaatgaagaaagatattttttatgcacttagaaatgataattttacttatcctgtttgtttggatttgggaaataaattttataatgccaataagattcctgatgatatgatgcttcagacatttttacttgataaagataataaaattatagcgttgggtaaccctattcataattctaaaattaaagatttatttttgaatataatttccggtggcacttctcttccagatgaaaaacgtcctcaaacagaggtgaagatagaggctctgtctatggatttgggtatgtttgattggaaaaaagaacagaaatgtatttttaccgttgagaatacgggaaaagagttgcttgtgattgatgatgtcaatacttcgtgcggatgtactacagtggagtattcgagagaaccggttcagtccggaaagacgatagatattaccgttgtttataaggctgaatatccggagcattttaacaagacgattactgtctactgtaactcgcctgtttcacctttgcaattgaaaataaaaggagatgctaaataaaagttaagagattgccggctgacggttgaggcgcagtggacaaataaccatggggggcgattttgttcaatggtttatttctaggagtagttggtaaacttgctgcaattcaccgaaagccggctttttatgattaagggtagtatatgacaggagtagcggaaaagaaaaaaagaatgataaagatttacctattatgggtgctgttagtcggcagcttgtgctgttcttgtacaggaaataaacgattggaatatgcgttggagtttgccggggagaataggggagagcttgaaaaagttttggaacactataatgatagcggactgaaacaggatgccgcacgctttttgattgaaaatatgccccgctattttagttatgaaggatggcaattggatacgttaaaagcaattcatgcagccacagaacatacggatggatgggtgaataaaaaagatcgcaaaaaatgggaacatttttcttttcggactttaaagaaagtttatgatgctaaagtgattaaagctgagttcttgattcatcacatagatcaagcctttgaagtttttgaaaaaagatcctggaataaatatttgccatttgatgatttctgtgaattgattttgccatatcggattggtgatgaacccttggaggaatggcgtggttggtatagggagcgttatgaatctatattggattcgctctatcaagggacagatgtggtagaagccaccgatcgtttaggggcttatttgcgtcaggaaaaagacttcaggtatagtgttgagctggacttaccccatttaggtgcaggttttttgctagctaacagggttggaagctgtgaggcgtcttgtgattttacggtctatgtgttacgtgcgcttggtattcctgctacaacggatatttatcattatggacccggtaagggagccggtcatgtctggaatgtattgagggatacaaccggtggctatgttcctttctggtttattcagactaaagtggagcggggcggaagtgataaacgagaaaaagggaaggtatacaggcggtgttttggagcacagcaggagaaagtatcaggtatccgccgcgattggtctgttccgtttccgctgaaagatccatatttaaaagatgttacaagtgactatttcccggcaaatcaggttacaatagaaattgatcctcaggttgataaaaagtatatctgcctgggtgtgtttacattggaaggatgtatgcccatagatataactgtgcagaaaggaaataaagcaacctttatgaatgtagaacccggaattttgtttcaaccgctatatgataacgggatgaagtgggtggcagccggataccctttccttgtagacgaaaagggagaggtgaagtatcataaacccgattgcgctgtgaaaggaagtatggatttgagccgtaaattcttattgcgacaatatctgaaagattatctcagcgctgtagtgggggataagatagagggagccaatcattcggatttttcggatgcctgtctgttgcatcagatagtggatacacctaaggtaagctatcaggtggcctatccacaatcccggaagagataccggtatatacgttatacttcgacccccgaaaaaacacttcaattggcggaattacagcttttccgaaaagtggatgatcaagagaaaatagcggctaaggtcatcgatggcagtaatgcttttattgcagatgaccggtttgatcgttttaaagtgaatgacggtgatggattaaccttttttcttacgaaagagaagggagcattcgttacacttgatttaggtaagccggaaaagattgaaaaaatagtctatatgcctcgtaacgatgataacttcattcggttaggggatcagtatgaactgttttatcaggatggatttcgtggttggatttctttaggcaggcaagtagcctcagaattaacattgcactatgacaatataccccaaaattcagtactttggcttcggaatttgtcaagagggagagaagaaaccgtatttcgaaacgaggacggtcggcaggttttctttgtaaagtggtaaaaacaggaaagaaacagatcaaaaaagaggaatttcttttatttattttgtaaaatagactgtaaatcgctgaatggtctgattttgttgttttttgaccggatattagcttccttaatcttattttttctcaaactttgtaaggtaaatcaatgtaaaaagtatgactataatgaagttgagactgggagttcgtgggatgatgtggctaaccttggtaattatgatgtggggcatcatatcttgtcgaactcaagaagagaaatgtcttgaagaggttttatctcttccgctcgccaataaagaagaactacaaaaagtactggatcattataaagatgacagcctgaagtatcaggccgtttgctttctgatcaggaatatgccttttcatgcaggatacgagggaaatgctttgaagcattattaccaatattttgatatttacgcgcaaggaaaattaggaccgcacgaagtgattgattctttaaaagaaaattcgttttctgtttcgcaattaaaacggatagaggatattgccaatattgattcttctttactggtgcagaacgtggattgggcttttaaggtgtggagagagcagccttggggcaagaatgtaagttttgataatttttgtgagtttgttctaccttatcggctgggagatgaaccacttggattctggagagaagatatttataaacgctataatccaatattagatagtatccggttgttgcctcaagctcaggatccgttggttgctgcaaaggtgttgatggattcgcttgttgtggaacaatcccattttaccggtctgtttcccgccggtccgcatttaggtccttcagtagtgtcatggcgtgcggggagctgtcgcgagttcgccgatttggtagtgtatgtaatgcgtgctttgggtattccttgcgggacagactatatggcgatgcgtggagataataacgtgccgcatttctggaattttacattggataaagatggaaaaacgtatattacggaatttcccgatcctaattggaaacgggctgtgagtatgtataatcctaaggcaaaggtataccggaatacgtatggcttaaactggaaagatgtaaagagacaacagggaaaaatgatgcatccggcgtttcgaaaacctctatatcaggatgtcacggctgtgtatgccgacagcttgaatcgtgatctggtagtgtcttctgatattttgtgtaaggaagttcacaaaggagatattgtctatttttgcctttccacaaggatggattgggtacctatagcatggactgtttttgaagaagactcattgcgctttcaagatacggaaggtagtgtgattggttgtttggctacatggaatggaaaacgtcttgtgatgcagtccgagccgtttacctatgataaaatgtcaggaacgattgctttgctcactcctcaaagtgaaaaagaagatataaccttgtattttaagtttccgctgttctgcgacttaggtatccttcgtatgcccggaggagtttttgaaggaagtaatgattcgcagtttcgctctgcagatacattgtattatgtaaaacaatggcctttccgcttgaacaacactatttttccggagaaagaaaagtcttatcgctatgttcggtacaaggggccgaaggggagttattgcaatatagcagagatggctttctttgaagatacctcggatacgttggcgttgaaagggcggatcatcggaactccgggttgttttcagaaagacggctcgcatgattattacaaagtatatgatggcaatccctatacttatatggattataagactcctgatgaggggtgggtcggattagattttggcattccccaccggataaagaaatttacttatattcctcgtaattcggataattttatccataaaggagatgtatatgaattattctattggcatgacaagaaatggaattctttaggtcggcaagtggcaaaagcagattctttgaattatgtaattccgaaaggggtagccttatttttaaagaatcatacggagggaaaggacgaacggatctttaagaagaccgatgggagacaacagttttggtagaagagaatgatggtggcatatgtcgtcattactaaaataggaatattcatttaaagaaggaggagcttctgccggactctgcaaagtatagcttctgctccatcctaaattagtccgaggagggacttttgaatgcaaacttagagataaaacaggaattatgcaatcgatagattgttttttccaatagaaagaaagagaaaaagaaaatgaaattaataacccattaaaataaaaacagaagttatgggaaagaaaattcttacagcaatgattgttgctgttgtagcggttgtcgcaggttataatatttatgcagcacagagaactgtaggtttgtcagatatagcattaactgatacagaagctttagccgcttgtgaggttagtgtagtacactataatgcggggcattgcgtgaaagatgtaagtctacagaatgaatattgtgctgaatattctggagcacttccatgttatcgtacaatttgaataaagaatgcttcattgatatggatttaaagcaaattcatattctatagtaagagttgcttttattgttataagagtagacttgtctactcttataacttaatttattaaatttgtacgttatgacaataattaaacatattatattagggactttattgggaggtcttgtttgttcatgtagctataaaaaaaatgatagagttcatagaacagaggattattttttgatagtgaaagcagataagtgttttaatttagacagtgaaacggtccagaccacagaatatcttcagttgtttaaatctggtgaggaaattattttttcatttgtgaatgaatatgataactctattgtattatatgattatgcaactggggaaaatatgcgtaaaataaaatttgaaagggaaggagctaatgggattaatagcgttacttcctatctaatcataaatgaagattctatttatttatatgatagaacaactcatcttctgagtttagcaaatgatagaagtattgtaaaagacaagaaacgaataaacattgttagatgcttgaaaggagattccatttttgcaccttctgaattgtttccgcgtacaaattctcctattttaaaaataggtgatgaattattgttatctggaactcttttttatgaatttgagggtgagaatgattcaaatcgtcctgtgatggctttctataatttgcagaagaacactattaggtattctgatagttatccatctatgtatcattctggaaattggggggggagttttacatatcgtttcccttattataccttgtctcctaataatgaactggttattagttttgctgccgatcataatataagagtacatcatgtagactcactgcaatatcatgagttttatgccggaaccaaggaagatatcgttattgaaccagttgagaaaagtcttgatttcgaacatttttctccagaagccgatagagatcactatgtccatagtttgaattatggatgtattcactatgactcatatagagaggtttactatcgtttggcaggacatccagacagtagtattgatcctaaagagggggtgttacgcaaaccaatgtcagtgactattttagataagaactttcaaattgtgggagaaacaatgttaccccaagaactttatttattaaatcaatgttttgtcggtccagatggatttcacattcaagtggagtcagaggatgatgatataatgcgttttaaaacatttgaactattaaaattatgagaaaactgaatatcgtatggaaatattgtgtacttttcttcttattatgtacttcttgtcatataggggatacaaaagagaaaagcgcattagataggatggtgaaacaattaaaacgaataagtaattacaacaagggcacatttactcatattgtagttatacctaatgtgggctgtggtgggtgtatttcggagtcagaggcttttttaaaaaggaatacaaatgatagtatcttttttgtttttacgaatatttcatctttgaaagcactgcgtttaagaatgggggataagcttcagcagaaaaatgtatatgtggacgaaaataatgatttcttgtttaacgatgaacggattgatagttatcctatagtattgcaggttaacaatcctaaaaaagtagagtgggattttttggagccagggaacagttttgaacaaacattaaagtgaatctcgtgatggaactctgtttttggcaaattttctaagcctgggtagcagggggcatgagtttcgatgtagaggcttatgtggataggagttcaagatcatagcccaagataaagatcaaatcattcttatgaaaagtaccaagtgaaacagagtggtatagagagcacgatgaaagaatgacttaatatgtttatatattagctgttttgattcgtatccagatcttaagtgggaaatggaagattgaaatgtattggggtaggagactcagattttgagaaactgtttttataaaagagataaataatgaatgttagatgttttttatgggggattttgttgataactgtatcaagttgtatagaatctgataggattatgcattatgttcgatttgaacataccataaatttgaaatccgatagaatacaggttccttcgatgttattgtatccacgaagtttagttttatgtgatagtaatctgatagtattcaatgaaaaaatggatactatgtttcaatgcttccatttgccggatttgacttttcaatatggttttggaacacaggggcagggaccgaatgatttcgttctcccttctattacccctgtgaaatatcaaaagaacggttttgtcatgttagacggaattaacctgaaacatattagtgtcgagaaagacaaagctatcgtacagacttcgactttaaattatggatttaattgttttaatgacttgataagtatttccgatagcagttattgttgtaatggaggttttgagaatgaaaaagaatttaggtttctttatcctgacggaaatcatgaatcatggggagaatatcctgaaacagaggaacgtttcggatctgttttgggcaggaatcaggcgtatataaagatgaccgtcgctaagcctgataagagttgttttgtttcgttctaccaacatatacgccgtttcagaatttatggtaaagatggagaattaaaaagagatgttattttagatattcttcccgggcaagaacgtcctgaagtggatgattatttgagattcatacatcctataagtgtccatgcaacggacagttatatttatacattaaatctggatatgacaacagaggaaattgagaatcggaaaactactcctaacatccaagtattcgattgggaaggaaagccacttacacaatataaactcgattgttttattaacacttttgtcgttgatgaagttgcaaataagatttatggagcttttgttgaagacgaagatcatatttatgtatttaatttaccccgattatgaaatggatgattttgatttttttgaattttttgttttgtgcccaacttgttgggcaagtatcacgacccgatagaaaccttttgcgtggtgagacgtatgtgattgaggtgccgaaaggatggaaacgtccttctgctgtgcattcttgcaatgatgaacctttgaaacgcgttaatgggaaatacgaaactacaaagtttatgagagtatattcaaaacgtaaagatcgttgtggtgcggtattgaccattatggaaatacaaaaatgtgcatcttttcaggaaatatttaaggaagacagtatttgggcatcgacggatactacgcaggtgaaggtgatatataagtctgtcaatagtaagaatggggttaaaaagatggcttttacttcgtataaggcagagcgtcatccggaaactaacaaattatctgctttgcaaaaggctgaatggtatttgcaggggcgtgaaaatgtatattatatcagttttacgtcttgctcattgtttttagaactgctaccgcagattaaagatattgtggcgtcgttaaaggaactttaagtaaaacatttggtaatgtttttacgaataagatgtgtttataatttaaaatgtattatttttgcgagtatagaaaagaatatcgcaataagtagccttgactaatatatgtggaagaagttgtcgctgtatgtttgtttaataactattttgtgttcttgtcagaaacaacgtagtgcttatgcacctcctacgtttccggaagtaaagaaaatacatgctcatcgtttgtcggacgaactcctgatcagctatcctttggatatggctgttagtgaggactatatctttatattggctttggcagataatgcctggttgcaggtatatgataagactacagggcaactgcttggaagttttgtaacaagagggcagggaccgggtgaagcgactactgcgaacatgtgctattataatgcacgtgaaaagaaaatttctgtgtatgacgaatcttctatgaagttattgacttatcagtttgataaagacgctgataattggggagcgttgatagaagaacggtctttttatgatttaggaggtacactacgccgggtgtgggaacttcggaatggtaggtttttggtagatggtcagttgggaacaaagtcggatcagcaaaaacgttttcagatgttggcagatgcaaaagtggtggctgattacaatgattttcctatagatactccgaaagaacgttccgtttggtcatcgccagcaattgcgatatctccggattgtaaaaagatggccgtaggaactttatatggaggaatccttgaattatttgatttatcacaaaacatagaattaagagcaatccgaaaattttatcctccggtcgtgcaatatttatccggaactatccaaaacacagaggagactgtttggggcttttctgcgttatgtgctacagatgaaaggatttatagtgtatttataggtgacaagaatcccaatttatttaataacttatctgtttttgattgggatggtcgggaattaatcaaatataatactgattgcctcgttttgagaatttgtgcttcaactcaggaaccaaataaactgtatgggattgctttttctgaaactcatgaattttatctggtttctttttccttggattcttgacaggggatcgcattaaaatgtatatatatgaagaaagaggtttggataaaactggtgaaacgaatcgggaactggattgtgaatatctgtttctattcttgtgtggcttttgttgcctggatggtattgcaggtgttttgcctgacttctttcaaaatcccctccaattcaatggaaccggcattgctttcgggagacaaaatactggtggataaatggaccggtggggcacgtctgtttaatatctttgcgtcattgcgaggagaagaagtggatatctatcgtctaccgggtttcggatcgtttcagcgggacgatgtgcttgtttttaatttcccttatcaggatgggagcgacagcatcggatttgatataatgaagtattatgtgaaacggtgtattgccttgccgggtgatactttggaaatacgtaagggctattatcatataaaaggaatcacagacagtgtggggaatgtgcaggcgcaacatcggattgcacgtgtcagaagggaagattcacatgggatcgtgatggatgcttttccgtgggacggacgtctgggatggaccattcaggaattcggacctcttccggtaccggccaaagggcaggtggtgaaaatagatacattgtcttgtttgctttacggaagattgatccattgggagcagaagaagagactgcggcaaaaaggagaggcggtatgtctgggcgatagtgcaataacggaatataagttcacagagaattactatttcgtatcgggagataatatggaaaattccaaggattcacgttattggggaatgttgcccgaatcatatattgtaggtagggcatttacaatatggcggtcggacgatcctttacgtggaaagattcgttggaaccgggtatttaaaagaataaaatgatgagagaaaaagtagattatatgcatattatacttcgtggaggacttctggcaatggtatgtgcactgctgtctgtggtatgggtaaatgatccgatgcttccggcaggtgagttgtcggggcaatggctctatctggcaaaagttgctatgggagctgctgtcggttgggtggtgttggcttttctctattatagaaaggggtatgatatgggggctgatttttatcaggtcgttatttggagttttattgttttggctgcttctgaggctatttatggcttgaggcagctttatggttttacttcttcccatcattctctgtattccctgaccggatctttttttaatcccggaccatattccggttatctggctatgatatttcctctttgtctggatcaatggttacgattacggaaaagggagaataagaattggatggaatggacgggatattatggggccgtggcagtattgtttcttatactctgtgtgcttcctgcgggaatgagtcgttcggcatgggtggctgctcttatttcaggtatttgggtatatggagcgcataaatcctggccggtacgcttgaaaagagtgtggatgcgcaaaaagacaaaggtgctggccgtcacctctgtgttatgtatagttgtgttggtcggaggagtctgtttgtttaacctgaaaaaagattcggccagcgggcgactgttcatgtggaaaatcagtagccgggccattgcagagaaaccatttacaggttatggccaaggaaattttgcactggcatatgggacaagtcaggaagcttattttgccgaagggagttattcgcctcaggaagaattggtggcaggaagtccggaatatgcttttaatgaatatttgcagatagcactcgagtgggggatacccgtattgctttgttgcctggcttttgcaggattttgtctacggagaggtgtggaactgaaacgttgggggccttgtggcagtgtgatctctttgttggtatttgctttttcttcttatccgatgcaattgcctgcttttgttattgcattcctgattttactgatggcttgtattgcaggacgctttcttgcctggcaactggcgtttgcttgtgtgttgggattttccggataccattggtggcaggcagatgtgcatcaagagtgcaaggactgggccaactgccgtatgttgtatcaggcaggtgcttatcaaagtgcaaaagaaggctatgaacgtttgtatccgaaattaaagggaagaggggcctttttgtttgagtatgggcattgtttgcataaattaaaggaggcggatgcttcgattctattattgaaagaagcttctacccgaagttgcgatccgatgatactaaatattattggtaagaattttcaggaaaaaggagaatatgctcaagctgaaaaatggcttttgcgttctactcacttattgccgggaaggatttatccatattacttgttggcgaagctatatgcctcgcctggatatttacagcccgataaattccatgaaatggcggacttggtcttgactaaggaacccaaggtacagtcgacagccgtacgggaaatgagggatgaaataaggaagttagttatagatgtaagtaacgaaaaaatcgtaaatagcagaaatgtaaatgattaatatgttttaaatgcaagaaaaagtatacaatttcttttgcgtttctgaagattagcaattatatttgtgactgtatgctaataatatgaaatacatcatatatatatgtcttggaaataagacatcaaataaatagaatttgctatgataaacagaataaacgaactacaaataagattcgggaatgaaatgcagttttcctatccgaatcttgacggattaattggaagaaaagttttttgtccacctatgtaagtaacgtaaaaatcgtaaattgctaataattagtggatttgagcttctgtgctatccggaattagtccaccatttattttgagttttagaaagtaaccaactatatttgcaatcataattaatagagaaaaagtttaataacattatgaaaaaccagtatcccttctatacgctttgtctggcattgacaatgctgacagcttgttccggtgagaagaaagagagtgcttctgaaaaaggagtggaaaccgtgttgcccgacacgaaaaacgaggtgtctgtcatgacactcaaaaagcagatattcaatcatgaattggtgagtaatggaaaaatttctgcccggggaatggctgacctgagatttgaaagtggtgaagtgatagcccatatttgggtaaagaacggagaccgggtacgaaaggggcagaagttggcggagttggacaaattcaaacttgacaaccagttgtcgcaatcggaagacgctttaaaaaagtcggaattggaattgagggatgtacttatcagtcagggctatccggcagacgacattagtcaggtacccgaagagacaatgaagctggcaaaggtgaagagtggttatgatcagagcaaatcacaatatgaaatgtcgaaatacaatgcagagcacgctactttgaccgcaccttttgacggagtagttgctaacctgttttcgaaaccctacaatctggccagtacttcggatgtattctgtacggtgatcgatatgcaggggatggaagtagattttactgtacttgaaagtgagttgccattaataaagaatggagataaggtagtgatcaagccctattctgatgccgcaacagtacacgaaggaagtatttcggaaatcaaccctttggtagatgataaaggaatggtgaaggtgaaagcccgggtgaacggggccggtaagctgtttagcgggatgaatgtacgtgtcagtgtacatcgttcgttgggagagcagttggtgattccgaaaagcgcagtcgtacttcgttcgggcaagcaggttgtatttaccctgaaagatgggaagatggcccaatggaactatattcataccgctttggaaaatgcagacagttatagtgtggccgacggactgacagaaggagatacggtcatcgtaagcggaaacattaacctggcacacgaagctccggtcacaatcattgaataaggatgaatcactaacacagaacaattatgattaaattcctgatacaacgtcccattgccgtattgatggcttttacggcttgcttcatagtggggttggtgacgtacttcacattaccggtatcgctgttgccggatatctccatcccggagattaccgtacaggtatcagctaaaaatacctcggcacgtgaattggaaaacacagtcgtgaagcctgtccgtcagcaattgattcaggtggctgcccttaaagacatgaccagtgaaacgcgtgacggtgcgggtattatccggcttagttttgattttggtaccaatacggacctggcattcatagaggttaacgaaaagattgacgcagctatgaactatttgcctaaagataccgatcgtccgaaggtgatcaaggcaagtgctaccgatattccggtattctatctgaatctgactttaaagacagacagtgcttatgaagagacggatcagcaggctttcctgaatttatgtgagttttcagaatcggtaatcaaacgccgtatcgaacagttgccggaagtggcaatggtagacgttaccggtttgctggaaagacaattgcagattgtacccgatatggataaactggctatgcttgaattatccattgaagatattgagacggctctggcgcaaaacaatgtagagccgggaagcatgaccgtacgggatggatactatgaatataacatcaagttctcaactctgctccgtactgcggaagatgtggagaatatatatatccgtaagggagatcgcatcatacagttgaaagaattttgccggatagcgatagtaccggtcaaagaaaaaggagtatctgtgtcgaacggtaaaagggccgtgacgcttgccatcattaagcaggccgacgaaaacatggacaatatgaaagatgctctgtcggaaacaatggattatttcaaaaagatctatccggatatcgagtttagcgtgagtcgtaatcaaaccgaactgctggactatacaatatccaatcttcagcagaatctctcactcggttttgttttcatttgtatcgttgccgtactcttcttgggagatgtcaaatctccattcattattgggctgagtatggtggtgtctattgtcatcagtttcttgtttttctacctgtgtaaaatgtctctcaatatcatctccctgtccggactgatcctggcactgggtatgatgatcgacagttcgattatcgtaacggaaaatatatcgcaatacagggaaaagggttattcgttgcggagagcctgcgtggcgggaacaagtgaggtggtgactcctatgctgagttcttcgtttacgacaatcgccgtatttgtacctttggtatttatgagtggtatcgcgggtgctatcttttacgatcaggcttttgccgttacggtaggattgatggtctcttatttcaccggtatcatgttgcttcctgttctgtatatgttggtctatcgtaccgggatcaaaggtggtccgaagtggttgaggctgaaaattaataatcctttgaaagaacatactctggaccgcttctacgataagggtgtcgactgggtattcagtcataagacgttgagtgtattgttctgtgccatctcttttccgttatgtatcttctttttctactttatcgataaagaaagaatgccggatatcgacgaaaatgaattgattacccgcatcgaatggaacgaaaacattcatgtggacgagaatcaacgccgggtcgacgaattgttccgtgagttgcagggagcatctgtggagcagacagcgtccatcggattgcaggattacattttgaaccgggaacaagagttgtcgtcatcggaggcggaactttattttaagaccgaaacctcgaaagagattgctccgttgcaggaacaaatttatcagaagttgaaagaacgttatcctttggctgtgatttcattctctcctcctgaaactgtttttgagaaactgtttgtgaccggtgaggctgatattgtggccgaattatatgcccgcaataaggacagggcacccggccccggtactttgcgtggattggagcaaacattcggtcagaagacaggaatacctcctacaggtattgctttcgaaaaccaattgaacctcagtattaatcaggaaaagctattgttgtatcaaatctcttataacgagttgtatcgtgtgctgagaactgctttcaaggaaaacagtgtagctatgttacactcttatcagcaatatctgcctatcagcattgcaggagacgaaaagacggttaaccaggttttacaggaaaccttgattcagacacaaccggacagcaagacgggagaggtgaactttattcccttacgggagctgataaaagtaactcccgcagaagatttgaagagtattacagccggaagaaatggggagtatattccttataaattctatggagtggagaatgcggagaagttgatgacccaggttaaagaaacctctagcgagacaggagattgggacatcgccttttctggaagcttcttttccaatcagaagatgctggacgaactggtggtcattctgttcatctcccttttgctgatgtatttcattttggcggctcagttcgagagtttcatgcagcctttgctggtgttgatggaaataccgattgacgtggcgtttgcattggtattgctttgggtgtgcggacatacattgaacctgatgtcggccatcggattgattgtgacttgcggtatcgtgatcaatgactccatcctgaagctggatgccatcaacgaattgcgtaaggagggagtaccattactggaggccattcatgaagccggacgaagaagattacgaccgattatcatgacatcgttgaccactatttttgcaatggtaccgttgctgttttcgttcgaccttggttccgaacttcagaaaccgctgtccatagccatgataggtactatgacaatcggtaccctggtgagtttgttcatcatccctttgttgtattggtttatttatagaaataaagaaaaacgatagatatgaagaaaagatattatatagtaatagcagccttgctgtttggggcttctgtagcgaaggctcaggatcatataaaactcgatttgcagaagacgatacaattggccaatgacagttcactggaggcattccgtacgcagaatatgtatctttccggttactgggagtatcggacttacaaggccaatcgcctgccgagccttactttgaatatgactcctgccgagtataaccgggatatcaccaagcgatacgattcggaaaaggacttggatgtttatcgtagccaacagtcgttctatgcatcgggtaatctggctatccagcagaacttcgatttgaccggcggtactttctacctgcaatcgcaattgggatatatgcgtagttttggtgggaacaagacaacgcagtttaccagtgtacctatccggttgggatattcacagagcctggtcggatataattcgttcaagtgggagagaaagattgaacccttgaaatatgaaaaagtaaagaaagagtttgtgtataatgtggaagccgtatccgtgcaagccactacgtatttctttaacctggctatggcgcaggccgagtataacctggccaaggagaatatggtttcttcggatacgctttatagcatcggagtgcaacgccagaagatagcagccatctcgaaagccgacttattgacactgaagttggatgtggtgaatgcacgcaatacgttgcagaacaaggctagtgctctgaaacgcgccatgttttcactggtttcgttcctgaacctggataagaatacggttatcgatatcgacttgcctgtccggcctcaggaattggtgataccggtggacaaggcattgcagatggcacatgaaaacaatcctcagttactggggttaaagcagaacgtactggaagccgaacgcaatgtggacaagacgaaaaaagagtcgcgtttcaatgcgagcgtgaatgccagtatcggtttcaaccaggtggctgataattttggagatgtgtaccacaaacccatgcagcaggacttggtatcggtcagtgtcagtattccgttggttgactggggggtaaggaaaggtaaatataacatggcccgcaataacctgaatgtggtgaaaacttctgcccgccaggatgaaatcagcctggacgaagaagtgatcatgactgtgaacgatttcaatattcaacagaatatgatcaccagtgccgaagaagcactagacctctctatcctggcctataacgagactcgtcagcggtttatcatcgggaaagcagatatcaacagtctgaccctgtctctgaaccgtcagcaagaggcacaacagaattacatttcagccttgcaaaactattggctgaactattataagatacgtaaactgacgttacatgactttgctaccggaatctcgctgactgacaagtttgactatgcgggaggacaattggtgcgatagtgctaactaacattgaaacgatggataatccttctaaaataaaaacgcagacgaaagcctcttcttttacgctgattgtcgcctttatatgcgtggcgttgatcggtctggccttaatccccctgcttcccgtaaagctgaacccttcgagaaccctgcccggttttacggtgcagttcagtatgcccggtacttcgtcgagggtggtggaaatagaggctaccagtaaactggaggctatgttggcacgtatcaagggcataaagaatatctattctacctccgataatggttcgggaagcatcaccattgaattggataagtatgcggatatagatgcggtacgttttgaggcttctaccattatccggcagacctggccgcagcttcccgatggagtgagctatccttatatcaggatgaagcgcccggacgagaatgcttcccgcccttttatgtcgtttacactcaacgctccttctactcctatcttgattcagcaatatgccgatgagcatatcaaaacaagactggcacagattcagggcatctataagatagacctgagcggagctactcccatggagtgggtcttggagtatgatagcgaacaactgagacgattgggaattactttgagtgatatccagcaggctgtcagccgctattatctgaaagagttcctcggtacctataatgtcgaatcatctacagggggtaaagagtggatccggttggcgctgatgcctgaaacaaaagatgagggtttcgatgcatcccgtatccgggtgaagagtgccgaaggtaaattgatcagtctggacgagcttgtaactgtgtcccacatggaagaggccccccaaagctattatcgcatcaacggacttaactccatttatctgtcgataacagcagaagaaactgccaatcaattgcaattgagcaaacaagtgaaagaagagatggaggccatacaaaaggtgttgcctgccggatatgaaattcacaccagttatgatgcgacggaatttattcacgaagaattgaacaagatttatctgcgtaccggccttacggttctgatcttgctgttctttgtgctgattatcactctgaatccgcgttacctattcttgattgtagtcagcctgagcatcaatattgcggtagcagtcattttctattatctttttgggttggagatgcagctctattcgctggccggtattacggtttcgctcaatctggtgatagacaatacgattgtgatgaccgaccatatactgcaccggcgtaacctgaaagcctttatgtctatcctggccgctactctgactacaatgggagctttggtgatcatcttcttccttgacgagaagatacggttgaacttgcaggactttgcagccgtggtgattatcaacctcgccgtatccttgtttgtcgctctgttcttcgtacctgccctgatcgaaaagatcgggttgaaaaagaggaaacgtcatcggacccaatcccgcttcttccttctccgggcctctcttccgcgaagaataacggtttactttacccgcttctatggctggatgatacgtaaattgtgtcgttggcgtgtggctgtctgcatcttgttgatactattgttcggacttccggtgtttatgcttccggataaagtggagggtgaaggacgtgccacggagtggtacaacaaaaccttgggatcgtccacttacaaagagaagatcaagccgatagtcgacaaagcattgggaggtagtttgcgcctgtttatccagaaggtatacaacggcagctattttacccggaacgaagaagtcgtgttgtatgtatatgccaatcttccgaacggcagtacgttggagcagatgaacgaactgatcaagaagatggaaatctatctgagccagtttaaagaaattaagcagttccagacctcggtatacaatgcccgtcggggtaatatcaatatctattttaccaaagagcatcagaatagcggtttcccctatacactgaaagccaacattatcagtaaggccctgcaactgggtggaggtagctggggtgtatacggcttgcaggatcaggggttcagtaatgatgttcgtgagggagccggttcgtttcaggtgaagatgtacggatacaattatgatgaactgtacgagtgggctgaaaagttgaaagccaagttactgacccaccgacggatcaaggaagtcatcatcaattcgtatttctcttattggaaagacgattatcaggagttctattttaatctgaaccgtgaacgtatggcgcaggagaatatcaatgccaatattctgttctccaccatccggccgatatatggtaagaatatggagatcggctcggtagtggcggaaaatggttcggaaaagataaagctttcttccaagcagtctcaggaatatgatatctgggccatgcaatattttccgtatggaacagacgataaacagtataagctgtctgaactggccactatggaaaaagggcagatgccccaacaggttgccaaggagaaccagcagtacaggttatgcctgcaatacgaatatatcggttcgggcgagcagggaaacaaaatcctgaagcgggatctggaagaattcaataaagagttgccgatggggtatacggctcagtcggagagagagagctggggttggggaaaaaaggataataagcaatacttgcttttgctggtagtgattgccattatcttctttactaccagtattctgttcaactctttgaagcagcctttggccatcatatttatcattcccgtgtcgtatatcggggtattcctgacgttctattggtttaagctgaactttgaccaaggtggctttgcttcgttcgttttgctatgtggtattacggtgaacgccagtatctatatcctcaacgaatacaatgccatccggaggcgtcatccccgaatgtcggctttgagagcttataccaaagcctggaatgcaaaaatccttcctatcttcctgacggtggtttccaccatccttggttttattccctttatggtcggtacggataaggaggcattctggttcccattagcggcaggaactatcggaggattggtgatgtctatcatcggaatctttttcttcctcccggtattcgtgttgaagaagagggttggtaagcgttgaataccttttaaatagtgaatgctttgagcaatggtgctcttaaaagatgaacgatgaacgagctgtgcgatagtcaatgcagcttgttcatcgttcattttttaccagtgttttttctatttaagaacgtctatcgatcctgatcttcgttcttcaccattcctttgaatttatcgggaagtgcactttctacagctgtgtaagcctcggccatagtagctttcatattatctgctccttgtcctttgggagggatgggatcatgaatggtcagaatcatgcgatgacggtgaatccatttgccggtgcgtggcaggatttcgaaagagccgtctatggttacgggaactacggcaagctgtaagtcatctgccaattgaaaagctccttttttaaaatatcccatgtgtccggtgaaagaacgggctccttccgggaagaccactaatgatactccgtccttcagggagtctttggcttgacgaatggtttcaagtacctttttcggtcccgagcgatctacaaagatatgtcctgcgctttcgcatgcttttccgacgaaaggaattttgcgaaggctttttttcatcatccatttaaagttacgtcccagaaaaccataaatcagaaagatatcgaatgagccctgatgattggggacaaagatgtaagaagttctttcatgtagcttttcgcgcccatgcactttgaccgggatcaacagaaaaaggcagatcagttgtgaccatattttccccggataatacccccagatgtgggctcctcccagcaatgaaccaacgattgtgacaaccgccgtgaggatagtcaatactaacaaaatgggcaatgcaatgcagatttgataaatatagtatagtatcttcataatgattttggttttagcttgtgcaaaaataaacaaaataatattgctgtcctgaataattgctaactttgttttaaatttcaatagcatgatacgtatactacatacagccgattggcatttgggacaaacctttttcgggtatgaccgcacgcaggaacacgaacattttctggactggctggccggtgtcctcactaagaacaagattgatgtactgattgttgccggagatgtctttgatgtttccaatccgtctgctgcttcccagcggatgttctatcgtttcattcacagggtgacgactgagaatccgcgattgcagttggttgttgtggccggcaatcacgattcggccgcccggctggaatctcctctgcctttgttgcaggagatgcgtacggagattaaaggaattgtccgtaaacagaatggcaaaatagattatgagcatttgctggtagaattgaagaatgcggcgggggaggtggaagccctatgcctggcggtacctttcttgcgacagggagactatccggtggtagagactgaaggcaatccgtatgcggaaggggtgaaggaactgtatgcccgtttgttgaaatatgcgttgaagaagcggactgacggacaggcattggtggctgtcggacacctgctggcaaccggttcggagattgccgagaaagatcatagtgagcgcatcatcatcggtggtctggagagtgtatcgcccgagtcttttcccgaacagattgtttatacggctttagggcatatccacaaggctcagcgcgtatcgggcagggagaatatccgttatgccggcagtcccttacctatgtcgtttgccgagaagcattatcaccacggagtggtaaaagtgaccctggatgaaggttgggcggttgagatagagaaacttgaatatactccgttggtgcgtttgctaagtatccctgccacagaagctgcggctccggacgaggtgctggatgaattgcgcgggctggaactaccggaagatgaaccgatgccctatctggaagtcaaggtgaaactaagcgaaccggagccgatgttgcggcagcaagtggaagaaatactggaaggcaagccggtccggctggcccgtatcgtttctttctatcggcaggcagcagaggggagcgtggaagaagaagtcctgaccgccggattgcaggagatgaatcccttacagattgtgaaagcgacctttgagaacagttaccagacggagatgccggaagaactggtaaatttgttccaggaggcttgccggaccatcaatttagaatgaatcaaataggaattcaccacagattaccggagattacacagatcaccattaggattcacacagatcttttaatctttactatcaacgagatcatctattgatctgtgttaatccgtataatctgtggtgaaagcaaaccgaataaccatgaagatactaaccatacgattaaaaaatctggcttccattgaaggaacttttgaaattgatttccaagccgagcctttacgctctgccggaatttttgcgatatccggacctacaggagccggaaaatctacgatactggatgcgctctgtctggcgctgtatgataagacaccccgcttctccgcttcggttgagagtctttatatgtcagatatcggtgagagtcgggtgaatcaggccgatgtgaagaatatccttcgcagagggacgggagagggatttgccgaagttgattttttaggagcgtccggacactgttatcgttctcgttggtcggtacgccggacaggaagccgggctaacggtgctttgcggtcgcagacgatacaagtgaccgatctgactgccaatcaggaactacagggaacgaggaaagagttgttggcacaattggtgactttggtcggtttgacttacgaacagtttacccgtacggtgctgcttgcccagaatgacttcgctactttcttgaaatcccgtgagtctgccaaagccgagttgctcgagaagctgaccggaacggagatatactcccgtatttccagtgaaatctatctgcgtagcaaaacagccgatgcagaactgaatcagctgaagagcaatgccactctgatcgaactgctttccgaagaggaaatcactcttctacggaccgaaaaagagagtctgaccaaccttcgtgaacagggaagcaaagcattgatagacctgaatgcacagctatcggtgctgcatactctgaagttgcagcaggagcagcgtgataagaaagtgcaggatatgcggctggatgaagaaaaaagtaagaagctccgggaagaatatacacgccagtccgactctctcattcgcttcaggggacagtgtgaagctgtgcaacccgatcttagccgggcacgtgaactggatgttcagatccaatcactggtcagccaatctaagcaggtagaggagatactgcaaggtgctgaaaaggcagcgaatgcacaagccaataaattgcaatctgtgcagggagccctgcatacttcctgccattcgttgaagaatctgacgggagagatcgagctaccggttacggaagagaccgggctatttcttgaatctgtccggaacaggctgaaagagcaggaagaccaacttgccattcttcaggaaaagaacgaagcgcgtgtgaaccgtctgaatgcttttgggattgaagcggtgactgacgagcaagcccgatggatgcaggaacaaacccgtttgcagaatgcccgccagcagatgttggaatggagaaaagcggggacagaggccgaacgtctgaaagcacaacaggaagagatggggcacaaacaagaacagatgcggaaagagataacccttctgaccacccggttgtcagagaaggaggctgaactgaaagtgctgcaacgcctttttgagaatgcccgtatcgcgatggggaaagacgttcggaccttgcggcagaatttgcgtgagaatgaaccgtgtccggtatgtgggggcactgaccatccttataggaatgaggaacaggtagtccatagtctgtatcagaacatcgaacaggaatatcaaaccgcatctgctgagtatcagcaactaaataaccggaatattgctttgaaacaggatttgcttcatctgtcggaattgtccggagagataaccgtacagttgcaggcgttcctccaagaggctgagcagaaacgtccttcgtctgaagaggagcaaaatccggactattttgagaaacaattgcataccgtgcaagggaagctaaatctgctcgcggagaaaatgcaccaataccatcagctctacaaggaatggcaacagcatgaggggcagatcaggacggttcgctcggcttgtgaggctttgcgcgaaggggtggcccgttgccatctgttgatgcagcaagttctggctgctaaagagcaatttgaactactgaaaacggcagaaacgactgctcgggagcagttccgagtggtcagtgaacagttgataactctccgtcaggaacgggctcctttgttgaaaggcaaatctgttgaggatgcggaagccgctattcggaaaaaagagaaacaattaaacgattccgtggaacaggtgcgcaaggagggagaagaagtcctgtcgcgtatttccggtatgcagggagagatcagacaactgaacagctccatcgacgaattgatgctccggaaagaacagatagccgatccggaacatttgccggagacgatcgcccgccggcaagccaccaatcaggagaccgaacggcgtctgtcgaccgtcgaagcacgtcttttgcaacaggagcaaaaccggaagaagctgaagcaactggagcaggaactgaccgaaaaacaggagacagccaaccgatggggaaaactcaataaactgattggcagtgcggacgggacaaagttcaaggtgattgcccaaagctatacgttgaatctgttgctgatgcatgccaacaagcacctgtcttatctatcgaaacgttaccggttgcagcaggtgccgggaacgctcgccctgcaagtgatcgactgcgatatgtgtgacgaggtgcgtaccgtctattctctttccggcggagaatcttttctgatctccctggcgttggctctcggcctgtcgtctctttcgagcaataacctgaaagtggagtcacttttcatcgacgaaggtttcggttcgctcgatgccgacagtttgcgcacggtgatggaagctctcgagcaattgcagatgcagggacggaagatcggagtcatttcccatgtacaggagatgagtgagcgcatcgccgtgcaagtgcaactccatcgtgcggcgaatgggaagagtgctatcactttgacaaattgataattggaaatcgtcaggctgcgttttttcggggcggagtgcggtccgaatggaaaaatcgttctgtagggagttatgggtttgtcttatggacggtgattccgctcgctttctgatagaatgtcacaagataggtgcgattgcttcgctgaagtatttccttgaaggaaagccgtgtctttctgttgttcctttaagtgcttcggacacttcacaaccggaacggaaaacgcaagaatcaggggagaaaaacaggacaatagacctgatggacaaaaacaataggagatatttgaaaaagaagtaagcatattggggaaatgcttacttctttcggaccaaatgcttacttctttttcctgaaatgcttgcttcttttgtggaaaattccggttcttcacctgttcaatcccggttcttcacctccgtaaccccacctttggggactttccctctccggtttactgcttttatcgaaaggtgctgtttgtgaaaccgggtatttgctttcttaatgtatcgctatttgcatcaatcactttctatctgatacctcttccgaatcgggattacggttgctccatccccggcgcggtttccgtggtagtccgtttatttgaattgctcttcattcagcgaataatattttcccttcaatgcaagtaattcctgatgactgccttgctcgatgatttctccgtgctccagtaccaggatggtatctgcattgcggatcgtagacaggcggtgggcgatgatcaggctggtgcgtccctgcatcaactggtccaatccccgctggatcaagatttcactgcgtgtatctatgttgctcgttgcttcgtccagcaacaggatggccggatcggccactgcggcacgggcaatgttcaatagctgccgttgcccttggctcaggttggctccgtcgttttcgagcaaagtatcgtacccttgcggcaagcgtttgatgaatgaatgggcagcggtcaggcgggcggctgccactacctcgtcatccgtcgcactgaggcgtccgaagcggatgttctcccgtaccgtacctgtgaagagatgggtgtcctgtaacacgatagccatcgaacggcgaaggctgttgcgctcgatccggtcgatcgggtgattgtcgatggtgatctctcccgactgaatatcgaaaaagcggggaagcaggtttaatatcgttgtctttccggctccggtggcgcctaccagggctattttctttcctgccggtgcatgcagggacactcctttcaggatggttttctccggacggtagccgaaatacacatttttcagggctacgtctccttttatatttttcagtgtgacggcttccggaacatccgctttctcgggcgcttcatctatgatttcgaagatacgttcggctccggctatggcagcctgtatgctgttgtaaaggcttgccagttcattgatcgggcggccgaactgccgtgaatattgcaggaaagctgccagtccgcctacgtcgaatccgcggaagatggccagtaaagcccccacaatggtgatgatcacatagttcagcgtattgaggttttgcatgacaggcatcattagccccgagtagaattgtgctttcaacgatttgtccttcaggctttggttcagtatcccgaagtctgtttccaccttctgttcgtgtccgaatactttcaccactttctgtccgctgatcatttcttccgcatagccgttcatcattcccagtgcttcctgctgcgctttgaagtatttccggctccgtttcacaatgcctttggcactgaggaacatcagagggacggtaatcagcgttaccgctgtcagtatcgggctgataaagatcatcaggcagaaaataccgataaccgtcagtgcactggacagcatatcggacaggctgtcggtcaatgcgtcactgatgcggtcgatatcgttggtgtaccggctcatgacatcaccgtgctgatgggtgtcgaagtatctgacaggcagacgttccatcttgccgaacagttcctcacgcatccgggtcacggtgcgttgtcctatcttgttcagcaggatatattcgatgtaagtagccgctactcctgtcaggtagatggctgccaggaacagcaggatgcgcaccagtccctgaaagtcgcccggcaggatgtactcgttgataatcgggcgaagcatgtacgatccggtgaggttggccgcaatgctgatcacgatcagcacaccgatcacaatcagtaaccgccggtcacaggccacgtacgatatcaggcgtagaaatgttttctttcccgccttaggctttccgctgtatttcagatgatctccgtgtgccatggtcagataacgatttgctgtgagtaatatatttcccgatacatttccgaccgttccaacaactcttccggggtgccgatggattctatctccccgtcgtccagcagaatgacccggttggccgattgcatggtgtatatgcgttgggtgatgataagcaccgtggtgtcccgcagccaggcattcaggttgttccggatacggagttccgtttcagaatctacggcactggtactgtcgtccagtatcaatatcttgggtttacgcagcaaggccctggcgatgcagatgcgttgcttctgtccgccggaaaggttgattccaccccgtcccagcagtgtgtcgtatccggcaggcaacgagcagatgaactcatgggcttcggcggcacgggctgccacttcgagttcttcttgcgtggcgtccggttttccccagcgaaggttttcggcgatggttcccgtaaagagttcgttcttttgcagcaccattccgatgcgggcatggagttcgcgcaggttatagtcttgtacagggatgccgtcaatgcgtatttctccggcgctgacatcatagaggcgggggatcagttgcacgagtgaactttttgccgatccggtagcacctgctatggccactgtctcgcccgggcggatgtggaaactgatgtttcgtaatacgtccgtctctccgccgccataacggaagctgaccttctcgaaggcgatctctcctttttcaatctctcgggtgctctgcatgccttcgggtgtgtcggtcagcgaaggttgtgtgtccagtacctctaaaatacgtttcgacgaggcagaagcacgggcataagacatgatgatcatggaaagcatcattaatgacatcaacacctgtcccaggtagttgacaaacgatatcagttcgcctaccttcagctctccggtcatcaccttgtggcctcccatccagaggatagcgatgatagacaggttcatcaccagttgcattaccggaaagatggagacaatgatgttggaagcatgaatcaccgtatcacgcaggctctcgctcttgtctttgaacttatgtgcttcgaagtcctctcgtacaaatgactttaccacccggatgttaatcaggttttcgcgtaccacctcattcagttgatccaccttctgctgaaccttcaggaagaaggggaaacctttccggagaataaagaatacgctgaaacccaatatagggatggcagccagcaggacacccgccagttcgagattgatgcgtacaacgaaaaacaccgccatgacaagcattagcggagagcgcagcatcaggcgcatcgacatcatgatgacttgctggatgcggctgatgtcactggtcaggcgggtaataagcgaagccgtactgaaccggtcgatgtcgaagaaagagagttgctgtatcttgccgaaaaggccagtccgcagatcggttccgaaaccaatggatgcatgggaagatacgtagacattggcaatgctgaaaatcagtccgacaatggagatcagtatcatctttccgcccacggcagtgatgacggagaggtctctttgcatcactccgttgtctataatatccgccatgtacatcggctgaacggtttcgcacatcaccgacacgagtaccagcaacgggcatgccagcaggcttattttgtacttcttcagtatttgccagtattttttcatttatccagtgttatcacggtaatctccggccatgctccgaagcggaaaggcagacctacgaatcccatgccgacgtttacgtacagcccccggttgtcctccatgtacatacctccccattccggataaatccaggaggcaggtgagtgatgtccgatggccagttgcatggcatgagtatgtcccgccaacatcagatcgatgtccgattgaggtaacacttcacgcctccagtgggtagggttatgacttagtaacagcttgaacagcccgtttgttcctgcctgtgccttgggcaggtcgccgtgctgggagaaaggaggttctccttcgttttctaccccgatcagggcaatgctgtcatttccccggtgtagcagggtgtgctcgttgttcagcagtatccagcccatgtcggcctgtcttttcttcaggtcgttcaggttgtttacctggtcacgcttgcttttccaacgatagtaaggcccgtagtcatggttccctaatatggagtagacgccgtctgtggcatgcagttgagacagtatctcttcaaatccgtccaattccgcagcccggttattcaccaagtcaccggtgaatacgattaagtccggtttttgtgcattcaccaggtccaccatccgttgcaggctcttggcgtttccctgccaactcccgatgtggatatcggacaactggacaatgcggtatccgttgaaggcttcgggtagacggggagaccggaaagtgacctcctttacttcgaaacggtctttgccgaccatcgatccgtaaagaatcagcgccgcattgagtgtggcaagtaccagtccggttgccacaaagggcttccgggaccagtgcaaccatcggttaaacgggcgtccgatgatggaacagatcgtgaaaattagtttcggtgaagcaaacaggaaaaagacaacggcaaaacgccctatccataacgtatgttgctcggcgtattcatagttggcaaagaaagccagtgacacgactcctgccatcaggaaaagagtggggaagaagtacagaatccgccagaaaagacttagagtcagttgtttgataaatgtccggtaaatataaatgtccggcagtacaaggattactatcagaaagcctaaaactcgttgcagcatattttcttaactatggagttgaatacataaaaagaggcgcaggtaagttttttggggggacttccgaacgcctcttcaaagttagagagaatttgtaaagtacggtttaagttaagctgtatgatttaattcttttaactcgttgaggttcttctttatttcttttatatgtcttatgttccggcgatacacccataggcagattccgagcccgatggcccagacgatcaggctgacgataattcccgcagcaccatattgccagacttgcctgtggaaaaagaaaaaagtagccatcgcaagcagatagaggatacctatgatccattcgcgaaccatccatctatggtaccgattgatgcgggagatgactgtgaccaaaggcatctcatcgatccgggtccggctcaggtaatgggcggagtacaaatcccagcaaagagccgggatgcacagtgagagggttatccaataaaaaaggtctgtaagtgtgtcggcgcatatccagaagagcaccgctaatgtcagtatgccgatcgaggcaaaacgcagtttcctgttgaaccggtcgatgctgttcatcttgttacgggcacgtcccagcagttgtgctatctctttttcttcaatgaactccttgtttttcaggtgttcatccagagcattccacgatttcttcaagtcatccagttccatatcttattcctcctttttcatctttttaagtttgtccttgatccggctcagcttagtggctacattggtcacagtcagtccggtgatttcggctatttcctcgtagcttttttcttccaggtaaagcagtacgatcgatttgtccagttgtcccaattgattgatcatccggtacagttgccgcagcatttccgtcagttcgtctttctcttctgtcatccagtcggcttcgcgggtcagtgcgacgatttccggcacattcttttccttgcggatgaagctgatgcaagtgttgagggctatccggtaaatccaggtcgatattttgcattctttccggaatttgggataagctttccacagattgagaatcacttcctggtaaagatcgccgagcgtagcgttccgggtggtatacagatagcatactttgtagataacccgctcgtattccttgattaccgagaggaactctttttgtacaggctcgttgatatgcgccggattcaggttcattgatcttcttttaggattacttttatttggttagtcgcaaagaaaaggaaataatcacagaataagagtgaaaattggtggtaattggggttcgtctccggatatttattaaatttggaagccatatggatcagtgagcaatggagcgttggcatgaagatcagaaggcttttatcaacccataccatacccattggtctttcgttctgccgggtgaagagaagtgatgcggggcggaaagtatggggaaatagaaaagatagaatagaaataaacagtcattgacaaatggaagtacccttagtggataaagattacttgcttgagagaactcccggcaatggaggatggacttatgcacccattcccgaagtgccgcaagataaaaaggcacctttcggctgggtgaaagtaaaaggaagtattgatggtgtcgaaatcaaaaagcaccatttgatgccaatggggaatggagaattaggactttctgtaaaagctgaaatccgtaagaagatcaaaaagcaggcgggtgattatgtacatgttgttttgtaccttgatgaagagccgtcggagattcccgaagaactgcaattgtgtttgcaagacgaacctcgagcattggaatttttcaattcactggctgaaaacgagcggcacaattatgtgaaatggatctattctgcaaagaccgatcgggcaaaagtagccaggatggccaaagcgattgacaggcttgcaagcaacctgaagtattacgataaaggctgaatgtgtggctatatacatcaatgatcggtcatattcagattccggatatatcctgtttaccttctcgttatgcctcgcataactttgctcctatcacttcaagcaataggatgataaaccatccgaacaccaccagccggggaggaatgatgcttctccaggcactccggcggtaatggtgcctgataaccgatacccggtctttccggtatcgtagacgggtacaaacgaaagggagtaacatgccggcaaaaacaattgtcacatctatgctctcgctaaaaagatgaatcccatttaatcttgtccaaaaggcaacaggaccccatatgcaaaatgtccaataattaaatatcactccgcttccccatacgcgagaatttcttttcgaccaccggtcaccgcaatagtaaaggtaatcaaagaaataaaatcggtatttcttgggatgtaaccggctgcgggtacgttcaaaataatcggggttctgcatcatatcgttatgggtgtttgcaatgggggtacttcagggggtacctctgtctgtaaatatagggagataatattgaatatttattattccggggggcttttcttgcctgaagcaaagtatatgccgattggcaacatcggacggtctccggccggggggatgttatttgtcgtgtttcctttataccggccggaggatactccggatttgtagagaatcaaattgttttattttgttatatttataataaatattgtaactttgcggacgattaacactataaatagacaaagatgaacaagagaaaattactaggcttgctctgtctgatgacattgctggctacctcctgtgataataaaggagattattggggggctatggaatcttctaaagcaacattaacgttggagcggatttgtgatatggctacgctttcacaagattccgtggaattgctgtccaatattctggggatgaatacagaagaactgtatcggacagacgtggtcatgatagggaaagtgacaagtgaagaaaccggattctaccagtatcccagattcctgatagctaaagatcgagagatgaaagaagtgcttacggaagcttatgtacatcgtgatacagaagggactttttatgctttcctggaatcgaatatgctccccgtgggcgaaacttattattgcgccatggttgattataattatggctataacggacgtccggggttgctggaccatgtattgggcggaaatacgcgtggcgaacgttacagtgaagtgaagccattccgcctttcagggttgccaagattggttgtgcacgatgcacattttacaggatacagtttctatttatctgcggaggtccgtttcaaaagcaatggcggaattatagaacagggcgcttgttacagttctactaaaagaatccctacggttgatgatcagaaaacattggcacgggaaacccggaattatgactattcgtttttagaagtagaggtgaccgatctgcttcccaatacacattattatatacgtccctatgtgactactgaggaagggacaggctacggaccggtagttgagtttacaaccgaaccgggtacggaaccgattatcaatcagttttcgttgtattcatatgacgatacgtcggtagagttgtatgcctctttctatacaaatgattatcagattacaaactacggatatagttatggcatttattcacaagaaacggggacggtgaaggatgagcagatgatagaggttccttttggggatgattatggacaggaacttagtaaaatcgttaccggactgcgtcccggaacgcgttatgctttccgtgtttatgcgaaaaatggagtagggatcacttacagtggttaccggaccgttaagattcccgtagaataagaaaatggatttaaagaacgaaaacagatgaaaagaataataataggaatgattgcctgcatttgcgcaatcaccgtaatggctcaggttcagacacacgacgtaaaaggagtagtattcgatagacgacagcaacctattgtgggagcattggtcaccgccaaaggaaccaatatcagtacaatcaccgatgtagatggcaaattcctcttgcaggaggttcctctttcggtaaagaaagtggtcgttacatccatcgggatggagacccgggaagttgacttgaatgtaccggtacagctgaccggaaaacgtaagaaggtctcgtttgtggcacatgccggtcttagtatgagtaaatatacgatatatggttccgactttaaagtgggatatgaattcggtctgggtatcgaggtgcgtatgtcgaagcgttgggcttttcagcctaccttgcaaatctgtaatcacggagctgagttcaatgccgaaagatatggcgtgaaatatcaggagacttggaatccggtatcactggatttgccgatgttgttcattcttcgttgtccgatagcccgcaaaatgaatttggcattttctatgggacctgttttttcgtatggttttgcagggaaagtgaaagctagcgagacaggcaaacccgatgaagagtatgatatttatagcagtgagtatgaatacgactattccggtgggaaacattctttgctgcatcctttcagctttggtgtggcctatggcataggggtggaatacaaaaagtggctggccggtatttcaggaaagagcatgtgtctggggcaggatgatgaaggctttgaagcaaaagagcacaatctggtacttaccttgggagtcacttaccgtttctgatgaagcggaaacggataattggatgttgaatgtaaaaaacagaaagatatgaaaaaatatatagcattggcatgggtctgcctggcattgaccgacgtaatggcacaaaagcaaaaggtagtagagaaggttgtggacgaagattactatccggtagagggtgccgtggttaccctgaaacgtacgaatcagaatgcgacgaccgataaagacggagtatttatactggaggaggtaccggtatattttgattcgttacaagtgaaaaaaggaaaacgtagcggatatatagatcttccgatgcgcatacagatgcgcacacaggtgatgcaacgcttctcgtggtcggtaaaggcaggaattggagcagggaaattcatgcaggggcccgaatcgaaactgaaagacggattcagtatctatggtggggtgggagccgatatccggatgtcgaaacattgggcttttcagccgtcacttttgctggtttcccgtaaaatgaaagggtatgatttctatggctattatgccgaaaataacggagatggttcttcatccgcttcttatgagcaggtcagtggcacttataatccattctatttggagattcctctgttgtttgcactgaaatacagggtagggaatgatatgaacctggtgttcagtttcggcccttacattgatctgggacttagtggagatgaaaagagagaatatatcaagcattattacgatacgatggagggcaataaaaccgagtctgttaccaatagccggtcgttgttcggtaaacggtttacaggaggattcgcctatggaatcggagtagaatacggtcgtttcctgataggaggaaccggaagagtgggatgtacttcatggaatcattcggaaggctttatagatgtagcttttgaaataggatatcgtttctgagataatagaccatgaaaagggggtgtttcataactcaccacagattacacagaatttacacagaatgatttttaatctactgataacccataatatttatctgtgtaaattccatgtaatctgtggtgaatacgagttttggcacaccccttttctcttcactcttttgtgtgttttcaatgcttaaataaagtattcatttagaatctgtagcccactgtcaggattccaccgatcgggtagtgcttttcggtatcaccggcatacaatgttcctcctttgatcgggtccatgaatccgtgctggaaagaggcattgatcagataatgcttccatatttcaaatccgatgcctccctgcactccaatgtcgaagcgtttcaacaaggcgtccttatctttcatttcggctgtggaggagtaggatttaaaaggattgtgtgattcgtttttatgtccgcctgtattggtcagttcgtattttccacccatacctacggataaatagggaccgatattgatcgcgaacttaacatggttcgatatatctattttaaaagctgccaggatggggatatccaggtagatcggagatatcttggctttgtaggagatgggatcggtagacgaagatagtggagagtagccttcgtattcggcagttgctcctttgctggtgatcatcaatcccgactgtatggcccagtgtctgctgaaattatattccacaccggcaccgacactgaatccggtccgttcgtccagtccatccgggcggcgataactgaacaggctgacaccggctttcacattccacgaaaagccttgttctacgggttgaagctgaatgtatacgttgggagcaacatctacctctttgcgttccatacctacatggtacactacgagccgttgtgccgaagcgggtgcttctgctattacgaacttgccgtctacattcgtcacggcaccgatattggttcctttgacaacgatggcggcaccgacggcaggctggccgtcaccaactacgacagtacccgctatgcgctgagtctgtgcaaagatcactacgctgcatgagggcagtaaccataataacagaataagaacctttttcataacttcttctatttataaagaataggatcagttacaaatatatcgaaagaaaacttttattgcaagtttgctgccagaaatttacgcatctcttctacggtttttccccttcggccggcatagtctgccagttgatcttcaccgatcttccccacggagaaatattgggatgcgggatgggcaaacattaatccgcatacggaagcatgaggatacatggcaccattctcggtcaggtggatacctatttgtttcatatcgagaatctcatccaggatgaagttcacggattggtcgggcagagaagggtatcccacagcaggacggatgccttgatacttttcgacaagaagatcgggtatggaaagattttcatccttggcatatccccaggcttctttacggacgtactcgtgcatcttttcggtagcggcctcggccaggcggtcggatagcgtttgtaccaaaagatgcttataggggtctttctcataaagtccttccatgtccgcatcgatggatgaggcaaaagctcctaccacatcggtgatgcctgaagatagcgggcgtacgaagtcactgaggcataagaacggttcgttttctttcttcttgacttgctgccggagcaatgggaaggtgataccgtctataatcagattatctccatccgcattggcaggacagagcttaaaaatagtttttacctcaaaatctctgtccagttcgttcaacatccggttagcttctttataaagttgcatcgcttctgaagccttgctccgttcttcttccgggaaagtggtcagccagatagcacggcaagagtcacatccgtgaatattggcaatggcagcataacgcggttggaatccccaggcgtggaagaagtaaatccagttgatataaggggttaaatcatgaatggcgaatgatgaacgatgagcgggggaggagctatcaacggtgaatgatgacgggttatgcttttccatatttgactgttttaatactggtaatcataagtttcattaattcatttgcgtctacaaacatgcttgaatattctgtttcggataaatattctgttttaaataacaattcaagccggaaaagggtttcgttacgttcttttggggcgatgctatattatgaataaagtcggcgttgctttcggcgcattccgtttctttttgcagaactccgatggctgtaccggatattagaatctggtcggatagagagtaagcttttcttttgtccggatatttatgcaggtttacgattcgtatcgtgaaaaccatacttttatctttcaatatatttcccattctcctcgcatttattgttccccgttcctcgtttattgttcatcgttcaaaatagatctcttgtccgcgataggtttcgtctacctgtccgtcagtatacaatagatgtccgttggcaaatgtcttttctactttccactcgaacgtacgtccttcaagcgggctccatccgcatttgcttaaaatctgatccgcgcttaccgtccataatgcatccggacgaaccaatacgagatcggcctgataaccggggcggataaagccgcggttgtgaatattgtatatttgtgcaggggcgtgacacatcttttcgacaaccttttctatcgtaaagattccttcgttcaccagttcgagcatgctgaccagagagaactggatcataggcataccggacattgctttcaacggccctccttctttttctttgagaaggtgtggggcatggtctgtcgcgattacatcgatcaggttggagttgactgcctggcggagcgcatcccggttggtttttgttttgatagaaggattacacttgatgcgtgcaccgagttccggataatcggaagagtcgaataacagatgcgaaacgcaagcttctgctgtgattctcttttcctctaacgggatatcattgtcaaacagtgaaagttctctggctgtagagatatgcaggatgtgcaggcgtgcatctgcaatgcgtgccaggcgtacagccagttcggacgattcgtaacaagccgcaatcgaacgtattttagcatgataacccatcggaagggtctcatgatgaacatggtaatattgatgaggatatttttcaatatactcttttacatacttctccgtattctttttaatcgtttcgtgattctcgcagtgagcggcaatcagcagatcggttccattgaaaatattcagtagactgttcattttgtctaccagcatatttccggtactcgatcccatgaaaagcttaattccgcatacacggttcttgtccagtttgtcgaactcggtatagttattattggttgccccgaaatagcacgaatagttaacgctacacttttcggcaagcagatcgaacttggcattgagcgcatccagtgtggtcgtttgcggatttgtattgggcatgtccatgatagaggttacacctccagctgcggcagcccggctttcggtagagatgtcggctttgtgggttagtcccggatcacggaaatgtacatgatcgtcgatcacacccggaatcagatagcatccgttggcattgattgtttcttcgcaggggatagcaggtttctgtcctttttcaagtacttcggctattttttccccttcgataactaccgaaccgcgcacagaacgtccttcgtttactatggtagcgttttgtattaatgttcttttcatatcttaattcatttttgttttctgggggaatgtgtgaaaccagctgttcactttcagtttgatgacaccgaataccgcttcaccaaagatactactgttcatttttgaagtacccagttcgcggttgataaagataaccggtacctcgataatcttgaatccgcatttgtaggccgtaaatttcatttctatctgaaaagcataccccttaaaacgtatgtggtcgagatcgatggtttcgagtacctggcgacggtaacatttaaatccggcagtcgtatcgtgtatcggcagtccggtaacgattcgtacatatttagatgcaaaataagacatcagcacacgtcccatcggccaatttactacattcactccgcttacgtatcgagagccgatagctacatcgcctccctgaacggcacaagcctcatagagccgtggcagatcgttgggattatgactgaaatcggcatccatctcaaagatgtattcgtatgaatgttccagtgcccacttgaatccggtgatgtaggctgttcccaatcccagtttacctttacgttctatcatgaaaaggcggtcgggaaactcctgctgcaaggtctttacaatggcggcggtcccgtcaggagaaccgtcctcgatgatcagaatatgaaaggtcttttccagtccgaaaacggcgcggatgatgttctctatgttttcccgttcgttgtaggtagggatgattacgatgctgtccgatgtctgcatattgtgtctaaatttgaagacaaatgtaatgcttttccgctactaaccaaagatagcgcattaaaactaaggataatttagtacttttgcggtgaatttgcatcacaggttacagggatttgcatagatggttcggaaacatgtttcatccgtgtaaatccataggatcggtgatgggctaaaattgcatttatgacaattactgaactgcaacatcaatatgcggggcatccgaatgtagaggccctgaataaactgttgggggagcccgcagtcagacatatctattgcggcggcttatatgcttccgctgcttccttgttcgcttcggcgttggttgaaaagagtccttgcccgtttgtttttatattaggtgacctggaagaagccggttatttttatcatgatcttacccaagtgttgggtacagagcgcattttgtttttcccttcttcgtttcgtcgttcggtgaagtacggacagaaagatgctgctaacgagattttgcgtaccgaagtgctcagtcgcttgcagaagggtgaggagggattgtgtatcgtcacttatcccgatgcattagccgaaaaggtcgtttcacggcaggagttgagcgagaataccctgaaactgcacgtgggtgagcgggtggatacgggtttcattacggatgtattgcatagttacgggtttgaatacgtggattatgtatacgaaccggggcagtatgccgttcgtggaagtattatcgacgtgttttcattttcgtccgagtatccctatcgtattgactttttcggtaatgatgtggagagtatccgtacatttgaggtcgattcacagttgtcgaaagagaagaaagagagtattgtgattgtgcccgatcttgccgtaaccggaaaggttacaacttcttttcttgattttatcccgaaagataccactttggcgatgcgtgatttcctttggttgcgggagcgtattcaggttgttcacaatgaatcgctcacaccgcaggctcttgcttctcaggaggccgaagagaatggaggcattactttggaaggaaaattgatcgatgggagtgagttcactgttcgtgcgctcgatttccggcggatggagtttggtaacaagccgaccgacacaccggatgctaccttgacatttcatactacggcacaacctatttttcataagaatttcgatttggtggcggagtctttcaaagagtatctgaaccggggatatgcactttatatctgtagtgacagtacgaaacagacggatcgtatcaaagccatttttgaggatcggggagaccggattcagtttacggctgtggagcggactctgcatgaagggtttgcagacgataccttgaaactttgtttgtttaccgatcaccagttgttcgaccgtttccataaatataacctgaagagtgataaagcccgttcgggaaaggtcgccctttcgctgaaagagttgaatcagttcactcccggtgattatgtggtacataccgatcatggtgtgggacgtttctccggtctggtacgtattcctaacggagatacgacacaggaggtcatgaaactggtctatcagaatgaagatgtggtatttgtttctatccattcgttgcataaagtttcaaaatataaaggtaaagaaggagaagccccccgactgaacaaattgggtacgggcgcttgggagaaactgaaagagcgtacaaagacaaagattaaagatatagctcgtgacttgataaaactttattcacaacgtcgtgaagagaaagggtttgcatacagtcccgatagttttttgcaacgggaattggaggcttcgttcatctatgaagatacccccgatcagagtaaggctacggcggatgtgaaacaggatatggaacgggatatgcctatggatcgcctggtatgtggagacgttggcttcggtaaaactgaagtggccatccgtgccgcatttaaagccgtagcagacaataagcaggtagccgtactggtgcctacaacggttttggcataccaacacttccagacttttcgtgatcgcctgaaaggacttccctgccgggtagaatatctcagccgtgcccgtacggcggcacaggcaaaggcggtaatcaaaggattggaagctggagacgtgaatattctgatcggtacgcaccgtatcttgggaaaagatgtcaagttcaaagacctcggactgctgattattgacgaagagcagaagttcggtgtgtcggtcaaggagaagctgcggcagatgaaggtcaatgtggatacattgacaatgacggcaacccctattccgcgtactttgcaattctcgctgatgggagcgcgtgacttgagtgtgatttcaactccacctcccaaccgttatccgatacagacggaggtacatacgttcagtgaagaggtgatagctgatgccattaactttgagatgagtcgtaatgggcaggtttttctggtaaacaaccgtatagccaatcttccggaactgaaagcaatgattcttcgtcacattccggattgccggatagccatcggacacggacagatggagccggcggaattggaacagatcattttcggctttgtcaattatgactacgatgtactgattgcaaccactattatcgagagtggaatcgatataccgaatgcgaacacgattattatcaaccaggcacaaaacttcggattgagcgatctgcaccagatgcgcggacgtgtgggacgtagcaataaaaaggcgttctgttacttgctggctcctccgttgtcttcgttaacccccgaagccaaacgtcgcctgcaggcgatcgagaatttcagtgatctgggtagtggtattcatattgccatgcaggatctggacattcgcggtgcgggtaatatgctgggagccgaacagagtggatttatcgccgatctgggttatgaaacttatcagaagatattgtcggaagctgtgcatgaactgaaaacggatgaatttgccgaactttatgctgacgaattaaaaggagaaggtgtcattagtggtgaagagtttgttgaagaatgtcaggtggaaagcgatctggaattgctgttaccggctaattatgtgacgggcagcagcgaacgtatgttgctgtatcgggaactggacggactgactctcgatagagatgtagatgctttccgttcacgattggaagaccgtttcggccctattccgcctgagactgaagaattgttgcgtatagtaccgttaaggcgcctggctgcccgattgggagtggagaaagtgttcttgaaaggaggacgtatgacactgttctttgtcaacaatgcagaaagcccgtattatcagagtgctgctttcggcaagatgatcgactatatgatgaagtatacccgaagatgtgatttgagagagcagaacggacgtcggtctatgttggtaaaagatattccgaatgtggaaacggctgtcagtgtactactggaaattgtggcattaccggtgaaagagaaagagtaagtgaagtgtggaaagaggaagttgtcatttcctctttccgtatagtttgtctatcaggtccgcccgtccgatgcggcgcaattcattgatgatattccgtcgttcttccggtttataccaaaagaaaaattgtctttgtgccaacttttcccgttgagtcttggcactgaataccggttcgagtgtatacggatgaaagcctgtataccaagcttcggtggctacggtcataggggtaggggtgaaatcctgcacttgttccagatggaagtccagttgtttggtgatgactgccagttccgccatatcttcttctttacagcccggatgactggagatgaaataagggatcaattgttggcgcaagccaagttcccggttgattctgtcgaatatctttttaaattctccgaattggctgaaagcgggtttacgcatgatactcagtacccggtcactggtatgttccggtgcaactttcaggcgtccgctgacgtggcgggctattagttcgcgagtatattctgctgtgattttgttgacggtagcatccttgctttgatggagcaataagtcgtatcgcactccacttccgatgaaacttcgtttgatctcaggtaaagagtccactgcatagtaaatatccaatagcggacggtgatccgtattcaggttcggacacactttgggatgaatgcaagaggggcgtttacaacgtttgcaaagggagagatctttcccgcccattttatacatattggcagaagggcctcctaaatcgctcagatttcctttgaaatcgggcaattgaactacctcttttacttctttcagaatgctttccttgcttcggctgactataaattttccctgatgggcggagatggtacaaaaagcgcatccgccaaaacatccccggtggatattaacggaaaatttaatcatatcataagccggaatgcgtttgcctttgtatttgggatgaggcaaacgagtgtaagggagatcgaacgaacggtccagctctttctctgtcataggagggtagggtggatttacaaccactgttttaccatcgacagcctgtacgattcgggttgccgcgtatttattgctttcctcttctatatgacggaagttggttgcctgtttctttttatcagccaaacattcttcatgcgaatagagggtgatatcattctcgtcggattcatatttcctggtcagataagccgtctgcgggatagaggataatgccggagaatgaatgtcggatgatgaaatcactccatcctgattatcacacagggctgtcaatcggcggaccaactcacaaataggcttttctcccatgccgtaaatcagcatgtcggcaccgctttcacaaagtatacttttctttaaccgatcctgccaatagtcataatggctgaggcggcgcatacttgcttcaatacctcccaaaacaacgggaacatcgggatagagttttttcagaatttgggtgtatacgatcgagggatattccggtcgcatatcgggacgtccgtccggggtgtaagcgtcatcgctacgtaagcgtttgttagctgtatatttgttcaccatggagtccatgcaacctgcactgataccgaaaaagagtcggggacgtcccagcttgcgaaagtcacgcaagtcgtcacgccagttgggttggggcacaatggctacacgcaggccttcggcttcaaggatacgaccgataacggcggctccgaatgaaggatggtccacataagcatcgccgctaaagaggataacatccagttcgtcccagccgcgaagctctacttctttcttggtagtgggtaaccaatcggtaagtcgatattctttcatggggacaaagatacggataatttcgctatacgagggcacggataaagcagaagatgaaccaaccgcatacggctaccttcagtacggtgcccaacaggaaccctgcaaatgctccgaatcctgctttcagcgcgtatttcgtttcttttccacccaataattcgcctacaactgcgcccacaaacgggccgataaatacgccccagggggcgaacagaaaaatgccggcaaaggtaccgatgatgcaaccccatttaccccatggggtacctccgagtctttttacaccgaacatcggaatgaaatagtcgagtatttgtatcagtaccacaatgaacaaccagaagaatagttgtggaatggtaaaagaaaccttatcggtgaaatgcagaaataccagtgccagataggagacaggaggcccgggaagcatagggacgatacatccggctaatccgacaagcaggcagatactacccagaataatcaggaatatatccatgcgttcaacctattcttttgataatggcaataaattcttcattggtcattccgaagtcttgttcgcgatagttcacaaagtcttccagatactctccggctattgtgtccaggatttccttaccattgagtccttcttcatcgagcataaagcgaatcataccctgataggcatgaatcgtcttcaagcgttgttccgctccggccactcccatcatctggcaatgatgttcgttgcgggctataagataaacggtagcgtagaacttttctgcgctaccgaatgtacttttgatttttttgattgccgttaccggccattttttaatttgattttgtatttcgctcataaaatagtaaactgtaaagtcatccgttctccatcatatatttcacggaatccaataccttgttctgataaatattccttaagatcctggaatgcagccacctgatccgttacaatctccatcttgtcaccgggattggcattacacatcgcttttatggccggaatcaacgggctatagttcgtcattccacaggtatcgacggtaatcatgcctcctcctcttcttctgcttcctgctttgacaaccaggtgagatagagcttgatgagttgctgcaacccgaatgctttcatattgttgtgataaatcacatctatacaaaggtcgagcaggtctttactgtcttcttcctgacttgcgatcagagaacgtatattgagtttcagcttttccagaacagcttcatctacaattccattgctgtctatcagatgctggaataaagagtatttttcaatggttaccaaattctcttcagatatttccatgctgcgtgtgccacttggatttgcctgtattgtgtacatagtgtttttattttaatagttattactaggagcaaagatagaatttaaaatgaagaatggagtaagtggcaaggatttttttttgatgaatatatatttccaatggtttctcttccttatctctgttttttagttttctcccgaataacttttaaatggtcgtttatgtccggtttgtatttgtctttattttccctccggatgcaggtgcgcatcgcggagggagttctatgacaatttatttgtcacttgttaaggccacggctgaacgatgacctcaatggtttgtcttcctaatggaggctggcccggattgagcggattgtaccatttcatatccacttgatatcttcccgctgcaactccttttatacgcaggataatcatagttccaaagatatatgattcttcttgttctatacctaccggtggattatcacattcccataccattgccccgatcatgggatatggagtttcggaaatttcaccgacatgaagaaatatctgactcggcaacggaggcggtggaatatggggaggtggaatatcttgctcaattcctcccgactttgaaatcggatcgttcgccgaagggctgtatgcataggatacacctctgcaaagtagcatggctactactaaaaaaaacatttttgctttcataattatataaaattggttcatgtagtacgctacaaatgattatccgggcacaaataatcagattagaagactctattatgaaattagaaaaatattatagaacgaaaacagccggattagaggggcaaccgaataagaagaagaataagaggatggcagacattgtggcagttaatgttaaatatgtcttgtttggatagcagacattatgtcagtataagctttaagagtgtcaggtatgaccgtagagccgaggggggctgccgaaaatgatgttcaaaatgtatcggtgagtgaaagaaaacacaaggtgtttttccctatggatgttttgcttggaagagttatccatgtagtcttttgtctgcaagaaacttgtttcttgcagacaaaagactgacatcacccatcaggtttcggcaaagtggattgggatatttatttttctccgaagaattttagtattgccgccattactatggcacggtctgtttcgctttcgatgctttcgaatggaaatcccattgcgaatacccggtaatttcctttataagcgattccggcactgtattgtccgggttgatagacaaataccggaaacgcggagtctacgggaacgatacaatcaggagctgttactgcataagccttctcgttgggcaaacgggggatttgcagggtgcgtcccaatccggtgatctgtcccgaacgggtatctttgagtgaaccttggaagccgtatttcagaattttttccgtaaactcccggttaccctgtgaattactcatgtcgctgccaatgtaagacccgctgacgagaaggtttcctcctgactgacagtaagcggttaatatccgttgcatgggtgaagagaatgtcttataatacgttttgcgtgccggattgcttaaaatatcatctttttccagtcccaggataaaatccacaatgggataatgttccggttgtatacgcccgttttcaacggcttcatcgctgcatgatacgaaactgtagtttccggcagcttggattgccttgccgtgtacaaaaggatagtcgaaagtgtttccggcaattttcattccttccagttcgtttccgctatagcccagacttccttttccttcttttcccgcctgagagcgatcaaagccggtctgtgccccgcaaagtgaaatattgtattgataagcgacaccggggtcttgttccaggtcaaatccggcttcgtccggtgtgtcgattactgcgggtccgctcaatcggttaaaaccattgatgatcagcactcgtgcatgttcttgtttggctttataggcagataagatttcggatggaaaactttcgcctccgtggttgacagctgtaaccttaaatgaatagaccaatccgggttctattttcagggtgtacgaaggtttattcacacgtactccattgtcgaaaccaccgtatccgatacgagtgtataccatgtattcgcggggacgggcggtaggctccaacggatcgttttcaccctgccatgagagttccagggtgtttctttttttgccaaactcgatggcgaagttgctgacggggagtggttgcactacatactccttgttgtgctgactgctgatgaactgtaatacggctttgtaaatggcacgtcctacggtaaatttgaaattcgggtcgtgaccgagtttcatatctgcgaaattttggtgtgaaagcaattcgacgatagtggatggagtggcaggcaggcgtgtttcgctataattgcgatcccacatactacggcgtgtccactgtatattgaatttggcacgaatgtctttttgtatttgggtgagcaggagatctgccaggtcacgtgaagcataccggctgtttcccgagttaagcagtccgttattgaaatcggtggtatagatactgagtgatcccactatatcgttcgttttactgtatccggcatcactatgcagcgccacgttcatttcaaaggggacacccagtcctttttgtccgggattgaatacagaaccaccggacaggtaattgatggtgttggagcgtgcattgatgtcgtcagcatagtcatttgttccttgtttgcctccgtagacatcatagggcatacctgcccattgggcagaataacgggctccctccagataacggggcagtccgcttactgtgccgcgggatatatttcccattcctccgccgaaacgaacggcatcggcacagataaccccgttttcgctgctctcattgcttagtaccaccatgccataatcattgctgcctttgtcaaactcaaaggttccgagatatacccatgtaccaccgccgatcctctggttgactttaaattctgttacaccacctttgtgaaataccagatatttggcgtcactgacgctgtttggaagtgtctgataggatacatatactgcgtaactccctgtttcggggattgtaggaatccattcggcaaatgccttattctttttcttttcagtccgggtgaagcgtgcgctacctgtcaggaaagggttttctccatcttcatatacaggttttctttgtgcgaatccgtaaccgtcggttttctcccaacgggctttgcggcttttcatctccagatagatggaaccgtttcgtgtatcgttgtccacaatcacctcattcttttgagtatcccgctcccggggggtatagacattagctccggcgttttcgagcatagggatgacataaggcagaatgaaagattgcgtgaacaggtcctcggtagtgcagaacaagcgtggacgttgccatccccattcgcctttatcgttcttgtaatatttgccatggctttgccacaaggagatgtgccggttctgcaatcctttggttatttcgtaagggcgggaggtgtttatcacccaaggtgctcctttatattctgcgtttgaaagccgcgatttatcttttttctttttcccgcgaaagaaattgggaatcaactcctcgataggttggttgttggcataaattgtagttcggaaaaaacgtaccgggccgggcagcaattcttctatctgatgatagatttcgtctactgtttccggtacaaacggctgataagcaaaactctcggaagcatagatagatagtttcctgccttcgaagtctatgtctacgctttttaacttacagcttccggtattggcagatgccggggtgtaagtctcaaagtaattactgagccgctctttcacgcttttttctatttcttgtgcaaacaagattcctgtcgcagcaaagagcagcaggagaaatatacatagttttttcatatgctcggttgaatgattatcgggtgcaaaagtagaagaaataaatgaaaaaccggcaattgccgataagtcattggctgaggaagttgctaactgtccatttattcggtatacagcattctcaatctgtgggtatctactcccaattgatttttcaggtagttatccataccttgatagtcagtgtcaatggtttggaaagcagcttccagatattctttccgtactgtggtgagaggggcaaatccgggatgagcttgtacgattgcatcatatttcccttttatatattcggcagacagcatgtaatcttccattatcacttccctgtcgacacccaatgctcccagtagtaaggctgcggcaattccggtacggtcttttcccgctgagcagtgaaataaaagaggagtattccgttcttccgaaacaatccggaagaattcccgataagtatcctgagcattttggatgatataaacgtatgcctgttcgagtattcccggtatattgttcaggttgaagtgtgtcatgtcggtcatgtcgcctgcttcgatagataaggggatatattgtgtaactgttgagggaattttgtctgccgctgcttttttttcctgcatgctcctgaagtcgatgtcggttcggatgtgcaaggaggtaagatagtccagatcggattctgtcagtttgtcaagatcgcccgaacggatgaatgttttccattttacatgtttatggtctgatgtcggataacctcccagatcacgaatattataagctccctctataggaagaagacggaagaatttttcttgtttcatatataatttgtatcttttctgtttaaacaaaagaagagtgaagagttccaaactcctcactcttctttatttttatttcactaattggctttggttatagtgggatgtattctacgaatgcttccattgcttcgtaagaagccagtcccaagctgtcgtaaagagcggcagtacctcggttacgatcctcgctacgctgccagaacaagcgttcgtcgttgcccaggaatggagcactttccatctgtgactgatgcttcaggatagagttacgttttgcacgtaattcttcaggactgataggtacagccatttcgatgttttcaatttcccattcggcccatgcgccacgatacatccagatacggcagtctttcaaccattcggctccttcttccttttcaaggtctacggcagcaaatacggcatctgtacatacacggtgtgttccgtgcgggtcggcaaggtcaccggctacaaagatctgatgaggcttcacttcacggagcaggttgcggacaatttctacgtcggcttcactgatcggattcttctggattttaccggtttcgtagaaggggaggtccaggaagtgacaacgttccagcggaatgttgttgtaagtacaagctgtgcgcgcttcgccacggcggatcagacctttgatggtcaggatatcgcgtgtatccatatcgccgtcttttttgtctttcaggaatttacggatttcggcgtacttttcactgatcacctgatcttcactgtttataaagatttggttgaatccgttgatgaaatgcatgaagcgaactacttcttcatcgcctacggcaatgtttcccgaagtttggtaagctacatggacttcatgtttctgttctaccagacggcggatcgtaccacccatagagatcacatcgtcatcgggatgcggagaaaatacgactactcgtttcggatatggttttgcacgttccggacgatatgtgtcgtctgctttcggtttaccacccggccatccggtaatggtgtgctgcaggtcgttgaatatcttgatatttacgttataagcagatccgaagagggcaagcagctcgctcaagccattttcgttgtaatctttattagtcagtttcaggattggtttgccggtcaattggcacagccacacgattgcgctacggatcagtttgtcattccattcgcaggaagtgaccagccatggacgttgaatgcgtgtcaggttggaagctgctgacaggtcgatagctacatgtgcattgttgtgggtctgtaagtaagatgccggaatggtatctgttacgttaccttctacacactcttttaccatgtgggctttttcttcaccccatgccaacaaatagattttcttagcagcaagaattgtggctacacccatcgtaatagaactgataggggtgttgtcgatggtgccgaatatcttggatgcttcgttgcgtgaaccgctatccagcaaaatcagtcgggtggtagagttcaggcgtgaccccggttcgttgaaggctatattacctacacggccgatgcctaacagggcgatatcgataccaccgaagctttcgatgcgctgttcgtacaggcggcagtattcaaagatggtatctttggcaatcgtaccgtccggagtaaagatattctgtttatcgatatctacatgatcgaggaacatctctttcaacgcattgaaattactgttgattgcatcttgagacaacggatagtattcgtacatgttgaatacaattacgttacggaaactgagtccctcttctttgtgcatgcgaattaattcggcatatacgctgcgcggagaatttccacccggcaatgccagtacgcagaaacgtcctgctttctgtttatcacgaataacctgtgctatttcgcaagcgatatgatttgcaccttcttctacagattcatagatgtctgtaggaattttctctaatcgggtcaataccgatctctcgaatgcattctctggtctgtaatacctgggggagaccctgttgagagtaatctgagaactaagatttgtcttcataagtttgttattaattaagtttgactgagtctttgtcgttattggaaactctgaacaaatatatataaaaacaatcaactatgcgataaggttgacagggaaattaaattaaaatctttttttacctataaatagggaggagggaacgataaatgatgggagataaacgatgaacggttttgaacaatgagcgataagtaacaggcgataaataacaaacgattaacgggctgcaccggcacagcctgttaatcgttatcgctcaaaaacgtttatcgtttagaacagggtatttgtttcaggtaccaacttacccatggcccatacggctcttacgttgaggtcttcgtccagtaccagaatatcggcatccttacctttttgcaaggaacctttgcgatcatatacccccatgatgcgtgccggagtttcggaagccatgcgaactgcatcttccagtgggatctctgctttctgcacaacggtgcggatcaggcggtccatggtggcgacacttcccgccaaagcagaatggtcggccagtttgcagactccgtcttcgataattacgcgcgggtcgaaagcctctttgctgtcactatcggcacatgcaagggcatcggtgatcagacaggttctttccacaccttttattttatatacaagtctcaggatcgtaggggggacgtgaataccgtcggctactacttctactgtcatgtcatccaacagataaatgctttcgactgtaccttcgtacttgtactctctgcgtttgtggaagccgggcattgcattatagaagtgggttgcatgagtgtatccggcttcataagctgtacggatatcttcaaattcggcttgtgtatgtgctacggaaggcagtatgcctttggcagcaatatatttaccgaattgcatggctcccggaagttccggagcagcatcccaacgcttgatgcaatgatactgttctacgatcggaatgtattcattcggatcaggatttttaatgttttccggaatttgtcctcctgccattttcatgttcaggtaatgaccttcgaggtgcagtcccaggatagggctgtttttctcttccatcaacttggtacaggtttctgcagcttgttgaatcatggggactgtagatgatgacagtgtggggaagatacttgttgtgccatgtttcatgtgagtatggaccgctgcccggaaagcatcttccgtacattccataaagtcgcggcctccaccaccatgcacgtggatttctactccaccggggactacatacatacctttgacgtcaataagttcagctccgataacggccagatcgcagtttgtgacttctaaaatcttattgtctctgataagcacggaaccgtctttcatccatccttggggggtgagtatacgtgcattaattaattgggttaacattcgtgttatgagttaaattagggtttgttttttggtacaataaattgattgtctggcaaaattagatacttttttgcatttatatactataattcaagagatatttttagtaaatacggaaatttaggcttggatatttagtaaaggagaaaggggtctgcatctttccagcaagggaatttatgacgaaaagtagtgagggcttccaggctaagttcaatggtttgtattttttcttccgaatcgggagttcctgccaggttttctcctttaggtccatataaagcggaataccccggataacagagcccgttgccgtcctgtcctatacggttcacaccgcatacataacattgattttcaatggcacgtgcgcataataatgtattccatgcctgaatacgtggagtcggccaactggctacatatataaggaggtcatattcattgttcacattcctgctccagacaggaaagcggaggtcgtaacatacctgcaggcagatgttccaaccgttgtagggaatgatcactttccggctgcctgccgaaaaatgttccgcttcgtgtcccatgcggaagaggtggcgtttgtcatagtaaaattcctgtccatcgggagtgatcaggaaagcccggttataataagaaccttgttcttcacaaatgaaactcccggccaatgacaaatgaaattctatggcataatttttgagactccggagcgtggtaccggaaaccggttcggctaatagccggctgttcatactgaatcctgttgtaaacatctccggtaaaacaacaatctccgttgttccgcgaagaggtgatagcttttcgcggagcaaacggagattttcctgtttattttcccagataatatctgtctgtacaatcgagattttcatgaataatcattcaacgtctccaatggagaagttctcgggatgttttcccttgaaatctttgaaataaagttttatttcacgcatgtccttttcaatgtctccgctgggcatgattgctttggtggaggtaactgttttcgtattgtaatcgattccgatcagcacaatagggacttgcgctttcaatgcgatgtagtagaatccttttttccagttggggttgcgtttacgggttccttcgggagtgattgcaagatgaaacttaggtcttttggcaaagacctctgccatttgttctaccagtgagcttttgcgtcctcgatttacggggatgccgcctacggccttgaacaagattcctaaaggaaagaaaaaccactcttttttcatcatgaaactggttttacggcctatcgctccataaaacagtttaccgataaagaggtccatattcgttgtatgaggtgccgcacagattacacatttatcatagttcggtaccgttacattggttttccaccccaacaggtgatagtagataaagctatatattgctttcttcattcttaattcagtttcgcgatagcgtcgatgatttcatttacctttgcattgaagtccgaacggaattttttgtagaatcctttcacgttacccggttctgtatgactgattcgactgatgaattcatcttgcattttcataatttccaccatcaactcgtcagctttctttttgtcggtacccggtataaacttactgttgatcagacactccgaaaataattcacctgcgatataatttacgttttttttaagttctcttctctttgccattattccaaatgttttatgtgagtatatagaaaatattttcggtaaagataatgactttctttggttctgagtaataaatttgaaataattaaataaatccgtgctctgtctgtccggttgtccggtcgtctgagaagggaccgaaatagggtgtagccatccgcaaggcagagctacaccctattgtccggatggctacaccctttgcttcataaggctacaccctatcggtatacgggttaagtttcttaaaaagagaatcctaaatttacgtagaatcccacgtctttggattgattggaatatcctaatgaagcttccaacggaccgaacatactgtccaggccgtatccgatactgcaaccgtaaatccggttacctttcaggattttgaaaaaattgtcatcactcaaggcgaaatttccggccaacgtgatataatgtttgctacccatgcgttggcgtagtttcaaggaagccacggcaacggaattgtgagttagttctatattgtaaattcctgcaaacgggagttgttgaggaaggtaacggccgaatacatcgcctcctaacgcattttcataagcataagggatctcttggccgatcaataccctgccataaagtgccgggatcaatgtcaggcggttacttatggagaatacactttcccaggaagcactgagtgcagagaagggggcatgtccgttatatcgggcaaagttgtctgtgtacagcgaataagctccggagaagttacttcccttagatggaaaataccctttgtcgaaagtgttgtaacgtaattgtgcaaaatagctgatgaaatattcggaattgacattcatcgtaaattccggtttcttgaagaggaaatctttgtatttgaaatactcgattcgtgctccgaacccaaaccgaaagtttttataccatacatccgaaaatccaaactcaccggaatgatatttgtaagtagtgttataggcacggtcaccatgatcgtaaatgttgatgtcattgtattggaacatgtacgaaaagttgacgtttcgttgttgcatcggctccaatgtatagtctacccgtgccatgtatcgtttgcccaatcgcccggtgacggagactttggagggaatatgagtctttaactgtgccgtagcgtttattaataatgaagctatctcttccgagtcgaaccggatgcctacattaatcgttttctcgtactttttctctagcaggaagtttagtttgtaaccttcgggagtatcggtcagtgtataactggcatttgagtaagactggtttccacgcaggatgaacagtgcctgctcaatctgacgcatgctgattctgctgttttcttgcagtttacatttcttcattaaccatttcttatcgttttcttctacatcggagaaggtgatttctttcacatgcagggtccggtcctttgagaacatggtataagggccgtgcgattggggtacgaacgtgtctgcaatgccgattttctttttgagagcgagcagagaagcccattgcttgcgggctgctacttctccccggtgcatcagggagtcgatggctgcgggagtaaaactggccgaggaatatccttctacatttacctttatgtaagtatcggtcaggccgacattgctttgatggttgtttttagttgtcaggtcgatgatttgagagagtatgtccggagcgctgtttagtttgtcgattcctttcagattgttttgtacatctaccccgatgatgatatccgcacccatcgatctggccacatctacagggtagttgttgatcatgccgccgtcaatcaggatcatactatccttccgtaccggggtgaatactcccggaatagccatactggcccgcatagctgtggcaagtattccattgtggaacacaatctgttcgccatttacgatattttgtgaaacgcaggcaaaggggatgggaagtttgttgaaatctacggaatcgtgatatcccactgtcagttccgtaaaaagattggccagattttgtccttttatgatgccacctgaaactgcatctttgggacttttggtaaacggaaacgaaaaaacatatttttctgacttttcacgttcattgagtgacatggcgctacgtttcacccggtcgctcagtaagaacatccagtcctgtttgcgcaccatgctgtccaattgctgaggagtatatccgatagagtataatccgccgataatggatcccatactggtacctactatataatcgatcggaatgccggcttcttctatgactttcagtgcctggatatgtgctaccccttttgcacctcctccactgagtaccactccgacttttttacgttcttgtgccagagcggggagtgccagaaaaagtaccggtaacagaactaatatcaatgacaaatgttttttcattatagtgttattatgaatgttactacaaatttatactattatttgataaataagtagcgaatgccattaaaagtgaaagttatggaacttatgcagaaaagaattatctttgcggcccttttgtggaattattctacactaatgggcataattccacacttttaacgaatggcagctaagttcggtaaatcattaaaattgcctttgtaagacgtatggaggcgcttttagttgaaaagatcggttcaggtataatttggtatctgatttgtaaggtagctaataaaggataagttaattttaataatacaaacaagcatgagactgttttttacgagaaaagagctaaaactgaggagaaaaagaacaattgcaggcatcgtctgtttggctttggtggcaggcatttactggattctgacacgaccacataaagtagagccggaagtgccgactgtaattgtagagcccgcagaaagggataatgtagagattttcggtgagtatgtggggcgtatacgtgcacaacaatttgtggaagtgcgggcccgtgtggaggggtatctggaaagtatgctctttgccgagggaacgtatgtgaataaaaatcaggtgctttttgtgatcaatcaggatcaatatcgtgcaaaggcagataaagcacgggcacaactgaaaaaagatgaagcacaggcattgaaagcaaagcgggatttggagcgtatcaagcctttgtatgcccagaatgcggccagccagttagatctggacaatgcggaggcggcctatgaaagtgcggtggcaaccgttgccatgagtgaggcggacctagcgcaggcagagttggagttgggttatacattggtccgttcgccgttgtccggacacatcagcgaacgtaatgtggatttggggacactggtgggaccgggtggaaaatcgcttttggctacagttgtgaagagtgatacggtgctggtggacttcagcatgactgctctggattatctgaagagcaaagaacgtaatatcaatatcggtcagcaggactcttcccgttcctggcagccgaacatcaccattaccttagcggataatacggtatacccttataaaggatatgtggattttgccgaacctcaggtagatccgcagaccggtactttttcggtaagagcggagatgccgaacccgaaacaggtattgcttccgggacagtttacgaaggtaaagctgctcttggatgtacgtgaaggagccatcgttgtaccgcataaagcagtgactatcgagaaaggcggagcatatatttatgtgatgcgcagagattctacggcagagaaacggttcattgagttgggacctgaatttggtaataaactcgttgtggagagaggtctgggtgcaggtgaagaagtggtggtggaagggtatcacaagctgacaccgggaatgaaagtgagagctactttaccccagccgtcagctgagaaaaaagagactgagtgattcccttttcctgagatagataaaaacgtataatttaaaagaaactcttcctccctctcgttgggagaggggcggggtgagaccttactgaatatgaaagttagtttttttatagatagacctgttttctcgatcgttatctcgatactgatagtcatcatcggcatcatcggactgaccatgttgcctgtcgaccagtatccgcagatcactcctccggtagtgaagatcagtgcctcttatccgggagccagtgcgcttacggtttcgcaggctgtagcaactcccatcgaacaggagattaacggaacaccgggtatgctttatatggagtcgaacagttccaattccggaggcttctcggcaacggttacttttgatgtttctgccgatccggacctggctgctgtagaaattcagaaccgggtgaagctggcggaaagccgtttgccggctgaagttattcaaaacggaatttcagttgaaaagcaggcgcccagccagttgatgacccttacattgatgtcgtccgatccgaaatttgacgaaatctatttgagtaattttgcgacgattaatgtacttgatgtaatccgccgtattccgggagtaggacgtgtgtcgaatatcggtagccgttattatgccatgcaaatctgggcagaaccggataaattggctaacttcgggctgactgtgcaggatttgcagaatgctttgaaggatcagaatcgtgaatcggctgccggtgtacttgggcagcaaccggtgaaggggctcgatgtgacaatccctatcactacgcagggacgtctttctactgtagaacaattcgaaaatattgtgattcgtgccaatacaaatggctctatcattcgtctgcgcgatgtggcacgagtttcactggaagcctcatcatatagtacggagagtggcatcaatggtaagaatgctgccgttctgggaatttatatgcttccgggcgctaacgcaatggaagtagcgaaaagtgtaaaagaggcgatggatgaaatcagtaaaaacttccctgaagggctgagctatgaggttccgttcgatatgacgacttatatttccgagtctattcatgaagtttataagaccttgtttgaagcattgatcctggtagtactcgtcgtttatctttctttgcagagttggcgggctacgttgattccgattgttgccgttcctatttcactgatcggtacatttggtttcatgctgattttcggtttctcgctgaacatattgacattgctcgggttgattcttgccatcggtattgtggtggatgatgctattgtagtggtggaaaatgtagagcgtattatggaggaagagaagttgccgccatatgaagctaccaagaaagccatgaatggattggcaggtgcgttgattgctacctcgctggtactttgtgccgtatttgtgccggtgagcttcctcagcggaattacgggccaactttaccgccagtttactattaccatcgctgtatccgtactgatttcgactgttgtggcgctgactctgagtccggtcatgtgttcgctgattctgaaaccggacaatggcaaaaagaagaacattgttttccgtaaaatcaaccattggttgaacgtgggcaatcataaatatgtaatcgctatccgtagggtaatcggtaatccgcgtcgtgtattggccggtttcggagtggtgcttattggtattttgttgattcaccggctgattccgacaagtttccttccggtggaagaccaaggatacttcaagatagagttggaattgccagaaggtgctacgctggaacgtacccgggaggtgacggatcgtgccatcacttatctggaaaagaatccgtatatagcctatgtacagaatgttaccggaagcagtccccgtgtaggtagcaatcaggctcgtagtgaattgactgttatcttgaagccgtgggaagaccgcaaggatacatcgattgaggagattatgtcaaacgtccgtcacgacctgagtgagtatccggagtgtaaagtctatctttctactcctcctgttattcccggtttgggaacctcgggtggttttgagatgcaactggaggctcgtggcgaggctactttcgaaaatttggtgcaggcggcggatacgctgatgtattatgcctctcagcgcaaagagttgacgggactttcttcttcacttcagtcggatattccacagctttatttcgatgtggaccgtgataaagtgaagatgctaggtgtgcctttggcggatgttttttcaacaatgaaagcttataccggttcggtttatgtaaatgacttcaatatgttcaaccgtatctataaggtatacattcaggctgaggcaccctatcgggaacataaggacaatattaacttgttcttcgtgaaggcttccaacggggctatgattccgctgacttctttgggaaacgcatcatatactacgggtcccggcagcattaaacgtttcaatatgtttactactgctgtattccgcggtgaggcggcacaggggtatagttccggacaggctatggagattatggagcagattgcccggtatcatttgcccgataatatcggactggagtggagtgggctttcctatcaggagaaaaaggcgggaggacagaccggattggtattggcgctggtgttcctatttgtattccttttcctggcagcacagtacgaaagttggacggtaccgattgctgtgttactctctttaccggtggctgccttgggggcttatctgggagtatgggtttgcggattggaaaacgatgtatatttccagatcggactggtgatgcttgtcgggttggcagcaaaaaatgccatcctgattgtagagtttgccaaagtgcaggtagaccgtggaggtgatttaatacagtctgccatccatgccgcccaattgcgttttcgccccatcttgatgacttccctcgcctttgtgctgggtatgcttccgatggtgctggcaaccggtcccggttcggcaagtcgtgccgctattggtacaggagtctttttcggaatgatctttgccattgtagtgggcattattctggttccattcttctttgtgctggtttataagacaaaggcaaaactgaaaaatgtaccgaatgtgaacgtgaaattaccgttcaagtctaaaaagaaaactgattgaattatgaaaagaagctatttatatattactcttttattagttgtattaactttaggttcctgtaaaataggaaaaagttatgtccgtccggaactgaatctgcccgatagtctggcgcaacatcaggacagcttgagtttcggagataaggaatggtggcagatttacactgacagtacccttcggagtctgatagacagggccttggaacacaataaagacatgctgatagctgctgcccgtgtcaaggagatggctgcgcaaaaacgtatttcaacagcaaatctgttgcctgacattagaggtaccgtgactgcggagagagaaaatgaaaaccacggtggtgatgctttcaagcgtagcgatacttttgaagcgcagcttcttttctcttgggaactcgatctgtggggaaatcttcgttgggcgcgttccgccagcattgccgagtaccttcagtctgtggaggcacaacgtgcccttcgcatgactatcatagccgaagtagcgcaggcatactatgaacttgtagctctcgatacggaattggatattgttcgccaaacattgaaagcacgtgaggaaggcatgcgtcttgcccgcatccgtttcgaaggaggtttgacatctgaaacttcttatcgtcagtctcaggttgagttggcacgtactgcaacactggtgcccgatttggaacgtaaaatatctctgaaagaaaacgatatagcttttctagccggtgaatatcccaacaaaattacccgtagccgtttgttgcaggagtttaactttccacaagagttacctgtcgggttgccttccggattattggaacgtcgccccgatattcgtcaggctgaacagaaattgattgctgccaatgcccgggtaggagtggcttatacgaatatgtttccacgtatttcacttaccggtagggtagggtcggaaagtaccgctctctccgaactgttgaaatcgccttatagcattatggaaggtgctttacttacgcctatttttggttggggaaaaaatcgtgccgctctcaaagcaaagaaagccgcttatgaagctgaagtgcacagctatgaaaaggctgtcctgactgctttcaaagagacgcgcaattcgattgtcaacttcaataagattaaggaggtatacgaccttcgtgcgaaattggaacgttcggctaagagttatgtagacttggcacaattacaatatatcaatggggtgacgaactaccttgatgtgctcgatgcccagcgtggatatttcgatgcccaaatcggactcagcaatgcgataagggacgaattgatcgctgtagtacaagtgtataaggctctggggggcggatggcaggtgcaatgacagaatcttggttggatgttaagctgccataaacaacatgaataaattgaggttctttttgaggaatttcagggccagattgatatggcgctctattgctttttcagtaatagagaagtgttctgctatttctctgttgctcatgtgcagttccctgctcatgcggaatacttctcgttggcggggggggagttgcataacaagttcatcgatatatttctttaaatcggcggcatccaactctccctccatgtcataagattcttcgactgcttgtatagctgttattttgagggctgtctctttgtaatacctacgtgaatgattgaagatcacgtttcgggttatgataaagaggtagccttcaaaacttttgttttcatccaagaaatgatgagattcccatactttcacaaatacttcctgcacaatttcctcaatatccatagaggcggtgaaatagagtcttgtgaaattataaacttgtttccagtaatgattgtataaaaaagcaaatgcttcctgatcgccatgctttaatttcctgactgtttctttttcttgcatctgttttagtaattagaggtgcaaaagtaatctttttgttctaaattgctgcgatttctacaagaatattaaaaaataacattttttgtttaatttatcttggtgtattatggctatattatcctattatatgcacttaattgggtaatatgttctttctttttataaataaaataatagcaacatatatttattggataagttctaaaggaactattcttttgtgaacttttatgcattggttctcgatcttgtcccatatcttatttccaatctcattttctaccggaatattcttattttctttccattgttttctcatttgtttttctattaaatttgaataatagagtttcttgcgttccttcttgtccaattgatctgccaatagcttcttgatcagattagtttctttgttacttttattcattttaataattatatttagatttattttgtgttatctaaaactaaatacacaacagccccatctaccaccacatgacaagagcaacttttttttagaaaagtttcttgactggtatctataatatacatgttgtttatttttctatctattaaacttctgatatttagtataatatctaataaattaattggtaataataacttctttattttttatgtgatatagcattagttcctttagaactatggtatattgctgcttctgtagctcttgttttgattgtcggtggactttggatgcatttaaatgaaggtagtaccccgatggataaatatattgaaattacagctcagaaaagcagaatgtatttattaccagatagttcgaaggtctggatgcagccgggaagttctatacgttttgccgaagatttcaagaagcatcggaatgtatggctgaaaggtaattctttgttcgaagttcacaaaaatatgggtagaaaatttagggtgtatatcgataaagcctttatcgaagtgaaaggaacttgctttttgataaagcagaacaatcccagtgccaatgaaattactttgtttaatggaagcattgaatttaatgttgaatcgactcaacataaaatagagatgaaaccacttcaggaattggtatataatcctgctgatgcagggactcaattaaggcaaatagaaaatatagagtggcaaaacggccgttataattttacacaatttaatttggaacatttgactaggattataaaccaaatgtatggttcacgtatcattatcagcgataaagtgaataaaaattgtgcctttacagggagtatccgctatgatgagtctttggaagacgttattgataaaatttgttttagcctgaatcttcggaaaaaagaaataaatcacgagattattatttacaactaatatttattaacccaatgttaaatctaaaaattgaagcatgaacaagtttttattttcttgtcagaagcggtgtctcaaatacatcgttatggctttgttactttatccgctgtctgcacttgctgcgcaaggacagattgtggttaaaggtcagtctctcactattcctcaagccatccggctcatagaaaaaagcagtcaatatacttttttctataacgctaatgatttgaaaaacacaactcttaagagtatcgattgtaaaggttctattgatgacgtcttgaacgaagtctttaaagggagtaatatcagttatgttattaaagggaatgaagttattcttaaagttgagaaaacggaaagtacacaacagaaaaaggcaaaaatcattggtatagtaacagattcaaaaaccggtgaacctatcatcggtgcaacagtgcaattactgggtactaccacaggtgtgattaccgatgtagatggtaaatttgaattagcggcatttcctaaaaatgaaatacagatttcatatataggatatgttaccaagaaagttaaagtcggtagtcaaaaggtaatgtctatcactcttgcggaagatgcccagcagctggatgaggtggtggtcactgcttttggtacgggacagaaaaaggagactatcaccggatcgattcagtcggttcgtccttcggatcttctggtaccttctgccaacctttcttcttcatttgctggacgcttgtcgggtgtgattgcttaccagcgtagtggagaaccgggacagaattctgcggactttttcattcgtggtgttgcgaccatgaacggagcgacttctcctctaattattttggatggagttgaagtatccaaagcggacttgaattcgttggatcctgaagtaattgaaagcttttccgtattgaaggatgcgacggcatcggcgatgtatggtactcgtggagcaaacggtgtacttatcgttaaaacaaaatcgggaagtgacttggacagaccgatcatcggcgtacgtttagaaggctatgtaaatactccgactaagaaaccggaaattgttgacggacccacttatatgcgtttgtacaatgaagcggttaccaatcagggaacaggggctgtgctctattctgatgaaaaaataaatggtacgattcataatctgaatccttatatttatcctaatgtggactggtacaaggaggtcttcaaagatgcgacatttaatcaaaaagcgaattttaatgtacgtggaggtacatctaaaattacttattttatgaatgtcaatatgaatcatgaaaccggaatgttgaaagatcgttccagtgacttcttctcttataaaaataatatagactacatgaaatatgcgttccagaacaacgtggattttcatctctctaagtcttctaccatttcgcttcacctgaatgtacagttgaatgatatgcatggtcctttgacaactaaggatggtaatggcgtaggcgatatattcagtgctattatgggaaccaatcctgttgattttccggttatgtttccgcagggatctgacacatggtaccattggggaggtatccttgccggaaattatcagccgctcaatccggtagctctttcaagtgcaggctacaaggatacgtttgagagtacggtagtagccaatgtaaactgggatcagaaactggattttataacgaagggattaagcttcagagctttggtttcatttaagaattggagttataatcagaagttccgtctgcaaggatataatagttatcagctttccgattataaacagaatgaagacggttcctatgactttaccaatacacctatcggagaaccgagtaatcatacgatggatgcctttttcggtaccaacggtgaccgtcggttttatattcagggatacctgaattacgaacgttcgttcggctcgcacaatgtaagtggtatgttgctttataaccaggatgattacaatacgaatgtaaacagcagtcttattgcttcgcttccaaaacgtaaaatgggtgtggcggcacgtttgtcttatgattacgatcatcggtatatgcttgaagtaaatgcgggctacaatggttctgagagttttgccaaagggcatcgttggggactgttcccatccatatcgttgggatggaatatcagtgaagaaaaattttggaagccgataaaaccggttatttccaattttaaagtccgcggttcgtatggtttggtaggtaacgatcaaatcggcagtgaccgttttgcttatctggcaattgtgaatttgactgaaagcccgtcttatacaaccggatatggtggtagtaccacttcattatcaggacctacttataatcgattccagaataatgaacttacgtgggaagtcggaaataaactgaatgtgggtgtcgatttacagctcttcaattcattaaatatcactgtcgacggattcagggagattagagataatatttttcagcagaaaaattccataccgaattatctgggaactgccagtactaaaatctacggtaatttcgctaaagtgaagaatacaggatttgaccttgctttggattatggaaaacagttgaaccggaacttttctatccagatgaaaggaacttttacctatgcacacaatgaggttttgaagtatgatgaagcggcaggacttcgtccggcattatcgcaggttggaaagagcctgaactcaatctggggatatgtagcagacggattgtatattgatgaagctgatattgcgaataatcctcagtcgactatcggtaatattgctattgcaccgggcgatgtgaagtatgtagatcagccggacgcgagcggtaattatgatggaaaaataacatcagatgacagagtggtattaggatatcccacaattccggagataatatacggatttggtccctctattacatggaagaattgggatttctctttcttctttcagggacaagcgcgtgtgtcatttatgatgagcggtttcgaaccatttggaacgcaaagtaaaaataatgttctgaaatggatttccgatgatcattggagtaaagataatcagaatccgaatgcacggtatccgcgattgacacaatataataacaacaacaatacggcgtcttcttcttattggctgcggaatgcttcgttcctgaaattgcggaatgccgaaatcggctatcgtttcaaatgggcaagaatctatgtgaacggaagtaacttgttgaccttttctccatttaagctatgggatcctgaaatgggtggaggtgccggtatgaaatacccgacacaacgtacatataatgttggtattcaattaacttttaaataatatatacttatgaagataatatataaactcctatttttgtttttgctgacgataggatatagttcctgcgactttctggatattgttccggatgaaataacgactgaggcagatgcatttaaagaccggaatgcggctaagaattttgtttattcttgctatggctatttgccgcaaagtaatgtggcatcaggcagtctcgatttgctgacaggagatgaagtgataacggcttttgaacatgaaacgtttgccagttttccaaaaggcaactatacggcttcttcgccggtgatttcttattggaatacattttttcaaggattgcgtcagtgctatatatttctggaaaatgtagacaaggtacccgacctgactgaaagtgtaaaaacagactatatcgcacaggttaagtttctgattgcttattatcattatcagttggcacgttgttacggacctattatcctgatcaaggaactaccggatgtaaatgcttcgcaagcagaatatttaccccgaacttcatatgacgaatgtgtagactggatatgcaatttattggatgaagccgcaagttcattgcctgccatacgtaccaataaagaagattacggactggcaaccagtgtaggagctaaggctgtgaaagcgaaaatgcttttgtatgcagcttctccgttattcaatggaaactcaagtttctatagcaattttacagataaatccggtagtcagttaatgcctctgacttatgatcctaataagtgggtaaaagcaaagacagctattaaagaggcgattgaccttgccgagcagaacggacatgctttgtatgtaaagcaagactataagataggtaatgaggatgcgaatccctatccggcggcaggtcctgtccggtgtcttcgaaccagcttggtcgattgggattcgcgtaatccggaggttcttctggcagaaacgcgtagtgaaggctcgtatggtatacaaaacaaatcgttaccatttgtgactgacggctgggcgtggaatggtgtcggcccgacatggaccatgttaaatcgtttttatactaaaaacggtttaccttgggacgaagatccggagtataaagataaagacaaattaaagatcgtcaatgtggatgccagccatgctgacgaggctcatgaaggaagtaaaacactcctgtttaatttggatcgtgaacctcgcttttatgcttgggtagcttttcagggtggatattacgaagtgatgaacgggtcaactaatccggcctatgttatgagtaacggtaagaaagataattcggatagcagattgatatgcgattttgtattgggaggtaactgcagtcgtggtacggccaccgtacagcgaccgggtaactatactccaagtggttatctgaacaaaaaaggtgtcgatcctaatactgttgtttctacaaatgctacgaaattgaatcagtatccctggcccattattcgtcttgccgacttgtatttggcatatgccgaagcatgtgtggagactaatgatctggagacagccaaacaatatctgaacaaagtcagagaacgtgccggtatccctacagtagaaacagcatggagtggtgttgctgcattggatcagacaaaattacgtcagattgtacggcaggagagaatgaatgaactttatttggaaaaccagaatttctgggatatgcgccgttggctgctggctggacaatattttaatgtcaaggctaaggggttgaatattgctgctactaccatagaagattatgcgatagtgaagactattgactttgagcgtaagttcgaggcgccgactcaatatctgttgcccataccttctgccgatattaacagaaatgaaaaattagtaaacaatccgggttattaatctttttaaagagaaatgaagatgaaaaaaatattgcttggcctgtgtgtgatactgggcctgataaatatgatcggctgctccagcgatgagaagtatcccatgccgacctctatagatcagaattcactgtcggctgaagccaaagccggtgctatcaaattgaaatggaccgtaccagccgattctaattattattatgtaaaagtgacctatacattacctgaagacgggaagaaatgtatgagattggcaagtgtgaatagtgataccatgttggtggacaatctgctgcatcggtatggtgacattaactttacattgcaaccttgcaatcgtgccggggaagcttcgcaaagttgcagtatcatggcacaggcacttcctgctctgaaacagatcaagactgaccggaatcctataaccttgtctgcaaaacagttgtatacagatgatcaggagagtagtgaaggacctatcgcaaacctggtggatggaaggaatgacacttatttccacatgtcatggagcagtcctacgcctttccctcactatattgtggtcgacttgggtgaagagaatgctttgtccactttcctgttctcctatgtttgtcgtgacaataacaataaagacaatcccaaagagatggatattctgggcagcaatacttttgatggaaagaattatgatgagagccagaccactttgttggcgtctttgagtaatttgcctaatacaaaggctgcgtcttacgaatcggatataataaaagccggtgcatcttaccgctatctttggtttaaggtgaaatcttctacaagcggctccaactggattgcgttggcagaactcggcctttcgaaggtaattgtgaaaacctatgatccggaaaccggagagactaccattgagtaagaaactgttttgaatttctatacatatcttttttgattgacttttgcctatgttttgagtgatattccggtctgtttcgattcttttaatcgtcagatagcttgttatcttcctcttataacaaccggaataaccgtgaaaattcatctcaaatcattagacgattcattcaaaagcagtttctaaaacaggattcaataggtacctatataatgtagtatgaatttggccacctatggttgtcagattgatgctaaatacgagaatcaagtaattattaaaaaggaaatacaagtgaagtcttttatgagaacaaaatttgtatttcctttgttttatttatcttatgtttaatttaccctaataacatgaagaaacatctaattctaatgatttctgcagctattatccctctgctgctgtatgcttgttctgctgaagaagaaagagcgttaacatcgactactcttgaggtagcacagtctgccatcgattttaaaagtgatgcagggacccgtgacatcgctattgttaccaatgcagaccattggacggcacggtctgataaagattggtgttcggttgctgtcaacgaaagtacattgacggtgaatgtgtccggatacgatggaaaagagacaagggaggcagtgattaaagttactgccgatggattggcagaaactgttaacgtacgccaattgggatcagagcctgctattttgatatcccaacagatctttaccgttgaggccagtggcagtgatatcgcattcgatgtaactacaaatgtttcggtgactatcacattgccggaatggatcaaagagaaaccggcaggtacacgtgcatccgaaatggtgactacgacgcataattacattgttacagccaatccggaagatagtgaacgtacgggcaatatcaccgtgaaagaggtcggcggagaacttgaggccttggtatctgttactcaaaaaggattgggagaatatgaatccggaaatctcgagggtatcaaagacgatattaaggttccggtagaatcaggtgaagcaagctcttttcagggtggctcgaatattgataaatcattcgatggtgatatgagcactatttaccattctaactggaataacgcgggagatcattatttccccattacgttgacttataattttgctgcgggttcggatatggactatcttatatattatccccgtacctcaggaccgaatggtaacttcaaggaagtggagatccgtgtaaagtcaaatgcgaataccagaggaaccgatgaatggaatacggtgatgactaaaaacttcggggggacgaatgccgcagtccgtgttaattttccgaaggcacaaatcggagtcacgtcggttcagtttattgtcaaatcaggatcgggagacgggcagggatttgctgcttgtgccgagatggaattttataaaaagaatccggatgcattcgatccgctcactcttttcaccgatggtacatgctctgaattgaagcccggacttaccgatgaagaaatagagaattgtccgtattcattctacaagaacatagcttactatatgaagcagggtaagtatccggcagagttccgtattcaggaatataaggcttggctccatccggatgcccagtcagaaacacataagaccagtccttatagcctgcgtgataatcctacgggaatttcggttaaagatggagagcaactgatgatttttgttggcgatacacatgggcagactgtcagtgcagtgattcagaatctggatgttcccggtggtgatggtttcggaggaacctcttatccgttgtctgaaggggccaacaagattacggcccggaataaaggattaatgtatattttgtatcacactcctgactatgaaaccgctcagcctgtaaagatacatatcgcttccggacaagtaaacggctatttcgatgtagctaaacatcaggcttccgattggaataaattgttgagtaacgctgtggataagtatttcgatgtggtgggacattatgcacatctcacattcccgaccgagcgtttccgtactcatactccggacgggaaagcattgatcgatgcttatgatcagattgtgaattcggagatggaactgatgggattgtataaatacaataaactgttcaagaatcgcatgtacctgcatgtgatgtataccagctatatgtatgccaccagttatcatactgcttacaatgacggtactctggccgaactttgtaatgtggataaattgaagacatctgcatgttggggacctgcacatgaaatagggcattgcaaccagacacgtcccggattgaaatggttggggacaacggaggtaacgaacaatatcatgtccgagtacatccagactacaattttcggacagccttctcgcttgcaaacagaagatatgggagatggcagtcgtaaccgttattccaaggcctggacccagatcattgcggcaggtgcgccacatggaaattttggaagtgacagcgatgttttctgtaaactcgttcctttctggcaattggaactctatttcggtaaagtactcggacggacacctcttcagcaatctgacaaaggaggattctatccggatgtgtacgagtatatccggacgcacgataatctgagaacggccggggaacagcagactgagttcgtttatatctgtagtctgatagctaaagccaacttgctggatttcttcacgaaatggggatttctgactccggtcgacataacagtggatgactacggaacgggcaaactcaccgttacccaggcccgtatcgacgaaatacgaagtcgtgtagaggctttgggatatccgaaaccggatgttgctctggaatatataacggataattctgtagaactttataaggacaaacccggaattgtagccggtacagccacacggagcggttcgacatttaccatgaccaactggaaaaatgtggcagcttatgaagttgtagatgaaaccggcaagaaagtctgtatctctgatgggctgttagcaccttccggtactgctacgtttaccatgaaaaccgcttggaaagacggctttaaggtatatgctgtttctgctacgggagctaggactgcagtgacgttttaaaagagactgacagatagtgccgaacaggcgaaaagggtacggagtgctatggaattgcagaagcaaggatgtaaacttcgtgcccttcgtttgctctgtggcatacctgtagagaacaaaatcatcattttctttcataattcggaaaaaaacacgaaatttgcgacacttttaagttcgaattactaacacctttaaatataagataaagaaaatgactaaaagtgcattgcaaattgccagggctgcttatcagcccaaacttccgaaagcgctgaaaggctcagtaaaagcagttgaaggcgtagctacacaatcagtagccgatcaggaagctatccagaaactgttcccgaacacttacggaatgccgttgattaaattcgaagaaggtgaagctatccagctccccgctatgaatgtaggtgttatcctttcaggaggacaggctccgggcggacataacgtaatctctggtctgttcgatggtatcaagacactgaacaaagacaacaaactgtatggttttatcctgggtcccggtggattggttgaccataattatatggaactgactgccgatatcatcgatgaataccgtaatacaggtggtttcgacattattggttcgggacgtaccaaactggaaactccggaacaattcgaaaaggggttggagattatcaataaattgggtatcaaagcactggtaatcattggtggtgacgactctaatacaaatgcctgcgttctggccgaatactatgctgccaagaatgccggtgtacaggtgatcggttgtccgaaaactatcgacggtgacttgaagaacgaaatgattgaaacttctttcggtttcgatactgcatgtaaagtatactcagaagtgattggtaacatccagcgcgactgtaactctgcacgtaaatactggcacttcattaaactgatgggccgttcggcttctcacattgcactggaatgtgctttgcaggttcagcctaacgtatgtatcatctctgaagaagtggaagcgaaagatatgtcattggacgatgtagtaacttacattgctaagatcgttgccgatcgtgctgctcagggcaacaacttcggtactgtgctgattcctgaaggtctggttgagtttatcccggctatgaaacgtctgatcgctgagttgaatgacttcctggcagccaatgccgttgagttcgcaaatatcaaacgttctcgtcagcgcgaatatatcatcagcaaactgtcaaaagaaaatgctgagatctatgcaagccttcctgaaggtgtagcacgtcagctttctttggatcgcgacccgcacggaaacgtacaggtatcattgatcgaaacagaaaagctgttgtccgaaatggtaggaacaaaactggctcagtggaaagaagaagggaaatacgtaggtaaatttgctgcacagcaccacttcttcggttacgaaggacgttgcgctgctccatcaaattacgatgctgactactgctactcactgggttacacagcttctatgttgattgctaacggtaagaccggttacatgtcatctgtacgtaatacaactgctcctgctgctgaatggatcgcaggcggtgtgcccattacaatgatgatgaacatggaacgtcgtcatggcgaaatgaaaccggtaatccagaaagcattggtgaaactggacggaaaaccgttcctgacatttgctgctaaacgcgatcagtgggcgttgaatacagattacgtatatccgggcccgattcaatacttcggtccgacggaggtttgcgaccagccgactaagacattgcaactggaacaagctaagtaagcttttccccgcattacaatagtagaaacccatcggggcggattgattcaattcccttcggtgggtttttagttcatctgaatatccctattttatatgaaacgactttctaccctatgcctgctggcagcaggctttttcattccgggacaagcacagcaggcccgtccgacggtgcttgattcggtttacgctcccctgaaagtggctacacctccttccgatgcttatatcggcttgtcgcttctcgataacggtgagatcagacactataattatggagaacaggctgtggcaggtactgtatatctgtccagtaccgatcatggtttgacctggaaacgggtgaaccgtcccaaagaaatgctttttgccgattgtcagagccctgtcagtaaggagtatattcgtctggtagatatgggggcaatgggtgtttattgcattcgtacttccggtggattgacaggaggacgtactcttacgaaggtggccgatcgtaactccatcatgattaaaccgcctgtatttatccgaaacggcaaacgtattgtcgtggctgctcacggaggggtaacaccgaaagggtgctatacctatttttccgatgatgacggtctgacctggaaatgctcgaatacagtcacatcccccgatcatcagggaggaggcttccataaaggtatccgttggaatcatggtgctgtggagcctacggtggtcgaactgaaggacggaactctctggatgttgatgcgtacttcacaagacttccattatcaggctttttctaaggacggcggacaaacctggggcgaatcggaaacatcgcctttttatggtaccatcacgatgcctactttagggcggttggccgacggacgactgttgcttttctggtgcaatacgactcctcttcccgaaaaggagggtacggacggtgtttgggatgatgtgttcaccaatcgtgatgtgactcacgtggcggtttctgatgatgatggaaagacttggaagggttttcgcgaactttacatggatcccatgcgcaatgataccgactatgccgttcatggcggcgggattgaccgtggcgttcatcaggcacagtttgtagaagtagctccgggtaaggtgctggcatctatcggtcaacatcctcttcatcgtgctatgatgatgttcgatgtgaattggttgtacgagaagagccgcttcaacgactttaccgactctctttcacaatggagtacattcaactacatgaatggtatcaaaggacattgcgcttataatcgtatacagggttgtatgctcgaaccccatccccggaaagaaggccgacaagtgcttcatctgacttaccggccggatgcttcactggtggcagatacacgtggtgcggtatggaactttccggctatgaagaaaggaacgttcaccgtcagtttacgtattcccgaagggagtcattcggtttcgttgttattgaatgatcgctggatgaatccttcggacaccgtagcccgttaccagtctatgtacgaacttccactcacccgtaagcaactcggagtgaaggatgaccgttggcacgaggtttctttggaatgggatttgttgcagaagcgcccgcaggcatgtgtccgggtagatgggcggcttcgtccgttgcgccttccgctcaagaacaaatctcagaatggaattagttatgttcatttcatcgctcctcctgctgaggctaatccgggtgtttatctggagtgggtgagggcagaagctgatggagccatctaggaatgaattcatttcaccacagattacacggactttcatagattaatgattttatttcattgagaatcaaattaaagtatctgtggtaatctgtgtaatctgtggtgaatcaaactctaaataagaataaaaatcaatgaagtcttcacgaaacacttctacctccggcaaacccgcttccggtcgtcgtacaccggcacggaagacgaaagcgaaaaagaaaactacccgcaccatgcccgtttggatgcgcaatacccttgcgcttattgtggtcggggtattttctctcactttctattatttcgttatccgcccttattcttatcgttggaaggagtgctacggacggaaggagtatggcgtttgtatcccttgtggctatgaggtgcatggcatcgatatctcccattatcaggggaacatcgactggaaggagttgaaacaaaacagagaaacggattttccgcttcactttatttttatgaaagccaccgagggaggagatcatggtgacgatactttcaaagacaacttcgaacaagcacgtcgccatggctttattcgtggggcctaccatttcttcactccacgtacggatgccttgaagcaggcggacttttttatccgtaccgtgaaactcgatagtggagatttgcctccggtgctcgatgtcgaactgacaggtaagaggcctaaaaaagagttgcaacaaaatattaagaaatggctcgaccgggtggaggcacattatggtgtaaaacctattctctacacttcttataaattcaagacccgctatctggacgactcgcttttcaatgcttatccctactggatagcccactattacgttgattcggtgaggtacgaaggtaaatggcacttctggcagcacactgatatcggaagtgtgcccggtattcatcacgatgtagatctgaacgtattcaacggttcgctcgaagagctgaggaagatgacgatgagatgaactttaccctctttccctgcgttatatttctaaaaaaaggaaatacagatgaatatagcaataagcggggcctccggttttataggcaagcatcttacagagtaccttacagaagcgggacaccgggtaatccctctggggaggcctatgttccgtgaaggcacatcggggcatttaattcaggctctgtcacattgcgatgttatcatcaatctggcaggagcacccattggcaagcggtggacaccggaatacaaaaaagaactttatgacagccggattaaggtgacgcactgcatcatccgggcaatggatgcagtaaagacgaagccgcggttaatgatttccgcctctgccgtaggatattatccagaggagggtacattcgatgaatataccaatacccggggaagtggctttctggcggaactttgttatgcatgggagaaagaggcccgccgttgtccgtcgcagacaaggctggtaatcacccgcttcggtattgtgctctcacccgatggcggggcgatggaacaaatgcttcgtcccctccgaataacgcgggtagccggtgtgatcggtccgggtacacagcctttcccctggattgctattcaggatctttgtcgggcgatggagtttattatcagccacgaagaggcaagcggagttttcaacctggtggctccgcaacaagtttcacagtatgcatttactcaggcaatggcagcacgctatcatgcctggatgaaggtggtcgtaccgcgttggttcttccggatgcgatatggtgaggcagcttccttcctggcatcaggacagaatgtgcgtcctacacgtttgctcgaggccggtttccgctttgtgaagccgacgatagaagatttcttcgaaggtacggatcatgcagctgtagatcgattggatttgcaccgctacatgggtacgtggtatgagatagcccgtttcgaccaccgctttgagagaggattatcggaggtgacggccacttatacgctgatgcccgacgggacggtccgtgtggagaaccggggatgtaagcataagaaaccctatgatgtttgtaagacagcggaaggacgtgctaagatacccgatccgtctcaaccgggtaaactgaaagtatcgtttttcctgtctttttattcagactatcatgtattggaattagatcaggacgaatacaattatgctctgatcggtagcagttctgataaatatttatggatactgagccgtgcaccaattttgccggaagagattaagaagaagttgctggatgctgccactcgcaggggatatgatgtgaagaaactgatctgggtggagcaaagagagaaaaaaataatgtagtctatattaacctaaacaaaaaggagattagaaaatggaagaatatgaagtaattcaccgcccggagcggaatcgttttgaattggagaagaatggaatgactgcctttgtggaatatgaagtcgaagatggggcactggatattatgcacactatcgtacctcctcccttggaaggaaagggaattgcggccgcactggtagaagcgacttataaatatgcctctgcgcaggggttgaagcccaaagcaacgtgttcgtatgctgtcgcatggctgaaacggcatccggcggaataaaccgtccggattgaggcttgttcggagaatgaaccgtttttgggttcaccacggattacacggattaacacagattctttgtatcttagtatcaatgctctaagcttaactcaccacagagcaacacagggtaacacagagtctcacagagaagatctttctcttcaacgctctattgaccaagagattataagagtttgtgttaatccgtgtaatccgtggtgaacttgttctgttaccattccgtcataaaatccctcggaggaagctgactgttgcccatcctcttcactgtttccaccttttcagcattgggaagaattgcttcatgtttgcaatggcctcttccttcgtcattttcacttccgagcctttattgaattcgtctacgaactgtgcgcattggttaatcatttcgtccatcgtgcattccacggtgaaatgtccgtcggcataacaataggtgcaatactcttcgtttttgctaccatccttttctgttcccaatacttccgggttaagcggcatgccgcagctctggcaaaatttctgttccattctttttctgtttttaatgggttattcaatagggatatatattcttgtcacgtaatctttttcttccgtatctggttcgcaattaagatattcttcaaatgaagttgcatcacgaaatgttgtaggcagtggatgcgagtaaatccggtcatacatttcttgcaaaccactgtagcttccgcggagtgtgtagacagcatagcgtccctgcggaatcgtcttcatgccaaaagcgccttgcggtgatacatcgtgttccactgttgcacaagcgtaaaagcggcattgttcggttttcgttactgtggggtcgtcaaagctgatgcctatccagcgggtagaaggagtcagaagaccgtttatttggagaaaatctctcagttttctccacgcttctatgtaaggttcctcttcaccataacgcccgatgatgcggatatataccagcttcaattccggttctgtcaggatttccggtttcagagactcctttttcagagtgctgaattcttcgtaacgttctgcacgccgtttgcggtaggcggtgggggatatcccgaaaaactgcttgaatgctttcgataacgattgtggcgtttcgtatccgaccatctctgccacttgcgccagacggatattcttcatttgcaggtacattaccgcacgttccactcgttgccgggcgatgtacgtagccagcggttcatgcaggtaagcccgcataatgcgatggaagtgatactccgataggcatacttcacgtgccagtgtttccacccgcaaaggttcgttgaggtgtgagttgatataatctatcacccggttcacctgttgcagatatttctcttcagtatcgctcttcattgtttttgttccgttgggttccgggacaaatgtagcgggttttactgaaagagcggttatccgatcttgctatttttttctgtcggtttctgccctgtccgtatgggtaattgtttccatatccggcgcggaatcattcgccagaaaaagacgataatggcatagcgccagtctatcaccactacccgttggcggtggttcagtgcccgtacaatccgtttggctaccttttccggccgcatcagtagcggatagtgttttccgtcgttcagtaagtcggtagatacgaatcccgggcggatgtccgtgaagcggatgttcagtttttgcattccggccagctgttccaatgcatcgatgtaggtgttctgaaaccgtttcgtagcagaataggcaggggctactcccaatccttttgtcccggcaatggaactgatgactgccaactgaccgccgccatgctcacggaagtggtggaaagcggtatctgccatccgcatgaatccttctacattggtacgggcggtatccagttcgatgtctggattcagttccatgttctggtaaccgatgccggagcttagaaggaacagatccatgcctccgacccgtctgatcaggttattgagtttgggtgttgcatccggttgggtgacatccagaactgcgatttctataaggtccggagcactgctttgcagtgcttcaagtgccggaagcctacgccctgcaatgccgaggcgccagccttgtaagagaagttgttttgccacttcgcggccgatacctgaagtagctccgatgataatggctcgtttcatatctgaattcatgtccaggggtttgaggcaaagataagaaataaaaataagacaaggtacggaatgtggaaagtgaataagctgtattttccatatcttgtcttgtaataagtcggctagcgggcggataaggttgctttataagtaaagaaccatgtcccgacacagcaagccacgataatgataccggtagagtaaagcatattgcctattcccgtcaacggggacagcagccctccaaacacgaacatcaggaatcccaacagggccgatgcattacccgaattcttacgttccatatcaagtgcaagcgttgtggaaccgggaaggattaatcctaaaaatgcaaggaggaaaaacagtgttccttctacaatccagacggatggactgaaaattagtgcagcagcaaccggaagactcatggttgtgaaacctgctactccgaaacgtagagctgctgtcgcatctttaaaccgggagacagccagactgcccaacataatgcctaatgcattgacaccgaaacagaggctgtaagcaaaaggtgagatcccgaagtggttttggaaaataaagggagatgctgcgatataggtgaacatgacccccatggcgaatgcttgtatcaagacatagcgcatgaattgcctgttacggagtaccggcagataatatttgaatgtagaaaagacattccctttttggcgtttcttaatctccaacgattccttgaaggcagacaaggcgacaatcaatagtatgcctatagccaataatatccagaagatacctttccaatccatcgctccgagtaatattccgcccaatactggggcacagacgggagctaatccctgtacggaactcagcatggcgaaaaaacgtgttagttcttttccctggtaaaggtcaatggctatggacttggaaatcacgactcctccggctccggacaacccctgcaacaaacgggcgaagataaagccatggatctccggcgagtaaaggcatcctactgtggaaatacagaagatcactaatgagaccattagaggcagtttacgtccatatttgtcgctcagtggacctatgattaattgccctactgccaatcccaccatactgaaagtcagactaagctgcaccagcgaagccgtagtatcgaaatattcgctcaacactggcagggccggcagataaaaatcggtcacgaacggaccgaatgctgatacaatccctataaatatcaggatgtaaagcctggagtttcctattcttttcgtcattgttatattgtttgattagttccggttgcaaagttgccgttatttttgcatactatttcgtccgatatcatgcgaggttcgttcaaatagtaaccaaaagcaggtcgttattccggtagaatcgcttatctttgctcaggtctattatatgtaatatgtgtaatctgtctgatgagtcgaagcagtttgagatgacgcctccgagcagcaatctttcgtcactttttcctacagggagagccgtgcgcaatccttttggtaaggtttatttcgtggttatattaaaagggaaggccatggtacggatagatggcaaaagcatgctgttgcccgaacggactttcttgtttcttccgccggggcatctactcctccggctttcgtgtacgcaggattttctttttcagtatctttcattcagtttcgactttctgtccgattttcccctgttgttgaaggcagacatatcgaatcaggttactaatgcaccttgtctgccaatgtccccggaggatttcagtttgataaagatgtattatcatttcatttatcatcgttatttggatgccgaatgtccgtcagaagttatcaaagggatgctgttctctttggtactggaagtgtgccggatgtattcgggtagaaatatttcggtagagatgtcccggcaagataaattggtagatggtttcttcagtctgttgcataaatattgcacacaagaacggatggcagccttttatgcgagccggttgtgtatatcggataaatacctgatgaggagtataaagaaacaaaccgggcaaacgtttcactattggatggcggattttatactgagagaagccaaactgatgctgagatcgacggatttgagtgtcacagagatagcggataaacttagttttccgaactcttcttctttcgcgcgttttttccgtaaatatacaggcttctcgcctgttcagttcagaaatgaagcataaactttttatgcagggataaccggctttcctgaagatgcaccttttcgttttgaaaagctgatcctatcaaaatggtagggtgatgatcactgttcgatacttgaatggaaaatctatttgtctggtaactatttacttgtactttttctttccgttttggcacgatattggctatatgcctttcgcaaaaaaaatcgtgtgttatggaagaatacctgtcgacggacatatacgttagtaaacggaataacagtctgataaacggcaaaatgatagggcgcgtacttggggtcttactctttatagaggcgggaatgtttgtactctgctccggcatatccgtggtttatggtgaaagcgattacaagtatttcctttatacggcgggtatcaacctcctgtccggtgcgttactgatgttttatggacgtggtgcggaaaatcggttgagccggcgtgacggttactgcattgtgacactttcgtgggtgtttttcacgcttttcggtatgttgcctttttatttgagcggaagtattgactcgttgactaatgctttcttcgagaccatgtcgggatttactactacgggagctacgattcttgatgatatcgaatcgctttcgcatggtatgcttttctggcgcagcctgacacaatggattggcgggctggggattgtttttttcacaattgccgtattgcccgctttcaccagtgggggagtacagcttttttccgccgagtctacgggagtaacccacgaccgtacccatcctaagattaatgtgatggccaaatggctatggacagtctacctgatattgacactggcagaaaccattttgctgatgctgggaggtatgagcctttttgatgctgtttgccagtcatttgctacgacggccaccggtggatattctaccaagcaggccagtatttcgtattggaattcaccgtttatcgaatatgtggtcgctatattcatgcttctttcgggagtcaactttgcattattcctgatgtgccttcgcggtaaagtcagtcgtcttttgagggacgaagaattacgttggttcctcggttctgttgctatcctgacttttctgatcactttcgcactggtctttcaaaatcattatgactgggagacggctttccgtaagtcgctgtttcaggtggctacggcacatacttcttgcggatttgccacagacgactataatctttggcctgcctttacgtggatgttgttgctgattgccatgctctcgggaggatgtaccggttctaccagcggtggtatcaagaacatgcgtttgctgattattgcccgctctatccggaatgaattcaagcatttattgcatcccaatgccgtattgccggtaagggtcaataagcagaccgtttcaccttcgattgtgtctactgtgggtatgttttttgctttttatcttatcatcgtcattcttggttgggcagttctcctgttcttgggtgtcggcttttccgagtccatcggtacggtgatctccagtatcggtaatgtgggaccgggattgggatcttgtggcccagcctattcgtggaatggattacccgacgctgccaagtgggtactttcatttctgatgctgataggacggttggagctctttagtgtacttttgcttttctatcccggattctggaaaagtagatgacaagggggaacgggaaaacatccgcagcgataaaatgtcattttgtatattctatcacttaccggcagccctgttttgtcccggtggcgaatggatttgaaaaaaacgattacaggcgattagggacggagcgtggtgacgccgatcttgcggcattccggcttttatgctttgtatacgcccggtctgctttcggatcgaaagtgtacggccgggaaccgagctttttgtcagttcggatcgcttcgcttcaagggtcctgataattcggaaatggccggatcaatctcccttttttaccctttcagcgttgcttggaagaggatgcaccgttggtttgaaagggatgcaccgttgttttgaaagggatgcaccgttggtttgaaagggatgcaccgttggtttgaaaggaatgcaccgttactttccttccaatgcaggctctgatggttggagtcactgcatatatttcctttttattgcatctttataagataatgaagctgcatttttgcatattcttccactcttctctgtcttgattttctatcagtgctttttgtttctataggctgttagcagaaaggaaggattagttacttttttgataggatatatatggaattagtttcaaaacgtatttttctgtttgatggatttaatcgttttcagagccgaccatgtctatcccaacaaatgcttgattgcctcccaaggagcgtaaatcagcatccggggaccggaaaagcgcatcacccgtctcatctgttcccgcatggcgggtttgtagcagtgtatgctgcactgcttgcatgctttctttttctccccgaagggacagtggtccaggcgggcgtgtgcatagtgcaacaactcttcgcaccgggggcaaagcgtgacattcttttcttttttacggcagtaaaggcggatcatcaactctactactctcttttcctgatcaatacggtttttgctcaattttaatctctgttagaattgacgcaaaagtaaccaagatctctaaaaaaccgtatctttgcaccccgaaaaaatgaatataataatgaatattaatagtaaggctaaaggatttgtgtgcggggctgtggctgccgccacttatggcatgaatccgttgtttacactgccgctttataaagagggaatgtcagtggactctgtcttgttctaccgttacgggtttgccgtgctcattctaggcattctgatgaaagtacaaggacaatcgttcgctctgaaaaagaacgaggttctgccgctgattgtaggcggactgctcttttctgcttcctcattgttgttgtttctgagttataagcacatggatgccggcattgcttccaccattctgtttgtctatccggtgatggtggcgcttatcatgttcttgtttttccacgagaaagtatcgttactgaccgtgttctgtattctgttggccctttccggcatcggactgctttacaaaggagaagggggtgagacgctgagtctggtagggatgttgctggtcattctttcttcgctgtcttatgcggtctatatagtcggtgtcaatcattccaccctgaagttgatgtcaacggccaagttgaccttttatgccctgctgttcggtctttccatttatatagtccgtttgaatttttgttcggacttgcaagctgtgccttcacttcctgcctggggtaatattctggcaatggctttcctgcctaccgtgatttcactggtatgtaccgctgtgtccattcacaccattggctccacgtcgaccgctatcttgggagcactcgaaccggtgacggctctcttctttggtgtcatgatttttggtgagcggctgacgcccaggctgatgctgggtattctgatgattctggtggccgttacgtttattgttgtgggaaagccgttgatgacttttctcaaagaagaagtggccggaggaatgaagagaaaactgacaagataaggaaccccgaaaaagtttatagccgttatacatgactacatttcactctattgacgagttgctgaaaatgatgagccgcgaacaacttttgttgaaacagatgttcggcaaacggaaacagcaatccttccggcgggagtatgcactggaactgactgaatacaaactgcaacgtatacagagcctgatcgaccacggagtgcttcgtgagaatggttcgtttctcgaaatggaggatatctacctgcactttttcgagcaggtgctcgaggtaaacgaggagatcaatacttcgtttgttaacgagcatatcagctatctcaaagataccatctcttattatcagcaagaaaaccatgagaaaaggaagaccacttacctgcgtaccattaagcgtatattgcgtaacattgccttgactaccttgcgtaatgtcatcgacctgaagcgcaacatcgacagcacattcaagaatgaaccgaactatcagatcaagaaaaagaaactggtccgcctggatgaaaaacggcgggatatcgaggcactgatacgagtgagtgaagaactccttgtcaccgaagaagaccgtttctttcgccgggttccggatgatgaactggttttggtggtggctaacgtacggatacaactcaatgaatgtttccataacctgatcgagatacagaagcaaatcatcagctacctgaaccggatagagtatcagaataagatacgggtcaaaatccgtcagctgaaatatctcaaagatcagttcgaactggaagaacggaccgatatctgccgggtgctgatgcagaaagacagtgtctggtttgagcctgcaccggcatatccgttgcgtctctctgtcgaatatctccgtaacgacgatgaagtgttagagagtatccgtaaggtgatagccacagtcggcaagcgagccatactggcccgtaatgtggccgacagcatcgctgaggagtcacttgagacccatatatccgaagaggcttacatcaacctggaagaagtgaagaagaggtttatgcaggctggtggagacttgttttcgtttgttgccgcttaccctttcacacaagaggtgtcttttgatgaaagaatcacattctattgccagatcgtatcccagttttacgaagaactccgcatcaccgacgagtatggcaggatggatggtgtggaatatgcgttgatttatccggaaaggacgggagaaatagtttaggaataaataagattcaccaccgggtaataccgattcttacagatactttggtctgaattctcaatggaattctgtgagaatccgtgtaatctgtggtgaaatgaatttaaaaccattacagtaatgattaaacaaactgctgagatatttgaaatattgagtaaaggaggatttatctcttccgatagtaccaatcccaacatccggcaactttatacggtgattgaagacaaccagtcggagttgtacgacttctttgccgccatcaacttcgtgctcgaaagcggaaacgaatactattatttttcccgtcgcgagaataaagtcgacttggaacgtaagttggagattgctgtccgttggattgatgtactcgactttatcaagacttatgacgcggccttttcatccggattccgttttcagccggctgatatggttgtgaaagtgggaaccgacttagagttgaaagagaagcttaccggcctgaaaaagcttaccggacgggaaaagcatgaagagatgattgacaaaatagtaaacgacctgaaacgtgacggctttattgaactggaaaacgagattacttccacttataaggtagtggcggctttcggctatctggaagaattggtcgcttgcattaacataccagaagagatacagaatgagatacctgaataagattatttttatcaatagtgcccgtatccaatatgccgaaatacagatagacggcaatgttcattttatcggtacacagggagtggggaaaagtacggcgttgcgtgcattactcttcttttacaatgccgataagacaaagctgggcatttcaaaagagaaaaagagttttgatgaatactattttccgtacgtcaattcatacattatttatgaagtggtggtggatgatgcttcgtattgcgtattggctttccgttcgcagggaagggtctgcttccgctttctgggcacgggctataagaaagaatatttcatttcacccgagggaaaagcatacgaagagtgggatcagatacgtgatgcgcttggcagttttgtctataagagccgtcgtatagagacgtatgaggagtatcgagacattattttcggtaatggccgggggcttcctccggagtttcggaagtttgctattaccgaaagccggcagtaccagaatatacctcggacgattcagaatgtttttctgaactcaaaacttgatgcagagtttatcaagcaaaccattatcatgtctctgaacgaagaagatgtgcgtatcgatctggggcagtatgcccatcatctgcgccggttcgatgaagaagtgaccgacatcagtaagtggttccggaaaaataagaacggtgaggtaactgtccgcaggcaagccgaccgggtgattgaactttatcgggaaatgcattatctggagcaacaggcccgtacattggccggagaattgaattacgcttttcggacagcgcgggaagtactcccttctctgcaaaaacagaaagaagagctgttgaaagaagtggcaaaggagaaacgccagttggaagaactttccgggaaatttcagagtgagcgtgaccgattgttgggagtggtcaaagtgcagaacgaaaatctgaaaacagcacgggagcgaaaagaacggtacgaatcgcaggatattcatcatgtacgggaacgggtgaatgcggagtccgaagctgtgcttcacaagcaaatgctggaagagcagctgaccatgctgactgcacgctttgacgacatcaacagccagtataaactgctgaaagaacaggcggccagtgcctttgagcgtttccgtaacgggaaaaacgccgagttgaataccctccatctgcgtgccatcgagcgtaaggaagccatacgtaaggagttcgataaaatattgaaagaggtaagggaacaggaagttgggaaactgacccttctgcgtgagcagacagaaaagaaaaaggaaggcatctatcagttgaaaatggaacgggagaagtgtttgcaccggactctttatgaagaggagttgcaagcctgccggacggagcgtgccgcactggaaaaggagaaccatgagcataggctgaagcagaaagaagctgaacaacagatggagctggtgcgccgccggtgggaattggatcagactgcccgtgagcagcagttcactgcccgccaaaaggatatcgaacagcagattacacttgctaaagagagggtagcggagatagatcgtttgctcgacaaccgtcagggttcattctacgaatggctgagtcagaactgtcaggggtgggaagataccattggcaaggtcgtggacgagaaacaggttttgttcagcaaggaactgaagcctcagtctgttccggatgccggtcaagactctttctatggcattaaactcgacctctcggctatccgtaaggaggtgaaaagtgtacaagagtatgcggcggatcaggaaatagccggtaaggaagtatcagagtggcaacagcagcttgagaagttgggagaggaaaaagaaaaggaactagccttgattcggaaaagacatcaggccacgcttagtacctgtaaggaggatgtggctcaatccacttattgtatggagcagaacgataagcgtatccggttcctgaaagcggatgaaatcaggtgggaacagaaggcaggggaggagaagcgtgtcctgctggagcaattggataaacagttggccgaggctacccgtagcctgcaggggacagtggcggaattggaacagttcaatcatctgctcgaaactcgtgtacgtcaaaaggagaaggaacgtaaccagagaatgcaagaagaggatgccctgatccgtaacaaacaagaagaaattcacctgtccattgcttccgaaaggcagaaaaccgatgaactgctggcaaccatggacaaagacttgctgcacgaactctccgggaaaggagtggatacggagcgtatcactgctttgcgtaatgaagtggcccgtacggaacaggagctggtgtttattgaccaacatcgtcgcctggtctacgattacgagaaggacaagagagaattctttgaccggatggacgaattcagaaacgaaaagcagttggccgagaaagaactggaaggcgagaaagaaaagttccgtttgaaagaggaagaattgaatctgaaagtaacgggactgaacaagcagctggctgagacaaacacccgcctgaaacatttggacgaggatattcgggagacggagaacttcaaaacgctcaatatctgtccgcctgtgttacaaacgggggtggaaacagagaatgccaagcgctgtaagaaggtgattgaggaactgactcaaaaccattaccggcagattgaacaggaaaaagacttcagggaggccgtcggtcggttttccggtaatttttccgagcagaatacgttcaatttccgtacgcggcttacgaagcgggaagagtttatgacttttgccgccgatctgaaagaatttattgataatgataagattattgattttgaacgtcgttcaaacgaggcatacaccgacttgattcatcggattggaaaagaaacgacggacatgctttcaaaagagggactgattcgtaagaccataagcgatatcaacagtgactttgtggaacgcaactttgccggagttatcaagagtatagccttgcagattgtgccgagcggtaatcgtatcatgcaacattttgtcacgatcaaagagttctgcgaccggaatcagccgggtggcccgggcatgttcagcctgttcggacaagaggattttgtagaacggaatcggcaggcggtaagtttattgcagtcattggtgaaagaactggcattgaataaagaaaaagaacttaccctttccgataccttcgaactccagttccgtattgtggagaacgacaacgatagcggatgggtggagaaactggcaaacgtgggttccgatggaacggatatcctggtgaaggccatgattaatatcatgttactaaatgtgtttaaggagaaagcatcgcatcagttcaacgactttaagttgcactgtatgatggatgaaatcggaaaacttcaccctaataatattaaggggattctggactttgccaataaccggaatattatcctggtgaatagttcgcctacctcttatcgggcaagcgattataaatatacttatattctgaacaaggataagcggaacatcacaagtgtgacacggttgataaagcaggaagtgagggaataattccctcactcacatctgcaaaagtcattggctccgcagctacagcgcggtagtaattgctctctcagatcgtcccggtatagttcgtacatttttctttgtatatcttctttcaggcgtatcaggcgatcccacagttccgcttcgcttggtgccgctgtggagaacaagtcttcaaagggaagatgataccagtgttttacctccttccggaagagattgcgtatatcatcggccgtaccggaaagtacgatgatatggtcccagttttcgttggtgtattcacggatggagtggggaggttgtgtgttcggttcgatacctgtttcctttattagtttcaggaccaacggatgaatctctgctgcgggcattgtccctgcagaatatactttcatgccttttccgaacgaagaaagaagtgcttgtgcgattcggctgcggcagctatcggcgttactgatgattaataggttcataatggtgtattgttttcctgttaacaatgttaattctgaatatatggttttgatggtttataaataaagaattagttttctacagtcaaagaacaaatcttttgtttatagaaaacaagttttaatactatgttaaaacatgctttccggaacttgcttgtttgttttgataaacagctcaatgtcaatgatatctttagatggcagtcgctctcttgtgaagatcgtctccctaaaggatttgagtcgatacttgctgatttgataaccctatctttctcaaaatctccatgccaggatccggctggttttagtaccctggtgcatctcaatgattctatgttcggctatatcggtcgatttcagcttggcggtcagtttacccaggttcttttcttttgataccagactggtgaaccatccgcaatttttccggtagttgcgactttcttcgatcatagtcagcagaaatcgaagttcaccgccctcacaccagagttcgttggcattgcctccgaagttgagccgggctttggttactttctgacctttcaggctgctgagtttgcgtagcgtaccgtcttctgcttcttctttggaactgtggaagggaggattacagagagttacgtcgaaatattcattcggagcaatgattccttcaaatattttccggctatcctgttgtagccgaagttctattttgtgagccaatgccggattacaagttacgatctttcgtgcattgtcaatggaaaccggatcgatatcggaaccgacgaaagtccatccatattccgtttgaccgataatggggtagatgcagttggcacctacaccgatatccaggcacctgtattgacgggcatttgggacagctgttttcaaccctgtcgattcattggatatatccggctgaatcaaatctgctatgtaatggatatagtctgctctcccgggaatgggtgggcacagataattcttaggaatatcccagtatcgtatgccgtagtaacttatcaagagggctttgttgagtgcctttactgcccggggattaaagaaatcgatgcttgttgttccataagcgttcagtacgatgaacttttttaacggtgggtattcctccgtcagtcttgaaaaatcgtactgtccgttatgcctgttccttttatgtaattcgtttctctctgccatgtggcaaagatacggagaatcttccggccggcaaatcgggcctgattaaaaatatgtgtctttgcaggagaattgcaaaaaggctgactgttgaagttacttatcggaaacggcatcgtcctgctgaattttgtctgtcggaaatagccatggccgtaggtgcgttaagtagtgtatgggagaggcagacaatgtcgttattttagtttaactcccaatttttgtaatctggagcggattgctccgtcattcctttcgaatatctctgttaggtcatgaatggttttaccttcctcatacaaccggagaagataattatccgcacttttttcccatggcagataggcgttaccgtattcttctcttttggaacggagagtttgttgctgttttatagggtttaatccccagtattcaatagccttgtccaactcttgtttgaattgaagtatttcgtccttgttgatgaaaatcgtttctctgtggaaatctttatttccctgatgtttactttgggtaattttcagatattcctgtccgcataagtcctgtttaatatctaaaaagatttctcctccttttgtcgatgttctataggttataacatcactgtctgcagctttcatcatgaaggtgggggctgtcggttgataatgcggtttgtgtaacaacgtgatgtttgcttttccgctaatttgtttattgatgttccctccgggcctgcaataaccgattataatatggttggcaagtgaaagaattatttcattccgttcataggctgattgatggttaatcctgtgcaccttgtcattacaggcagttacgattagtagtctcttttcttcaagtgccaatttaataggggggctccactcctcttttatgctctcagccaataccagaatgatcggtattttcttttctaatagcatatgaaagacttcctgctccatttttgaatgatttccacaaaggatacagtctctttccggtgataattgatttgtccagcgatagattgatactgtttcattttcgggtacttgtcgcgaacacaagaaggcagttttcttctttgacatgagttcgccgttacctgattggtagagtgggggagtgttgttcattatatatgctgataattgatcttcaaactgttgattgttcattgtcttaccgttatggagcttccatcccggtgattaacaaaggtaagaaaaatattgaagattagtctttattactttttatttctttctttcccgcattcttttattacttttgcctctattatttttaatcccaatatcatagtcattatgaaaagtatagaagttgtagcagccgttattcgattaggtgagaaatatctttgtgtacaacggggcaaactaaattttcatatacttctttcagatatgaatttccgggtggaaaagtggaggaaggtgaatctttgcaggaggcgcttcagagggaaatcatggaggaaatggattacgttattgaagtgggagagaaacttttgaccgtccatcatatctatcccgattttgagatcacgatgcatgcttttctttgccatcctgtcgggcaaagatatgtattgaaagaacatattgctgcacaatggctttctacacgagagatggcaatattggactgggcggaagcggataaaccgataataagaaagatttcggagcaataaaaaagtctgttttaattacgtaattccgggatgcttttctttttaggaagatgcacgtttacctctttttctactttatccttacatcaaagggatacgtaaaagtcaggtgcttatcggacatgccaaagactattttatgttgacttttttcacactccatatccgtgactcgtctgtttgtatcgagtccgaagggtttaatcaaactatttcttactattagaagcaggataatcgaagagggaagttggttaaaagctatatctgcgaactcgtcaatggagatgacgttcttgttatgcgactcttttgaaaaagagtcataataatctgccggaagataattctcgattaggctgtccggattagtttttggttgcttcattgacctgatctcttatgattacgggtttcattgtcatcacatgtcacatcatggttaggggatcgtaaagagaatattttcttctcctcttttccagttagacatacgggtttccatgaaatttccttctatagccaaaagagaatcatcggataatttatgttgtcccgtatgcttgatgaatatgtagttatctcacaagtccatttttactgaaatcataaaatgcctctatcttttcttgtgtatcggctttcaatgctaatagcaactcacgggtgaattccagataaccggtaccatttgccgtaactatgttcttatcgccgacagcctgcttttccaagtaaccatcctcgttggtatatcgctctccaccccactgtttaagtacggcaagagtgtttcccgtatgtttgacatgattcaggaagccatgggcacataaaaatgaagcagcgttacagataccaccaatcactttccctttttcgaaagcatcctgtacaatgggaaatatacgttctgcttcaggagattgccattgcatacctcctatcaagaccaagccggcataatcggagggcatagtatcaaaactgtagtccggcagagtacggaaaccacccaaggaacggactgcatccaaagtgggggctactgttttgactacatacttgatttcactacccggcatcagtccggaatggagagaggctgccagaaaggcactttcccaatcggcatattcattgagaatgataaataacacttcttgtttcattgttctttttgttttatagtttaatagtgattatgagggaatttactttattatccggtatcttgcaataataaatgctcccttcccggtaattctattttataatagtttcactgcatttcgggtatgcatgttccgtcatgtttttcgtatcgaagcgacaatgcaaatataaatataaaaactgataaaattcatcttcaaaacttttctgacaaaactaaatttcgagagaacaaagaatgatttggagtagatgggctcagtttatttcatttattatttaaccttaattttgatagattgttacctcgtgttaaataaagataaaacacgattagcggtatatgaaaatattaactttgttcttagttaaagtatcacaataccttaaaatatgactactactaggataagcgaacaaataatagatgatataaatgaaggaaaagaaaatgccttttctgctttatatgattgctattatagttatttatgcgcttatgctactacttacgtattcgatccggatgaggcaaaggaaatcgttaatgatgtttttatgaatatctggagcagtagaggtcagttaagtttccctattcataattacctattgcgaagtgtacagaatcgttgtttgaattacatccgtactttacatacacgagaacgtgtgcttgatgagtatcgggaggaactgattgcttttcaggaagaattctgcaaaaatgataataacccgttgcaattattggagatagaggaactgaaaagtcaggttaacacggtgatagactctctatccgtaaaatgtcgcctagtttttgaaaaatacttgtatgaaggtatgtctcctcaggagattgctgatgaacaggccatatcggtaaatacggtgcgtgttcatatcaagaatgcgatggatcatattaaacttcaattgggccctactgcaggcatactgtttttgtttctttacgggaggctttgagtcagttctttattccccttgtttgttttacgcattactctactcatctctctaaggaatatcatctcccacatgcctatgtaggagaatgggtaggtataggagaatctaaagtaggtcgtttatagaatttcttgcaatttatttaaaaaaagtttctttaagactaaatgtttccatatcgagatgtgtattatatataaacgaacatggaaatgatggaaaagaaacttgatacttttgaagaattgatgcttgattttctggcaggaaaactgtcggaggatggagaacggaagctacttcattttctgcagtcggatatttcttatcagcagagatataaagaaatggcacggacacgggctaaatcgtttatcggtaagtttgaacaggaaaaacaagctgactatgaggctttgtctgtgaagttaggactaaagaagaaatcggaaaagaaaaggataccgttgtggcgtactttctcgcaagtggctgctattgctttattgattcttactacttctattgcaggttattatatatataatgatgtagccgaatcgaatcaggaaatggctttgtgtcaaatggaagtacctttaggatcgcagaccaaagtgattttgccggatggttcggtcgtttgtctgaattccggttccgtgctgaagtatgatcctgcttttctccgtaaaaagagccgggaagtctatttgataggtgaaggatattttgaagtacaaaagaatccggagaaaccttttattgttcatgtcgatgatataaatgtcaaggtactcggtacggtttttaatgtgcgttcttatccggaagattctgaaatagaagtcagtctgataaaaggaaaagtaaatgtattctccgcttccgaaacccgggacaatgtgattcttgcccccgatgaacagttgacgtatgataagagaagcggtaaaatgaaccatcatcatgtagatgctttacaaacttcacaatggactaccggtcgtttgagttttgtcaatgcatcagtacctgaaataatgaaagctatcgagcgtaagtatgatgtgcggattgttatccacagtaaatatctggataaagaggtcttctcaggaagtattagccctaaacttacggttgaagaaatactggactatatggatgtcgacaataaatatagctggagtcggagtggtaatgtgattactattaccgataagtcaatcaagtagtaaccttcaaaaagaatattatggaaaactgtacgtaaaaaaacaaaaatcggagatacatattggggtatgtcctccgattcagaatttaagttatcttttaagaaaatctttaaatcagtacaaatgtatgaaaaaaaaatgtttttatagcggaatgacatatttattttgtcattccggagctaatcttttgttggtaagaacacagattttgcttttcttttttgtttttcttttgcctctctcaggtgttgcttcacccttacaagagattaggattactatccagcaaaaaaatgtaccgttaagtaaagcatttaaagaaatagaggagaaaacagattgttcttttctgattcgaaacaatgatgtaaatactaatgagaaagtatcgattgatgccaagaataagactgttgccgaaattttggggatactttttgatggtaagggtatcaaatatgaagtaaacggcaagcgtatttctgtatataaagctgtccggcagcacaccattggaggcaaacgtaaagtgaccggacaagtaacggataatatggaagaagctgtcattggtgcttctgtctttgtaatgggagcttccaatggtactattacggatatgaatgggcatttttcgttggaattacctgatgataatgcgaagttacaggtgagttatattggctataagacacaagtaattaatgtggggaataaatcgtcggtaaatattgtattggtagaagattcaaaggcattggaagaagtggtggtggtaggctatggaacacaaaagaaagtgaacctgacaggagccgttgagactgtaaagtccgatagacttgccaataaaccggttacttctattgcctctgcattgacaggtgaagctgctggtgttactgtcacgcagaattctggtcaacccggacctaatcaaggtacggtacgtgttcgtggtattggtacttggggggatgcatctcctttggttttggtggatggagtatccatgagcttgaatgatgtgattccgagtgaggtggaatcagtgtctgtattgaaagatgctgcgtcagctgctatttatggttcacgggctgctaatggcgttatcttgattactacaaagaagggtaaagaagggaaacttacttttaactattcaggtaatgtaggtttccagtttgcgacaagggtaccggagtcggtaacttcttggcagtatgccgagctttataatcaaatgcaatataatgaaggaaaaagttcctctttgtttcctcaggatcgaatagaccggatgaaagcaggtggtgatcctgacaagttggaaggtaatacggattggtatgacgaattactccgttcgggtgccccacaacataatcatcaattaactgtatccggaggtagtgataagataacctatatgatctcagccggttattccgatcaacagggtattattccttctacagattatgaacgttacaatcttcgtgttaataccacctccaaacttacttcttggctgaagttggatgtgaatatggcatatttaaatagtactcaagaagagtctgcagcaggagcagctgaggcttatcgtagaacgatgtgtgcattgccttatttgcctgttcaattctcagatggtacttattcttatgatgctgcaccttctaatcctgtacgtatggtgaacggagattatgggatgagaagaaagaacaatgactgtatgacattgttgattgctcctgaaattaatattttggacggtcttaatatcaggggtacttttgggtatgaatcaaatatatataaagaaaaaatatttaataaaacagttacttacggaagttttgagcctgcaggacagagtggacttacagaagtttcccgtaataaacaaactgaccgttgggatcaataccgcaacttgactgctaatgtcacagcttcttatgagaaaacaatcggtaaacatgatttcaaggtaatggcaggtggttctttggaaacatttaagtgggcttatacgaaagcctcacgaatggattttccaaatgatgattttggtgaaatcaatgccggggatgctactacggcagcagcagaaggtaattccacttattctgcattggcttcgcttttcggacgtgctaactatgtatatgctgatcgttacctgtttgaatttactgctcgttatgatggttcttccaagtttgcacgtggacatcgttggggattcttcccttctgtatctgctggctggcgtatatctgaggaagctttctttgaacctttgaagaaacacgtgcagaatctaaaactaagagcgtcatggggagaactcggtaatcaacgaatcaatgattatcagtttatttcgaatgtcggtaatggtggaagttatctttttggaggtacccctattatcggttataaagaggccttgatggggaatgaaataattacttgggagtcttctcgtaatttggatttcggtattgattttgctttgtttgataacaggctgcaaaccacttttgactggtactgccggacaacttcggatattttgttaaacttggaagctccgggtgcattgggaattaaacctgctatggaaaacgctggtaaaatggagaataaaggatgggatttgactgtaagttggcgttcgaacatagggaaagattttaaatacaatataggattcaatctgtctgatgtaaagaataaagtgattgatttgagaggatataaatcttcaaccaccgaattgacagctaagatagaagggcaaccgttgaatgcaatctttggtttcgagactttaggtatttgtgacaatcaagagttatatgacaaatatgctccgatgatgcagaaatacaatcctaaatgggggatgggtgatattattattaaggaccggacgggagaaggtgtaattaatgatgaagatagaactgttattggaaattctattcctcgttttacttttggattgaatttgggatttgagtacaaaggcttcgatttctcttgcttttttcaaggggtaggtaaagccgatggatatgtaacaatggaagctattcagccaatggggattaatggagcgcgcaaagaacattataaagagtctttcaatccgcaggatcctaagccgggggcttatttcccacgtattctgtccagtgattataattacgcttacatgtctcactgggtacaggatgcttcctatattcgtttaaagaacctgcagatcggttactctttcaaaataaagggactcaaccaattgcgtgtatatgcttcgggagagaatttgttcacggctaccaaataccgtacttgggaccctgaaactccagttggtgcaagaggattttatcctaatgtagcagtttattcaatgggagtgaatcttaatttttaaaccttaaatgatttatagatatgaataaaatagcttatatgacctgtgttttgagcttggcttttactatgcaggcatgtgatgattttctggattcttttccacaggatacagttacaaatgaaaacttttggaaaagtaaagaggatgcagacaaggtgttagtagatatttatgcatcactacttcctaaagatgccatcttttttgatgaggctatgtctgataatgcctatctggtatgggattggtggggaggtgctcaacaggtggcaaacggttcttatacaacaagtggcgagatacctactaatagatggaatggcagctatgaagttatccgtaaatgttggtttttacttgagggtattgaaaagattgaggatatatcagagcaagataaaaataagataataggtgaaacctactttatgttagcctataattactatgttttgacaagttattttggcgatgttcctctggtgactgaaacactggctattcctgaaagcaaacaactcgttcgcactcccaaagcggaagtagtggattatgccattaacaagttgaaagaggctgccgtaatgctggaagggctttcacaagagaaaggtagagttacggcagatgcttgcagatttttgattgcccgtatgtatttgtataacggtgactattcgaatgtattggaaactgttaaactattggagggtaaatatcaattatacagggaaggtgatacaccttatgaagatttattttcaggtgttgcagaaaatagttgtgaagtaatattgagtgtagtttgtgataaaagagttggagaaatttatacttcccacggtggtaatggaatcatgctgttaaagggcatcaccggtgaggatccttatcggggagttacgccttcaggttcgttggttgatgcttatcctatggcagacggacgattgattcatgaagccggttcttcctatgatccgaaaaaaccttatgaaggtagggatccgcgtttttatcagtctattgtatatcctaccggacagataaaatatctggatgtagaaactggtactgtcaaagaacggttatatgatccggaagatcctactaccgtacctgaacaccagtataattactctcagccttcggctaccggatatatgtggaacaaatacattgactactctgtctatgccatgaactccgtgtgggactgcactaatgatattattgtattccgttatgcggatgtgttattgatgaaagcagaagctttattgcaaacgaaaggagaaagtgcaaaagaggaagtatgcaatctgatagatcaattacgtgatcgttgttcctgtggtagagtacaccgtgaaaattataactcaaaagacgagttgatggagttattgaaaaatgaacgccgtattgagttagccaatgaaggacttcgttatatggatcttatccgttggaaagatgctgaaaagaatacgattgttacaggggtaggactaaccgggcagatgtatggtgcatatatgcgtaaagatggagttggcaaggacgacaaaactgtggatgttgacaatactcctcgtcgttatatcgaaacgcgttattttaatgcatctaaagggtatctgttcccaatacctcaaaaagaacgagatctgaatccgaacttaactcaaaatccgaattggtaacttccgttttccgattttattaaatttttaggttttcaggatacaactacttatagaagtggttggctgactattacgtagtggctctacagccactacgtggtagctcagtatctgttccgtagtagtttagagattttttaagtagttattaaattaaacaaacgatcaatgaagaattatatattcacagcagtattactgtttttaaccatcagtttatcggcgcaacccatccctaaatataaagatgcctcacagccgatagaagtaagagtgcaggacttgttgagtcgtatgaccatagaagaaaaggttgcccaattacgtcatatccatgaaggcagtatcctgaatgatgaccatactttgaatttggaaaagatgaaaaacatcatcggtacattgggctggggggctgtcgaaggacttactttagaggggatcgagatggctcgttatacctatcagattcaaaagcactgtatcgaaaatacccgcttgggtattccaatctttactatctctgagtcacttcatggggccgtgcagggtggggctactattttcccacaagctgtagcgttagggagtacctttaatcctgatttggcctatcagatgacaaaagctatttcgggtgagttgaatgcaatgggtgtgaaccatgtgttatcccctactattgatgtgatacgtgaactgcgttggggacgtgtggaagagagtttcggtgaagatccattcctggtatcccagatgggagtgcatgagataaacggatatattgacgggggaatttcgcctatgctcaaggtattcggtccccatggggtgccaacttccggattgaatttagcttttaccgaagccaacgaaagagatttgagagaggttttcctaaaaccttatgaagtagccgttaagcaaacgggtgtgaattctgtaatgaccgcctacaattctaccaaccgcatacccaatacagcatcgaaatggctgttgacagatttattacgtacggaatggggattcaaaggatatacctattccgattggggggcggtgtctatgttatatggttttcataaagtagcttccaatgttaatgaggcggttaagatggcactgatggcaggtaccgacttggaagcctcaagtgattgctatgccaatatacctgctatggtacgtttgggtgaattggacgtgaaatatgtggatttagcttgttccagagtgctttatgccaagttcaaagcaggcctgtttgaaaacccttatggacttcctatcgaagaatacgaaaaaaaggtgcgtacaaaggagaatgttgctttgtctcgcaggatatcggaagagagtgtggtaatggttaaaaatgaaggaaatctgttaccgctcgatatgaagaagctgaaatctgttgctgttatcggccctaatgccaatcaggtgcagtttggtgactatacctggagccgtaataataaggatgggattaccccgttgcagggaatacagaatctcgttggtaataaactggctgttcatcacgctgtaggttgtgatttggtatccgatgataagtcggggtttgcagatgccgtggctactgccaagaagtcggatgtggtatttttgtttgtaggctctgccagtgcttcattggcgcgcgattatagcaattgtacttgtggtgaagggtatgatctgactgatttgaatctgaccggtgtgcagggtgatttggtgaaggagatttatgcgaccgggaaaccagtggtcttgattttggtaaccggacgccctttctccattacctgggaaaaggaacatattccggctatcctatttcaatggtatggtggcgaaagagaaggggaagtgattgccgatgtgttgtttggcaaagtcaatccttcgggcagcctctgctactccataccgcagagtgtcggccatttacctatacattacaatcgtttgccttcggataagggtatctatcgttcaccgggtaccattaacaagccgggccgtgactatgtgttctcaactcccgaacccttgtggccgttcggttatggtctgagttattccgactttgaatacagtgacttctgcttcaacaaagaaaattacggattgactgataccgtacgtattcaggtaaatgtgaaaaacaagagtgccattgagggtaagtcaactgtacaggtatatgtgagagacctggccggcagtgtggtcatgccgatgaagcaactgaaaggcttttccaaggttacggttcctgcctatggaagtacgcttgccgaaatctctgtacctgtgagtgaattggggttgtatgatatgaatatgcgctatgtggtagaaccgggagattttgactttatgatcggcacttcttctgacagtatttgtttcaagaagactattcatgtgggagaagtggacgctaaggcagaaagagtttcttccgcagcttctaaggaaacgcaaacggttaggaccggcaagaagatgattgtaaaaggagtggtacgtgatgtacaggctaagacattggacggtgtgaaagtgtctgtgaaaggcagaaaagggagtgtgataaccaatgggaaaggtgaatattccattgaagctacttctgcaagtgtattggttttcagtaggaagggatatgatatgcaggaagtggaagtgaactcgcaaaaaacacttaatataactttgttgaacaagatttaaaatcaagaatattatgagtacatcaagagatagagtcagacaggctctgagtcatcagggtagtgatcgtattccggttgacttcggagctacagccgtaaccggcattcactgccgggtagtggaggctttacgcaagcattacggattgtcttataaaccggtaaagattgtcgataccttccagatgttgggtgaggtggacagggatttggccgatgcaatgggagtggattgtattggagtaggaggtacaagagatatctttgatcatgacacagaatgcatgcatgagcaagtcacaccgtgggggcagaaagtgttggtgccgatacaactcgacttgactcaggataaggaaggagatgtttatgtatatgcaggaggagataaaaactatcctccgagtgcagttatgccgaacggttgtttctttatcaatgccatcgaaaggcagcagccgattgatgaagataaactggatcctatggacaatctggaagagtttaactccattaccgatgaagaattggatgcctacaagaaaaaagtgaatgaagcatctgccaccggcagggcagtggtagccagtttcggtggcactgcattgggagatgttgcttttgtacccggtatggggctaaaagaaccgaagggtatccgcagtgtggtggagtggtatatgtccactgtgatgcgtcaggaatacttacacgaaatatttagaagacagacggacatcgccatcgcaaactatgagaaattgtgggcggtattgggtgataaagtggatgtggtattaacctgtggtacggacttcggttctcaagagtcgcaattctgctcagtggaggtttttaatgagctttggctgcctcattatcggcgtatgaacgactggattcatgaacatactacctggaaagttttcaaacattcctgtggtgctattgtgcctattttgccgggactgattgaagctggttttgacattatcaatccggtgcagattaatgctaagggtatggattccggaatgttgaagagggagtttggaagccatcttaccttttggggaggtggagtcgatactcagaagatgttgcctttcggtactccggatgagattcgcaggcatgttctcggacaatgcgaaatcttgggaaaagatggcggttttgtatttaactcagtacataatattcaggctaatgtgccggtcgagaatgtaatagcaatgcttgatgctttaaagactgtatgaaccactgataaaaataaaagatcatgaacttgacagatttatacgatgcaattttaaatggcaaacttgacagagccgttgcagtaaccaatgaagcaatctccgaaggagtacttccgaacgaaattattactaattacatgattaaggcgatggaagagattggtaatcgctttgaggcaggaaaagtgtttgtgcctaatttgctgatgagtgcacgtgccatgaaaggtgcactggatcttctgaaaccgttattacaaggagagactgatgcctatgtcggtaaaattgttattggaaccgtgaaaggggacttgcatgatataggcaagaatcttgtggcttctatgttcgaaggttgtggatttgaagttgtcaatttgggagtggatgtttccagtgagaagtttgtagaagctgcccgtacaaacaatgcagatatcatatgtatgtctgcactgctgactactactatgaattatatgaaggtagtagtagatgacttgaagatggcaggattgtatggaaaagtaaaagtgatggtggggggcgctccgatcaatgaggcttttgcacattcgataggggctgatgcatatacaagcaatgctaatgcagcggtgataatggcgaagaaactgataggagcggcttgatatggatttccgctataaagagctttcatggaaagacatttgtctggactgggatgactttgttttttctctgggtaaaggttacaagatggaaggtgaagtattgaccatgttctccgctttggaaagagaagtgactcaattttgtaaacctcgttggggatatcgtgtcttttcattggatgctttcgataaatctcggattatattgaatggatgccggttacagacaggacgcattatcactccttgtctggagaatgcggagttatgtgccctgtttgtggctacagccggtgaggaatttgaacgatttcaacagactgtcaaaaaatcagggcagattgttgaggagttcctgctggatgcattaggttcggccattgctgaggctactgtgagggaggcgtgcaaagcaatagaaaaggagttcggggcgaaaggattgggaataagctatccttatagccccggctattgtggatggaaagtctctgatcagcagattctcttttcattgcttcccaatcagccttgtggagtcagcctgactgcctcttcattaatgtgccctattaaatcggtgagtggagtggtgggaatcggtagacagatgaccaggcagaaatacggttgtgagttgtgcgggaaaaaagactgttataaaaatagattaaataaatgatgtaagatatgaatgtagatgaatggatagagtatataatagtgtcggataaaaaggttgcattacctattatgacccatcccggcattgaactgctaaataaaagagttctggatgcagtaaccgatggtgaagttcattttaagacagttgaagctttaaatatgaactatccgcagtcggcagcttgtacggtcattatggcctgacggtagaggcggaagcttttggtgcacagattcagtttagtgagaatgaagtacccaatgttatagggcgcttggtgagtaattatgaagaggtcgtcggattgaaaattcctacactggatatagctcgtattccgcaatatttggaggcaaaccgtttagctgcgaaaggattggataaaccggtttttggaggttgcattggaccgtattctcttgcaggtcgcctgtttgacatgacggaaataatgatggcaatttacacagagcctgaaacggctttgctgttattggataaatgcactcgattcattacccaatattgccgtgccatcaaagattgcggttctgccggagtcataattgcagaaccggcggcagggttgttgtccaatgaagattgtatgcagtattcctctgtatttgtcaaacgaatcgtcgaagaggtccaggatagtcattttgcagttatattgcataattgcggtaatatggggcaatgtactcaggctatggttgctacgggggctaaaggatatcattttggaaataaaatagatatgcttgctgctctggaagaatgtccttcgaatgcgttggttatgggtaatctggatccggttggaattttcaaacaagccactgcggaggaggtgtatcggcaaacctgtactttattgcaaaaaaccacagcttatcctaatttcgtgatatctacaggttgcgatgtacctcctgagattccattggataatattcgcgcgttttatgaagcggtaaaagattataatcaaaaacaataataaataaatcggtgtatcatgaaaaaactaatatttctttcattgatggcaatatgcttttgtgtccgtctttatgcacaaaccaattttaaatataagaatgcttcactacctgtagaggtaagggtacaggatctgttaagcaggatgacattagaggaaaaaattgctcaaatgcgccatattcatgcttattcaatcatggagaatggaaaactgaatgaggaaaaactggagaaaatgattggtgggcagaactatgggttcatagaaggtattaccttgcccggaaaggaatgtttgaccttgatgaatgaagtacaaaaatatatgcgcgagaagacccggttgggtatccctgtattcacgttgactgaatctctacatggctctgtacacgacggatctactatttttccacaagccatcgcattgggaagtacatttaatcctatactggcttacgaaatgacttctgccatagcaaaagagttgtcggcacaaggcatcacgcaatctttaactcccgtcatcgatgtctgccgtgatttgcgttggggacgagtggaagaatgtttcggtgaagatccttttctggtgtcgcgtatgggggtatcgcaagtgagaggttatcttgataatcaagtatcaccaatgatcaagcacttcggtgcccatggtgctcctcagggaggattgaatcttgcttctgtatcgtgcggacagcgggagttactttccatctatttgaaaacttttgaaactgtagtaaaagaagccaaaccttgggcggtgatgtcctcatataattcttggaacaatgaacctaattcttcttcccactatctgatgacggaacttttacgtgaccggtgggacttccaaggatatgtttattccgattggggagcgataggtatgctgaactattttcataaaacggcacaaaacagtgcagaagccgctattcaggcattaacggccggactggatgccgaagcttcagacaatagttacgctgagcttcagcaattggtggagaacggaatgttggatgtgaagtatattgaccaggcagtggctcgtattttaacggccaagtttaatatgggactgtttgaatacccattaccaatggaaaagaactatgataaagtagtgcatgctcctgcccatgtgtcattggctcgtaagattgctgaagaatcaatcgttcttctacagaacgaaaacaatatcttgcccttacaaatgaataaattgaaatccatagctgtgataggtcctaatgctgatcaggtacagtttggggattatacatggagtcgtgacaataaggacggggttacattacttgaagccctgaaagaaagagtcggtaatcagttgacattgaattatgccaagggatgtgatttggttacggatgatcgttcgggatttaaagaagcggtggatgtggcaaagaaaagtgatgtttgtattgttgttgtcggttcggcaagtgcttctttggctcgtgattatagtaatgctacttgtggggaaggttttgatttaagtgacttgaccttgacaggtgtacaggaagatttggtggaggccattcatgctacaggtaaaccggtaattgttgttctattatccggaaagcctttggcaatgtcttggataaaggaaaatataccggggattgtagtacagtggtatcccggtgaacaaggtggactagcccttgcagacatgcttttgggtaaggttaatccatcgggaaaattgaattattcttttccgcaaagtgtaggacatctaccttgttattataactatttgcctacagataagggcttctaccgctcaccgggcagtaagaataaacccggtaaagattatgtgttctcttcgccgaaagcattgtgggcattcggccacggattgagctatacagactttgaatatctttctgccactacctccaaagaagattacgcttgtgaagatgtgattgaggtgacgatagcaattcgcaacacaggcgattacgacggtctggaagtgccgcaggtttacgtgcgtgatatggtttccagtgtcgtgatgcctgttcaggaactgaagggttttgagaaagtgcttattaagaaaggagaaacgaagcaagtgataattaagattcccgtgtcagaactggccctctacaacaaggagatgaaaaaagtggttgaaccaggtgcttttgagttacagataggccgtgcatcagatgatattcgcattaagaaagtgataacggtagagcgtgcatccgagaaatacattcctactttgagggacaaggagaaaaaagtgtcttcaacaaagaatatgacagctacaccggtagtggtaaagggaaccatacgggatgtacaagcaaacctgttgcctcaagtaactgtcaaagttgggaaagaagaagttgtcacaaactcaaagggagaatattctattcgtgccatgtccaccgatactttaattgtgagtggaagtaagttcaagactgaacatatttctatcgaaggaaggcaggtaatcaatataagaatgttgaatcgataattttttattatgtgtctaaacatcatgaataagatagtaagctttttgtttatatgtctgcttctggcggatctgcatgcacagaatacaattaaaataatagataaagataaaacaagtacacctgtgagtccttatttatggggtagtttctttgaaatggggtttggcagaagcgacttgttgtggggtgaacttctctttaaccgcagtttcgagaatacgaaacctgtaagtgagtcaaactcttggtacacgtgttaccggggggatgtaaaagaagccaagtggtggcattccggctatgaagagccaaagtggtatctgcttgctgatggaaggaaagaagagaagttacctcttattttcaataattattggccatcggctcatggaaagtattttttgcagattgataatcgtaaaaagcaaactccaactctattagttcaggaacgcatttatattgaaaagggaaaaggatatatagtttcaggccttttctcctccggtggttacctaagcgaagagaaatactcaaaggagagtgtcccggtaactattgccatttataaagaaggtgatttccatactccgttgtcaaagactgaactggctgtgaatacaaaccaatttatcttatacagttcttcattagatgcgacggagtatgaaggcaggtgtacttatactatagaagtacctgcaggcggttgtgtagggatagatctgctgtcattgatggcagatgatgtaataaaaggttggaaacgtgagtcggttgaacgtattaagaatgaacttcgtcctaggaccatgcgaatgccgggcggatgtttcacttcgctttatgactggcgttcgggaattggtccacgtgaagaaagaccggtcagctatgatacttggtggggatgtgaattgctgaacgatgtaggtacgttcgaattggtggatctgtgtgaggcagtgggggcggaacccttcttttgtgtacctgttatgttcaataatgaatacagtgctgcagactgggttgatttctgtaataatcctaccaatgcacaacgtattgcctatggtcgtaccaaaccgttgaatgtgaaatattgggaattagagaatgaaccttaccgtcggttcgatgccgtcacgtatgccaatcgctgtgtagattttgcaaaggcgatgaaagcaaaagatccttcaatcaaaatagcggtgggtaattattggttgtttaataagaagtttaaggaaatgttggagattgtcggaccttatgtggatttaattacaaacaggggaggaactccggaagagatgcgtgctgatatcgtaattttagatgcatataacaaggcgcatggtacagacatcaaattatgccatacggagtttcgtgctccggtaacccgaaatgaaggaaataccgacggactgaatcagaaggacacagatggggaagaaaccctctttaatgcttccatccgttggggatttgccatgaatatggtggagcaatacattgcctatcagaatatgggtgggagtttctttagtgccaattatacaaacctgtccgatggttggggagaatgtctgataaatactcctaaagaaggtacttatctgaatgctccgggcgtggctttcgctctcttgaattcattggatatagcgtatcctcaaataatagagcaggaaaaggagaatcaggatattgtgattcaggctgcatggaataagagacgggacaaattgacattggtcgtactgaattttagtcagaatactcaaccttgtaaaatagattttagccagataaagaaatctttccgtgtgaggaaaggtatgaagattgctccacagtcggatttgagctttaatacattacaacatccggaagaggtgaaggtagagtcgtttgttccttcaacgggtaaaatgatgaaactcgggttgcccagcaactctttgatagtggtcgaattgcaggcggaacggagtcatggcatacatgtgaacgcttcgacaggaaacgatgcatcaatcggtagtttagcctatcctttgaagacgatacaagctgctgccgatatggctgagccgggagatacggttattgtacatgaaggtatctatcgtgaaagggtttctccttcacggggcggagagtcggaagaaaaaccgattgtctttatggcggccaaaggggagaatgtggagataaaaggttcggaagtaatgaaaggttggaagaagattaatgatacgacttgggaagtcggaataccgaataaatttttcggtgggttcaatccatatgctgaaactttacatggtgattggtttgagagaggcaagtggtgtcatacgggagagatatatctgaatgatatagccctgatggagaatccgtcattgagcaatgttttgcagaataaaggcgatagtttgttgtggttttgcaaagtagagcaagacactactcgcctgtacgctaattttggcgataagaatcctaatcaggaactggttgaaatcaatgtaaggcaatctgtcttttatccggaaagaccttatgtgaattatattgtggttaaaggatttaagctgagtcaggctgctaccccctgggcacctcctacagcagaacagattggcttgttggggactcactggagtaaaggatgggttattgaaaacaatacaatcacccattccaagtgtgtggggattactttaggtaagtatggagacgaatgggataataaatcagaatcagaagaagggtatgtcaattgtgtgaagcgtgcacttcggcacaattggaacagagaacatatcggagggcatctggtacgtaacaacactgtggcttattgtggacaagccggtattgcaggtagcttgggcgctattttcagtaagataaagaataataccgtgcatgatattagtacacagaacttgttctggggatatgaaatggcgggaattaagatacatgctgctgtagatgtggagatctcaggcaatcatatttatcgtgtagagggtggtatttggctcgattggatggcacaaggtgcaagagtgacaagaaatcttttgcatgacaacagggtcgtggaagtttcatttgaggtgaaccatggacctattttagttgacaataatctgttcctgtctccagaactcgcccaaatcaaactgtcacaaggcatggctttcgttcataatttgattgtttggaaagtttggaaactgaataatgtagatacacgtaaaacaccttatcttgcacctcatgggacggagattatgggatatcacgattgtccttgtggaaatgtctcttatttcaacaatatctttaccagggccgaaatgacagagtatgatgattgtgtattgccggtacagatggaaaaaaactgttattggggagaagcggtatcttcaggcttggataaaaatgctactgttaactccggtttcgatgcagatattcaagtgatagaaaaaacggatggatggtatctgcaaataaatgttcctgaaaactggaaggatgaaaaactccgtgacaaggttagtacgaaagacttaggtcgtgcttccatacctgatcaatcttttaataaagaaaatggaacagtgatagatttaatagaagattattggggacagaacagaaaaggacaaaagaagtattaccccggaccgatagattttacgactaatgggggaaaagtgatgttgaaggtgtatgacaaataatggatgaaaatattctatttccaaagttaaatcgcttatgcttagtacttatcaagtaaacaaacttgtgtgtaagtatgctattagagggactctccataatattgtgtaaatagaaaactacgggattcttctcgtagtttttttattcattttatcaatagggttactgtattgttataatctgtaagtcgaaataggcttatccttttgctctcacttaatattgttatatatcagggtacaattcatacgtgcatccatcctctttctgacagccgttttcggtaacccgattttcctttgtctcttttttcctatcccttctttttcccgtcccttatctttgccgggatgatccaaaaaaacaatatatttgtagtctatgcaatcattcagagtcataaagcccacagcggcactcgttccttatgtccggcattactgggtgttgagcgacgatgcgcttgcaccggtatccgaacggacgctgcccgtggggtgcgtccaaatggtctttcaccgggggcgccaactgttttcgctgaccgaaggccggttgcaaccctcttctttcatcagcgggcaggcgttcggctattccgatgtcgagtctacggggatgctggagatgatcgtagtcgtttttcagccttttgccgcaaaagcttttctccatatgcctgtcagcgagtttcgtgggatgaatgtaaataccgaagagacgggcgatcctctgttggttgatctgggcaggcggatagccgatatgccggatcggatagcgtgtatccgtctgatagaagagtttctgttaagccgtctctatgcttttcccgaatataacctgaagcgggtttcgagcgttttggaggcggtgaacctccatccgcacatccgtacggcacaactggcagatgtagcctgcctgagcaataagcagtttgggcgggtgtttgcggagtatgtaggcgctactcccaaggagtttctgcgcattgtgcggatacagcgggcgttgtatactctacaatgccagccgggcatttcgtttgcgcaactggcctacgaatgtggtttcttcgaccaatcgcacatgattaaggagttcaaactcttttcgggatatactccggcggaatatctggctgtttgcgctccttattccgattatttctctgtggaggaatgatgtctgttttctactatccggggcggatgctttgccctacttttgcggtgtgcttgggagacgtgacttccggcatacagtattcatcttattaatataaagaatatggaaaagtttattgcgttttttgagattccggcggcagatttccaccgggcggtaggattttatgaaacagtgttggacatcaaattggcggtctcggagtatgaagaggagaagatggcttgcttcatggagcagggtgaagcagtgggagcggtttcgtgggcacccgattttctgccttctgagcggggaacgctgattcatttctattgcgaagagatcggcaagtcgctggaacgtgtcctgcagaaaggtgggagagtcattacccccgagacggagattgacgctgaaggcaggggacatttcgctgtttttgccgatagcgaaggcaaccatatcggtttgtattcggataaatagcaggtgtgagtgattctcactatatttgcccgaaattgaagtatgtatagagaatatcaaccttgtggactactggctccttacgtcgataaaatttgggagttcaaaggaagtcctgagtatgggatgcgcatcaatgtcctgccggacgggtgtaccgatttgattttcgctttgggcgggataacacaacccgtaggcaacgaagggcggattatgccgtcttgccgttcgtttttcgtgggaccgatgaaacgctattcggagttggtcgcgtataccgaaacggttcacatggttggtattcgttttcatccttgcggattattccgattcatggacttgcccgtgcaggagttgggcggtcagcgaatcagtagtgccgacttagggatcaagttgttcgatgattcgtttacggaacgactctacgagcttccggatttgcggagtaggattcagtgtattgagacagtactggtgcggtcgatgcacaagcacgatgtagtggacaaacagattgtttttgcggtaaaccacattcatttgtaccacggtcagcgggagatccgtttgctggcagaagatacctgtttgtgtcaacggcatctggaacggcggttcaagctgtttaccggatttacccctaaagaatacagtcggattgtgaagttcaggcaggcgatcgatctgctgaaaaatacgacggaggcaaataacctgctctcggtagcggtgaatgccggatattacgatgtttcgcacttcttgaaagaggtcaagacgctgtccggcggtacggcagaatcattcctttctccgaccttgccgcaagaggggctgctgacgtatattgagaaataaaataccggttgggtgataaaggaaatcgcctttagaaaagcgtttcggatttggtttcgggtacaggcattgtatcgcgagtataaaataaaccatgtctgtaagaaatttagtctgtttcttattctgtaaaagtcgtttttttacaacgccgggctaggtgggcaagcttatatttgcagggattatcaatctcaatataatatacaatgaaatcattaaacgaaagagcagcagatttgctgcaaggttgtgaaacggtaatactcagttcggtcaatcaagagggatatccccgtcctgtccctttgagtaagattgcttcggaaggtatttctgagatttggatggcaaccggggaacattctgtgaaaacgaaagatttccggagcaacccgaaagcgggtctttgtttctacgaacaagggaatagcgttgccctgaccggtgaaatagaggtagtgacagatgccggactcaaacagaagtattggcaagactggtttatcgcccatttcccaaagggaccgactgatccggaatacgttttactgaagttccgttctgagcatgccacgttctggatcgacggacaattcgtccatcggaacatttaacccgttaccctgtattctgcttcttttatggtaaatcttttagcttctgagaggtaggtacaaaaaaacggtacttcgattcacatcgcagcaccgtcacaacacaaacacaaaataaaacacgacaaaactactatgcaatcttacctgtctatgccggggaggcatacggtgcgactattatggatattcccataggcataaagcgcttcaggccgatttgcataattataaacgcagaagaaatcattttgttcaggagtgagcaaaaaaaaatgtatttttttcgagttatatgtatttccccaagtctatgaccggctctcaataggctataaccgtatcgggcacattcaatagaatcgcgtagtctgttcggttcgtatggatatcttttagtaaagtgatggaatatatttcaaccgtatttccctgtgtttcctctttttgcctgatcacaaaagatacatccttggttttactggccagtactaacaattcgattaagtgacgtaaatatttgatgctgatccagatatcctctcgatgtatcttaattatactgattgattagtgaattttttgttattaaatatcggtaatagaatattctgagttaagaatcgatcgattggatgattttcttttcagagtatcggtcaatatcgtctacgaacaagaatattcttaagtcattcgtgtacttgtcccatgttttaatcagagttttaagttccttttttaattttgtagttttatcatggaaactaactttctttttaaattgtggataatcattaagctctgtctctatatatgttcaatcaaaggtagtgagaaatattattggtcaatgaacggataaaaaacaggaaactattgataattttcctattttattctcttataatcgggaaaaagaatacttttgttatcataaaataagcataatctatgaaagcatcttccaataatcttttaagcatcataaagggaccacgacagtttgtgattcccatttatcagcgtacatacagttggcaactggttcaatgcaatcaattgttgaatgatattttgcgtattagcaacgattctgccgtccaggggcactttataggttctatcgtttattttcaggagagcatacatacagtgtccgatgtgcctaaacttctggttattgatggacagcagcgcttgaccaccgtctctttgctgatagcggctattgccgattttataaaagagaatgcagtagagatagataccagcttcactaaacttcagaattattatctgatcaacccggaagaagataatgaattgcggtataaacttttgctgacccggagagataaagatacctatataaatttattgaaggggattcctcggtccgaggggatgtcacaacgcatcattgaaaactatgacttctttaaaagtaagataaacaaggagaatgtggtagctatttatagcggggtacaacgactgtttgttgtggatgtggctcttgaaaaggagaaggacaacccacaattgatatttgaaagtatgaacagtacgggacttgatttatcacaagccgacttgattcgcaattacgtgctgatggggcaagaagttcgcttgcagacctcactttatgaatcttattggtaccctatggaacaaggatatggtagtgaatatgcggcgctgtttaatagcttcatgcgcgattacttatcagtgaagacaggtaccattcctcgtatcgatatggtgtacgatgctttcaaggcctatgtgatagggggaaaagctcccgatactatcagcgaagtagtcaaagacatttatacttattccggatattacgtcaacatggttcttcacaaagagccggataagctgctttgcggggctttcaaacgcatcagccagttgagggttgacgttagttacccgtttttattaccgttgtacaacgattatgtcaacgaagttatcagtagggacgagttctacgaagctctttgtttggttgagaattatgtgttcagacgtgccatttgcggcataccgacaaatagcctgaataagacgttcgctactctctataagtcattcgataaagcgaattatatggatggtctgaaagctgcattcctattgctggatagttataaacgctttccgaacgatacggagttcaccactttcctacaaaccaaagatgtttataatttccgtaacaggaactaccttttaaatcggttggaaaattttcagcgtaaggagatggtgaatatttctgattataccatcgagcatgttatgccccaaaatcctaatctatcacacgaatggcaagaaatgttaggggaaggttgggtagaagtccagggtaaatatttacacacacttggtaatctgactctgacaggttataattcggaattgagtgatcgtccgttccaagaaaagaagagtatggagggaggtttcgacgattctcctattcgcctcaattcatatctgaggagaatcagttcatggaatgaagagcaaatacttgtgcgtgcggggcaattggctgagaaagctaaagaaatatggaggtttccgttattatcgccggagacacttgaagtttatagatctgcggagagagatcctgcagagtatacgttggagcactatgaatatctgaagggagacatacttactctgtttcaggccttgcgcagaaggataatgaatatagatccttccgtaaaggaggaactcaagaagttgtacattgcctttaaagcttatactaactttgtggatgtcgtgcctcagaaatcccggttgcgcctttctctaaatgtagcatttgcagatatacttgatccaaaaggtttgtgcaaagatgtatccaacttgggacgatggggcaatggcgatgtagaagtcggtatttcgaatatgaatgaattggatgatatcatggagttgattcaacaagcgtttgataagcaaatggaagcgaactgattgtttttgtgcgtgatgtagtctgctatgaataacttttgttcggcatgtatttaaatatgctgggcaaaagttattttttttatttctggataggtggtttgcttttgtgacagtcgtgtcggttttgaatgcaataaagaaggctttagtgcttttagaaggtctaaccaaaaaagaaactgcaaacgtatttattacatttaatttaattgttagtaaatcaaacgttcttatgaattcaaatttgaagctgaatattatgtgtcggagacacgaaaggtaaaggtacaatattttaaaagtaaccgatatataacatccatcggttcaggtggttagaatacatgaatgttacgcatggagtggtcgcacgggttactaatagttgttcgcacattatgcacactatttttaaaagtgtagcaaaggtaagaacataaaaaaagcactaatatattgaatatcagtgctaaatatttgttcttaattctcctttgcggtgcgtacgggactcgaacccgtgaccccatgcgtgacaggcatgtattctaaccaactgaactaacgcaccaattttatttttaaattaagacttgagatgcggtgcgtacgggactcgaacccgtgaccccatgcgtgacaggcatgtattctaaccaactgaactaacgcaccagaatttcatttcttaattgctatctctctcgattgcggttgcaaaggtaggcatttttccgaaacctgcaatagctgaacgaaaagttttttgaaaaaaatgaagctgttttggcttagttcctcattctgaacgtatttagtttgaaaaaaaagtgtgaaaaaataatagtcttatcaggtctcggttatcttcctgtttttccattcggataatacttattcattttatatgcctaaaatctttctatctgttataaatctatcttttaattcaaacttcctgctctgatttttcgtagttttgcaataattcgttatttttgcgaactaaatgtagaacattaaaatgaaagtagcagttatcaaatataatgcaggcaacatccgttctgtggactatgccttgaagcgcttaggggtggaagcagtgattacatctgataaagaggtgctgaaagctgccgataaagtgatctttcccggggtgggagaggccgagactaccatgcttcatctcaaggagagtggcatggatcgtttcattaaagaactccgtcagccggtgctgggcatttgtctgggcatgcaactgatgtgtcgcttctccgaagaggggaatgtcgattgtctgggtattttcgataccgatgtgaaacgttttgctcctcggaagcacgaggaaaaagttccccacatgggatggaataccatcagctgcctgaagagtgacctgttcaaaggattcacccgtgatgaatttgtctatttcgtacatagttattatgtgcccgtcagtgaatttaccgctgccgaaaccgattacatccggcctttcagtgccgctttgcataaagataatttctatgccacccagtttcatcccgaaaaaagcggtgaggcgggcgaaagaattataaagaatttcctggagctttagtccctccgggattttagaccgtaaattgaaaacagacagatgatagaattgattccggccattgatattatcgacgggaagtgcgtacgcctctcccagggagattatggcagtaaaaaggtatataatgaaaatccggtagaagttgccaaagagtttgaggccaacggtatccggcgtttgcacgtggtggatctggatggagccgcttcgcatcatgtggtcaactaccggacactcgacttgatagccagtcgcacatcgttgattatcgatttcggcggtgggttgaagagtgatgaagatctgataattgcttttgagaatggtgcgcagatggtgaccggcggtagtattgccgtcaggaaccctgacctgttttgccgttggatcgaccgttatggcagtgggaaaatcattttgggagccgatgttaaagatcgtagaatagctgtcaacggatggaaagacgaaagtacttgtgaacttttccctttcttgaaggattatacccagaaaggaattgagaaagtgatctgtaccgacatcagttgtgacggcatgctggcggggccatctttggatttatataaagagattctggcagagcatcccactctttatctgatagccagtggcggtgtgagcagtatagccgatattgaagcgttgcacgaagccggggtacctgccgttattttcggtaaagccctttatgaaggacgtattactttgaaagagcttcaggcatttctttaacggcagcatagcggggtagagttgtgtttatgcctgtcgaaagtccggtgtgtgctttgtagtgaatcatttgtcaaacgtaaaatcgtaaatatatagttgtgttagcaaaaagaatcataccttgtcttgatatcaaagacggtcagaccgtaaaggggacgaatttcgtaaacttgcgccaagccggtgatccggtggagttgggacgtgcttatagcgagcagggggcagacgagttggtttttctcgacattacggccagccacgaaggtcgcaaaacttttgccgagcttgttcggcggatagctgccaatatcagtattccgtttactgtcgggggggggatcaacgagttgagtgatgtggaccgcctgctcaatgccggtgccgacaagatttccatcaactcttccgctatccgtcatccgcagttgatcgatgatattgccaagcatttcgggtcgcaggtatgtgtgcttgcggtagatgccaagcagactgagaacgggtggaagtgctatctcaatggcggacgtatcgaaaccgacaaggaattgacggcatggaccaaagaagctcaggagcgcggagccggcgaagtgttgttcaccagtatgaatcacgatggtgtgaagaccggatatgccaatgaagccctggccgagttggcttctcaactctccattcccgttattgcatcgggtggggccggacaaatggagcacttccgtgatgcttttacgctcggcaaagcggatgccgcactggcagccagtgtttttcacttcggagaaattaaaattcccgaattaaaatcgtatctttgcggccagggaattaccatcaggtagaaagcgtaagcaaatcttagcctgaagattaaagaaagaatagaaacgaatcagactcaccacagagtagtacagggttccacagagatggttttctcttaatatcttataaacaagagattaaaacgctgtgagactccatgttactttgtggtgaatcaaactcaaaaatataataaataagaaccatggatttagattttgataaaatgaacggactcgttccggccatcatacaagacaacgacacccgcaaggtgctgatgcttggcttcatgaataaagaggcttacgagaagactgttgaaaccgggaaagtaacctttttcagccgtaccaagaaccgtttgtggaccaaaggcgaagagagtggtaatttcctgaatgtcgtttctattaaagaagattgcgacaaagacacgttgttgattcaggtaaatcctgtcggcccggtatgccataccggcaccgatacttgctggggcgagaagaacgaagagccggtcatgttcctcaaactgttgcaggacttcatcgacagacgtcacgaagagatgcccgagaagtcgtataccaccagcttgtttcagtccggcatcaacaagatagcgcagaaagtaggcgaagaggcggtggaaacagtgatcgaggctaccaacggtacagatgaccgtttgatatacgaaggttccgacttgatttaccacctgattgtattgctgacctctaaaggataccgcatcgaagatctggcacgcgaattgcagataagacatagcgactcatggacgaaacactgattcactataccgatgtagagatacatcagcaggaactctgtgtgctgagcgaagttaatttgcaactgcacaagggggagttcgtttatttggtgggtaaagtgggctccggcaagaccagcctgctcaaaaccctctatggcgagctcgatgtgactgccggtgaggccgaagtgctcggttatcggatgacatccatcaagcgcaagcacattccgcagttgcggcgcaagctgggcattgtttttcaggatttccaactgctcaccgatcgtacggtgaacgataatctggagtttgtgcttcgtgccaccggatggaagaataaacaggaaatcaaggaacgcatagccgaagtactcaaccttgtcgggatggagaataagggctataaactgccaaacgagctttcgggcggtgagcagcagcgcatcgtgatagcgcgtgcgatgctcaactctccggagattatcctggcggacgaacctaccggaaacctcgatgtagagaccggaaaagccattgtagagttgttgcataacatctgtcaggccggatcgctggtagtgatgaccactcacaacctccagttggtagccgaatatcccggacaggtataccggtgcgccgaacatcgcattgtcaatgtgacggacgaatttgtgaagaaagaaaataattaatatacatactaattttaacacagtaacgaaaatgaaagttttaaagtttggaggaacttccgtaggttctgcacagcggatgaaggaagtggccaaattgattaccgatggtgaaagaaagattgttgtcctctcggctatgtcgggcacaacaaacacattggtggagatttccgactatctgtacaagaagaatccggaaggtgccaacgagattatcaataagctggaggctaaatataaacagcatgttgacgaactttacgctactgaggagtataaacagaaaggcctggaggtcataaaatctcatttcgactacatccgttcatacaccaaagacctctttacattgttcgaagagaaagtggtgctggcacagggcgagctgatctccaccgctatggtcaactactacttgcaggagtgcggtgtgaagtccgtgttgcttccggctttggaatatatgcgtactgataagaatgcggaacccgatcctgtttatattaaggataaacttcaggcacaattggatctctatccggatgctgaaatttatatcactcagggattcatctgccgcaatgcttatggcgagattgataacttgcagcgtggcggaagcgactataccgcttcattggtcggtgctgccattcacgcttccgaaattcagatctggacggatatcgacggtatgcacaataacgacccgcgcattgtcgacaaaacggccccggtgcgtcagctgcactttgaagaggctgccgagttggcttatttcggtgccaagattctacatccgacttgtattcagccggctaagtatgccaacataccggttcgcctgctgaacacgatggatccgcatgccccgggtacattgatttccaatgataccgaaaagggcaagatcaaggctgttgcggctaagggtaatattactgccattaagattaaatcgagccgcatgttgctggcacacggtttcctccgcaaggtattcgaaatcttcgagagttaccagacttccatcgatatgatctgtacatctgaggtaggagtttccgtatctgtcgataacaccaagcatctcaacgaaatcctggatgacctgaagaagtacggaaccgttaccgtcgacaaggatatgtgtatcatctgtgtcgtgggtgacttggaatgggagaatgtaggtttcgaagccaaagcgctcgatgccatgcgtgacatccccgtgcgtatgatttcgtttggcggtagcaactataatatctccttcctgattcgtgagtgcgacaagaaggtggctttacagtcgctcagcgacatgttgttcaacggcaaatagaaaccgaattaggttcaccacagagtgacacagagtctcacagagttttaatcttttgataatataataggatgatgaagagaaaaaactttccctgtgaggctctgtgtgactctgtggtagatcaaactcaaaactgattagtaacttttcaaaatgaaaactgtattccccattcataaatttcgcgagttgccgactcctttctattattatgatacgaaagtgcttcgcgacacgctggcgtgcgtcaaccgtgaggtggcacgttacgacaatttcagtgtacactatgccgtcaaggccaatgccaatcctaaggtactgaccatcatccgcgaaagtggactgggtgccgattgtgtcagcggaggcgaaatccgcgctgccatcaaggccggtttccctgccgggaagatcgtttttgccggagtcggtaaggctgattgggaaatcgacctgggactcgattacgatattttctgtttcaatgtcgagtcggtgcctgagttggaagtcatcaacgagttggctgccgccaaaggtaaagttgccaatgtagctttccgcatcaatcccaatgtaggtgcgcatacccatgccaatatcactaccggattggccgaaaacaaattcggtatcagcatgcacgatatggataaggtgatcgacgtggctttggagctgaagcatgtgaagttcatcggtcttcatttccacatcggttctcagattctcgatatgggcgatttcatagcgctatgcaaccgtgtcaacgaattgcaggataagctcgaagcccgtcacatccttgtggagcatatcaacgtaggcggtgggctgggcatcgattatgatcaccccaaccgtcagcctattccggattttgccgactatttccgtacatacgacgagcacctgaagcttcgtccgcatcagactttgcattttgagctgggacgtgccatcacgggacaatgcggttcgctgatttcaaaagtactttatgtcaagcaaggtaccaacaagcaatttgccatcctcgatgcgggcatgaccgatttgattcgtcctgccctctatcaggcacatcacaagatggagaaccttacttccgaagatcctgtggtcgaaacttatgacgtggtgggccccatctgtgagtcgtccgatgtattcggcaaggctgtcgatctgaataaggtgaagcgtggcgatctgatagcccttcgttctgccggtgcttatggcgagattatggcttcaggctataactgccgtgaactgccgaaagggtacatctcagaggagttggtgtaatgctgtcataggccggttgtccggtagtccggatgatttaaggaagatttctcttcttttttcactttctccgaacaacctttcttttaaaattgttatttttgtagtgattttaataacctaaaatgaatacgatcatgatttcagaaaaattacagaatgcaattaacgagcagatttcagccgagatgtggtcttctaatctgtatttgtctatgtctttctattttgaaagagaaggtttcagcggttttgcacactggatgaagaagcagtctcaggaagagatggggcatgcttatgccatggccgattatattatcaaacgcggcggtatagctaaagtagataagattgacgttgttcccaccggttggggtactcctcttgaagtgtttgagcacgtctttgagcacgaacgccatgtttctaaactggtagatgccttggttgacattgccgcagccgaaaaagataaagcgactcaggatttcctttggggattcgttcgcgaacaagtagaagaagaagccaccgctcaagggattgtcgataagattaagagagccggtgatgccggtatcttctttatcgattctcagctcggtcagagataagttccggccgacgcaagcctgaacgatggacagtaaacgatgaacaagctatgcgatgcagcgtggcctgttcatcgtttatggtttaaaggcggttcatcttatttcttccgccgtatgcttggatagttcttttttaaaacttatatttgtaggatagatattattcgtatatgatggaacagaaagacaggtatattcgttttgattgggcggtgaaacgcctgttgcgtaacaaggccaatttcggcgtgttggagggttttctcaccgttttgctgggtgagcccatccgtatcgtcgagattctggagagtgaaggcaatcagttgaatgaaacggataaattcaaccgtgtcgacataaaggcgcgtaacagcaaagacgagatcattattgtggaggttcagaatacccgtgagatttattatctggaacgtattcttttcggtgttgccaaggcgatcacggaacatatcgagttgggtcagctctactctgaggttaagaaggtgtattccatcagtatcctctactttgatatcggtcgtggtactgattacctttaccacggtcagaactctttcgtgggtgtccacacgggcgattttctggaggtgagcaccaaagagaaggacgccatcgtccgtaaattgcctgccgagatctttcctgagtatttccttattcgtgtgaacgagttcaacaaagtggctgtcacgccccttgaggagtggattgaatatctcaagacaggtgtgatccatcccgacaccaagactccgggactggaggaagcccgtcgtaaacttgtctattataacatgaataaggcagaacaattggcttatgatgaacatatcaatgcgattatgattcagaatgatgtatt

SEQ ID NO: 5086 - DNA, 146789 bp, Unknown
  gut microbiota DNA sequence
tcatcccgacaccaaggctccgggactggaggaagcgcgtcgtaaacttgtctattataacatgaataaggcagaacaattggcttatgatgaacatatcaatgcgattatgattcagaatgatgtattgagtacggcagctatggagggccgccaggaaggtcttgccgaaggtcgccaggaggggcttgccgaaggtcgtatggaagagaagcaggcgaatgcccggaggatgaaggcattgaacctgccggtcgaaaccatctgtcaggtgacaggattgtccgccggagagatagagaacttgtaaattccgtcttctccgtcttattctgtcttcccctctattcatgggggatgtgttaaaactcgtatttaccatagattacgcagatagatagtattggttgtcaatagattaaaaattattttgtgtaaatcagtgtaatctgtggtgagttatgaaacatcctctctttgtcaggtccctgtggtgactgaagcacgtatttatgggttggggattcaagatctatgtttttttccggaataggttcagtcgatgtattcatagtatttcatattacaggttattaagtgtaccgttctttcccgaacggtatgacaaagttaagcatggaaaggcagcgatgcaagaaagtgatgcagagtgccgcattacggcgcaaaaagtcacagtgtccactgcaaggcaatgcacgctctgccggggtgaaaccgagcctcgtccggactcttccggaccctctgtttccgtcattcggagcctctgaatcaccaacatggataccaacatgctttagtattcgtaatacgctgttgctcagctttctgtgcgagcgaaattcgaggccgccaacatgcagacctgcacataaataaataataaacaaaagatatataaaatatatcagtcgaatttgcggtcggcgaacagtttttgagtctgatccgccgcaccgggcattctccggaatttaccacagattacaccgatttccacagataaacagtaagagctatccatagattaagctcactctgtgtaaatctgcgtaatctgtagtgctcaagttttatcctcctctttctctcttaaaatatcccagtaccatgcaaggcgacagctttatttttaattatgggtaactttgaaataacctacaaatacagaatagttttctattccttcatgatttcgattgcagctttccggtgggttagaagagtctatggatttgcccgaagcatccactctgcagataatatacgattctcctactttatgggaccatagttcatcgctatcttcacggtaaaaatgaaaatccttcagtttgtttccatccgtcggagaaggagcgaatgctaatgctactctgtattcattttcaccaagaggtgtgttctcttcacatggaataaaatctgtagcgtttcccatttttcctgtttggatgtctgcttttatgtactccataaatattcttttcagtttttcgatagtatactgcccatagttagtgtcttgattactgaccattcctggggataggtgtatgttttcttttactgttgttacattcattgcatatgcataacaatttgcatatctgcataccccttcccagttctccgcattaaaaaccggacgtccatttacatatttgtctctattatctgcatcaatcatgttttgttcattagacttttgaatttttgccattataatcttaattattaattttctcctactctctacaaggcttttcggaatctgcctatgttattttttctgtaagcttacacggtaaagatacctcatgatttttaactataaattatcctttttccaaattccgaaaactttcttccgaagataccaaatggttttctttacgccaattcactacagattacacgaagctgcgttgacggctaccactgctgctattacatgaaggtcgggaggcatatggactataagttttccgccataaggtttacttggttctactccttgatcattgcaacttgcaatgtaagcgtcaattgtattttcaaagtcatttttgagcttgttatcacgaatataaacaagcaattgcttcattatatactcttttataatattagaagggtgaggtttgtatgtgatgtatgaatctttgctgttcgcgcttacaaactcaactcgtaaacctgacgtactccttttgctgccatgcccaaattgttactatgctttttatttatcaataccgatatgtaacattcatgtaaaacagtggtatcttttgagatacaacgcgtaaaatacaaaaggaaatgttatctttgtatttacgagcatcagaaatataaagaagggacaattgtatggaacggttattagagttaacagatatagaagtacgtatggggtttgttgcgtcatgtgtagaagcggccgcaaaacacgtggggtgtacttatcttgaaatgtaccggcggatgaaacgtgtaggattgataaatgattatatcattcgtcactataatacaattcatactgaaagtcgtgagagcataacctgtagtgttttagaatgcctacataattgggaggcctatcaggggattagtgccccgaaaggaactaatctttatgtgttgcggcaaggagagaaagggggtacttcatgttaaaagtctatcatggtgccacatgtatagtgaggcggcctctttgcaatgcggggcgtccgaatttagatttcggccggggattttatgtaacagatctgcgtgaacaagctgtcagctgggcagaacgccagagtgccggtcgtggtctggagtcgttgcttaatgtttatgagttagatattgatcgggttcgtgttacttatcgttgtcttcgttttgaagcctatgatgaagcatggcttaattttatagcgaatagtcgtaaagggcttcagccgtggcaaaattatgactttatagagggtggggtagctgatgacagagtggtggataccgtaaatctttatttgttaggtatgatgaccgctgatgtggctcttgaacgcttggcgcaacatttgcctaataatcagatgtgcttgctgagtcagccgttgataggcgagtgcttacgctatatagatactgagttattaactgatatggaacacggaaaggagggcgtatgatgaatgatgatgtcgtaaaagatataattcaatggcaacgtatcggttgtattgtcgtccgactttccgagcgtttaaatatttctccggaagaagcttttgatgtgttttatgaaagtgatacctgtcgacgttttcacgatcctgataccgggctttatctttatggagatctttacgttgtagatgaagtgattcgtgaactgcaagataagcagggataaactataggaggatatattgatgtctttttctatatgaatatttgtccttttgaaatttctttgtatatttatgtcggatactaatggattgaacaataatgatatgttgaaagtctaaaataaaactgtactattaatggaggcaaagcaaataaaaatacaaaaacagaataatagttcatgcgtgaaaagaacttcgcatactatgaatatggtggataatcgtataaatccacaggttcagttaatagcgtctatgcagagtgttcaacgaaaaggtaataatcctatattacagtttgttaaattatcatgtaaggcagaagttagatccaataaatatagagcaaatgcagaaacaactaatgtagatactgctacacattgggcagaacgaagaattaaaaatagtccgtttagtactaattttgaaaatgtaactaatcagtacacaaatcagaaatttagaactccatattcttgtgctgagcctaaagcattggctgaagctataagtcgtatggggccttccattaggtttattaatcaagcgaccatatatccagcgatagttgaagaaaaagatccttgggatagtcctaaaataaaagtaggagatgtatttactcgatgcttaaattgtcgacaatgggccggaaaggggaaagataaagtagatattgatgtccttcctaaaaaataaattcttttcatacgtcgtgtgtagaagcaacaatgctcaaataggcgggtcgtttttttatatactccccaacaacacattactcttttaaagagcagaggcttggtaataacaaacgagcgaaaagcggcagattatttatataacatcggctacttccccttcatcctcctctttctctcttaaaataccccagtatcgtgcaaggcgacagtttgtggcggtcgtgatagcgtgattcgaactcgtagcgggtgcagagccagcggcagaagcagcgataagtgatgcgcaggttcaggcgcctttgcagatcttcgtaaaacagggcgatccgggtaaaaaagtcgtttatctgcttttgggggatttttcgtttccggggggcttgtggtgaggcagcctcttcctccttggctatcaggtaccgcagcacacggatgtctttttttaccgtttcttcttgttcgtgcagtctttgttgtttctcttccttctttcttagtgactctttcaggtcttgaatgctctttttcatcttactttgaggtttgcatgggatggctggatgccaatgtttgttaaaatgacgttaggatcggcaaagatatacaaaaagagtatagcatatcgtcccggggattgttctgcaaagtctctttagatgttttttgtaaagatatagattcggttatccgactatttacacaatttatatttaaagaagatttgtaaactaaaaacaaggaataagatgaatgaaacattaacagtatttatgatttcggagattgaaaggctccgtgaagagggacgtgaaccggcccggcgtatctaccataatatgctgcgtacgctcagggagagtgcaggaaaagaggagatcggatttgaagaggtgactccggtgtttctgggcaagtatgaacattggctgctgggcaagcggttgagctggaacacggtatcgacttatatgcgtgccctgcgtgcgggctacaatcgggggatgaaggggcgtccgggatatgtcaccgggcttttcgataaggtatacaccggtacgcgctccgacgtgaagcgtgccgtggatgcccgcacggtggggcgtatgatccgcatgtcggggtgtccggatgaatcggcctcggcgaaggctgtggactggtttgtactgatgtttatgctgcggggcatcccgtttgtcgatctggcacacttgcgcaggagcaatcttgataagggggtgttgacctactgccggcataaaacggggcaggaggtcagcattagcgtgcctcgtgaggcgatggaaattatcaataggaggatggttgagaactgccatccgagttatctgttgcctattttggggcagccccgcacccgaaagcggcatacaaagaaggcattgactccttatcaggagtaccaatatgcgttgcgtaacctgaaccgccggttggaacgggtgtcggtggatttgagattgggcggcaggctcagttcatacaccgcgcgccacacgtgggccacgattgcctttcatcaggagacgcccgtgggagtgatcagccgtggactgggacactcttcggtaaaagttacggaaacttacctgaaacctttcggggatagggaagtagatcggacaaacaggaagatactcaactatgtgctgaatgcggtttaaagataaaatgatttgaatgtattacacttatatacagggatataaatagtctgttactttgtaggtaacggcaatgaataattgctgcaaaattggatattatttttcacacaaacaaataaaaaggcaagtttctcaataaaaagataattaattttaaaaaagatgcatgcttagcattagttttccctattttctcttaaaaaagcaataagaagggttgtccacgttgatgtaatttaacgcgtacgaacattttattgtcatcatcggatgtattttattatttaattcatattattgggttcagaacgctttctgtattcgttatctgttaaatgccgttacctacaaagtaacggttgatcacacaacaaaacaaaatagcttatgcttacgccgttaactttgacagccatatctgtcttacgtcatatttcctctcacgaaacaggaaatctccaggatttggaatgtggttgtaagcctcttgacgaactcctgggtcaactggaatccgcgggggtgatacgtgtcaggacagaccaatccggcagtggcattccgaaaacctatgaactgacccgccctcttttccgtatctccctgctcgatttgatggaagccgtggaccagcatctgaactgtaatcaaccggattgtgagaaaatgtatgcacgttatcattatgccgcccataagctgggcattgtcaaccagatgacccgtgcctatctgtcggagatacctctgacagatttataggcggattggcggatatgtttcagataaactaacagaatgaaaaaacaactattcatattgcttttgcttgtttcgggcaatgtactggcgcaacgggcagcggttaaaaccaatttgctgcacgatgcagcgacggcaccttcgcttgctgccgagtgggcgtttgcctcccgctggacactcgatgttgcgggaagcgcctgtccgtggaattttgcggacaaccggaagtggaaattctggatgacgcagggtgaggcacgctattggctttgtcagtcattctacggacactttctgggtgtgcatgccggtgggggagaatacaacctgagccgggtgcatcttccttttgtttcccgttcggcttcttaccgctacgaggggtgggcgctgatggcggggttttcatacggttactcgtgggtgctcggcaaacgctggaatctggaggctaccataggtgcagggtgggtgcatgctcaatacaaacgttttaattgtccggtctgtggtgaatatcggggagcgaacaagaaaaattttctggcgccgacccgtgcgggcatcagtctgatttatatgttaaaataaaaagtcttatgaaagagaagatacgatcgacccgtttaagaatgtgctttcggaagatgccgccggcagtctgcttcctgacgctctttgcgctgtgcttcggtgcgctgtctgtccgtgcggcagatccgtccggaagagtagcccttaccgccgtccgaatgcagcgtgcgggtggacaggtatatgtctcgtttgccgtaaagatagccccccgtgcagtgcgtgcccgtcaccgctgggtgattaccccttgtctgggcaacgcctcggatagtgtgttgcttggcccgtttgtggtgacgggacgcatcatggcgcgcgaggaaaatcagcggcgcctgttggccggccttccggaccgtgacgtcaatcatcggtggaccgcccgcaatggagacaccttcttgtataccgatacgttgcgctatgccccgtggatggagaatggcttgaacctgcggctcgacatcgaccgggaaggttgctgccgggtacagacagtgggaagcatcgtctcctccggcgcttttccggtggctttgccctatcgtccgtcggttagtgagctcactccgagggtgagccggacggtggcggaacatgcggatgactatccgttcctgtgcgaggcaggcagccgccccctgcatgaaagcggcatcggtattcgcttccgtgcggcatcggcagtggtggatacgctgtattccgccaatgccggaaacctgcgccggataacggaagccatcgggttgctgcgtgcggacagttgcgcattcctgcaaggtatctcgatcagcggatatgcttcgcccgagggcacgacggaactgaaccggaaattatcggcgaaacgtgccgaagctctgcggcatgctctctcggtgcgcatgaacctgcctgtatcgttgtttgaactgaatgccggaggagtagactgggacaggctggccgaactggtgaatgggagtgacatgacatataaggaggaagtgctcgctattctccgcagccatccggaggaagagcggaatgacaggctgaaagccttggcgggcgggcgtccgtatcgttcggtgctggatgtgctctatccgcagttgcgcgatgcctgctacatccgtgtgcagtatgccaaccgccctgacagcgtggcggatacggtgaaccgtgcgatagaagccattcgggggcggaagtatgaagaggcattccggttgctgaagacggtggaggcggacgaacgctcgtggaatgtacggggagtctgccatctgttgtgcggagacgacaaggaagccgggctatggctgcatagagcggtgaaagccggaaaccgggaagcggaagaaaaccttaaaaagatgaatgcggaacgacgggccgctaccatcggtataacgcaataaatgtatcacataacgtaaaaaagaaatgaaaaaactaaagtacatgagtatgatggggttggctgctttattgctgacaacctgggccgcctgttccgacgatacggacgcttcgggcggagagaatccggaagaagcgagagcttataccacagtgaccattgccgtaccgaatggtgtggcggagacaagggcctccgatccgacggcggatactgacgatacgaatatggatatcggtttaacggatgaatacaaagtgacgaaggccaatctgtatctgtttccgggaggagcatcgagtagctttggtactgctacattgacagagattatttccatcagccagtttacgcaaaccaccactactactaccgaccagaagaccattgtatggaccagtaagaaaacagccctgaccccgggagactatcgtatttatatagtggtgaacggtacggtcaatggggtgggtgacagtgacaagggaactctgaccgaagctgattttctcgcaaagacaacggctgacgctacgagcgtgatagttgctgtaccgagtgacggactggtaatggcgagccgttctcccaacagtaataactcgaatactcttccttatattgcccaggagataaccaaagacccggagcagaccattgcggcaacagtggagcgtgtgatgggaaagattacggtgactgcgggaggaaccagtgtgtcttctgctgctactgctaataaatatacttcgttttctaccacagtagctcagatcaacaatattacggatatcaccctaaaaaactattatgtagtcaacgcacggaaagagggatattatttccgtcatgtggataaaggaagctctgcaacgaatcctttgactgaggcaaattatggtacctcaagcactacattgccgtatgtgacagatccgaagacgtatgataaaacttatacttccacacctgctttagccaatagctatggcgactggtatctgcaaggatcaagcgcatttggcttgtcgtctttcggcactttttccggaacttatacggatatgccgggctactcttccggggcggtggaaactaaagtcgccgcttactgctatgaaaacacgatgctgaaggataaacagaagaacggatatacaaccggcatcgtatttaaagcagagattgctccgagtaaaatgatgcaaaaaaagtcttcgggcggtggtgtggaagaaactaatacaattggttcgattggtgagatcttctaccattccggcatcttctacaaaaatattgaagcgctgaaagcggccggcgtattgttggcagacggaactacttccagttcggccagcggtgcccttaccgacctgaaaaagaacgacgtccagtgtctcctgaaaggaaataccgatggcaagttcatttgttattatccgtattggatcaaacatctcccctcggcagatacagcagaagatgtgatggagttcggcattgtccgcaacaatgtctatcaagtaaccgtcaccggtattcaaggtgtcggcaaagacggtgtaaccgaagatatcattaccgataccgaaaccgatgatccgactaccgtattgctgaatgtgaagttaagtatcaaaccttgggtagtgcgtacgaatagtgccgtattgggccgttaacccactgttttctctaaaaaagtaattgctttgagatgggttttcaccacggagtaacactgagtctcacagagttttaagttctcgcttatcaggatatcttaagagaaaaagatctctgtggaactctgtgttactctgtggtgaaacacccgttcaatcataaaattttcccaaccatgtccgataagtttcagactttctgtttttcccattccggcagttggtttctgccgttcttgtggctttcgttgttggcgggcttatctgcctgctcgtggaccggggacgaccgtagcgactgtcccagtggtttccgtattcgtcttcagcctgcattgcatgcacagatacagcctgacagcgggacaggcgtcatcaccgacgagatcgacacgctgtccctttacgtgttcgacgcacagggacagtttgtctgcctgcacacagagaacaggcaatcgctgactgaaaacgattatatcattaccctgccgctggaatataaagacggagacgtttacgaactggtgttctgggcgggaggggacaaccggcattaccggatgccgcaacttacaccgggcagttcgacccgtgacgagctgaccctccggttggaacgtgacggagacggacgtcaggatgacgaattggggcacttgtggtacggtcatctccggttgagccggatacagccttcggaactgacatcggtcagtgtgccgatgttgaaggacagcaaccggttcgtcattaccttgcacgatacgtcggggcaggggctggacgccgatgattacgactttactctgttggcggataacggccggatgaatgctgacaacgaagtgatgacgggcgaccgggtgacttatgccgcctatcataccgagtccgcttccgaaacggaaccggccgccacccgtacgggggaagtcagcctggcgcgtgcccgcttgaacacactgcgcttactggcggatcaggaggcccgtctggtggtgacggaccgcacttcggggcagaaagtagtggatgtcgacctgacgcgttatctgctgatgacgcgccccctgtttgaagagagcaacggtgtggagctcagcgaccaggattaccttgattacgaagatcggttcaacgtgattttctaccttaccccgatgggaaagctggaggcgctgaacattaacggatggattatcagactgaacgatgcacaactgtaaaggcagcatatggatcatattctttcggtttctgctctgcctgtgggcatgcggatgctccgatgatgccggcatgcctgcccctccggcaggggcggaccgggtgacggcgtgtgtccggctctcggtacgggtagtgggggagactacccgggcggcggtacaggcggatgcgacggtggaggagaagatctcttctgttgccgttttcctggtgtcggtcgacgggagtggaaaggaggattggaatgatgtgcagtacgaagtggtgtatggcacgaccagtagcgcggcggacgtgtatcaggcgcgcataccgaccactcccggagagaagaaggtctatgtgggggccaatctgttgcccggtcaggtgcatgccatctgcgggcaggcagaaggcaagggattgtataccgccaccggggcggggtatgacgaggtgatccggcagtttgcccgcgggacggaggggatcgccatgaccggaaaagccgggacttccgtaacggtcagtgcgggcaccgatgtgaacgtggatctcacggcatcgcctatcacactggaacgggtggtggccaaagtactgttggtgtgcgatacctatacagacgacggaggagcgtacgtacggatgtccggtaatgcggctcgtccgtcagccgatccgggctggatacgtttgtcggatgtgcggtatgccctcaacacagtcaaccggaaggtgtatctgaatgcgcccccggatgggaaagatcctaatcatgaagtagatccgtatgtggttaaagatgatggcggcaattatgtatcggcacccgatgtggctgaacagcaattcgtttaccatactttgggcagtgtatgggcggaagggatcgctccggaagcgtatgaagaggtcaaattcaatgcgacgaaagccactcctccggaaagcggcgcttataccggtgggctgtattgtccggagaacacgactgcgacttccacctcttctcttgcgggcggactggatctgacaggaacacttaattcgactcaggcggaaattccccgcctggtgactacccatctgctggtagcggcgaagtttgtccccaaacagattattatcggggccggaaccacgcaaaccctgacatctctcgccgatgccgctacttgcttgcccgcaacgacgacacctgtcgatgcggaagcacatgcggcaggcacttactttaccaacgggagtgactattacagctatgcgggcatgaaggccgccatcggtgcgggtaccctgaaacgtactgattttaccgcttacgaaggcgggatcggctattattacacttatatagacggcacaagtgctactgacggcacaatcgctttcagtgcggattccggcatcttgcgcaaccgttattatctgttgcgtattacccggttcagcctgccttcgaccgcattgccgcaaccgatgcgtgccacgatgaaagtaacggactgggtgacgagttccggtaatcagattatagtaaggccgacgtagaaaggaaaataaatacgattcaccacagagtaacacagagtctcacggagttttaatctcttgtttatgagatatgaagagaaaattatctctgtggaactctgtgttactctgtggtgaaagctgagaaagaaagtatacaactatgaataaagaagaaaaaaagagtagattctgccgggcatgcctgctgctttgcctgtgtctgctgtctgcctcgtgtgtatccggagaaggagagtacgaacaggagatacccatggaggtagccctcacccgtacggatggggtggcaggcagcgaaagcactccgttactgctgttctggaaagagacggatttcagtacggggacattgggctctccttataaaacctccactccggcaggggggatcggtgattacgccgatgcaccctataatacggaaacggattatccggctgataactcccgggtggtggtgatggggctttgtccttctgcgatgactacggcggacagtcatactacctattcgttgccttcgagagcagggctgaccgatgtactggtgactccgaatggggttacgggtagcaggaagcagcctttcggacgggcattggagtttgcacacgctgccgtacgtatcgtgctcaaggcgaggcgtacggacaacacggtcggcaagctgtatgtcaagaaccttaagttgaccgtgcctgcaagattggtgtgcggagggttgaaatgggatacagggacaaaacaatatctggcggctccggctgccgccgatttggttatcaatcattccggacagatattgagtacggaggatacgcaggtcgccgtgttttatctgacaccttgcagcccggctgatttgctgaccgatctcactggaacaggtggtacgccggggcttacgttgacggcggatgtggctaaggatataaactttacgaccggagcgcgaaacgcaagttttcctatcttggatggcaacctgaactttatggatcagtttggaagtccggcaactcagctgaaaggcggagaatcgtatgaaacgaccctcgaatttgatatcgactctttcacgctggaaggcgaagagaaggagtgggaggacggaggaaaaatgactgtccctgtggtggtgccggaaccgactccgggcccatagatgaatggtgaatttaataaaaagagctgaatatatgaaaacgataaaacgattctttctttcaaccgcagtcgtgactgctgcactgattaccggctgcactcccgaagaggaacatatgcccgtgcagggtggtgacagtttcacactctcctcgagtgaagaacaggtcatcacccgtgcgggagatgtgtcggtgagtcattttacgggtggcactaaataccggctgtacggacttgtgggaggtgcgtgggacaagaaacttcctacaatgaatggacaggaaggcacggaggctgtggctgcggacggcacccatcagatagactacctgagtgccggtgccgacgaggatcgttttgaaggcagaacccttgacttttatgcgctgacatacggcaatacgaccttgcccgtatgcggctccgaagtagatggcgtaccggcctgcggcatccatgcagatgtagggggagtgttgcccgacttgcgccgtgccgtactgacgaagcaatcgggcatcaattcgggagtgattaccttaccattcaagcatacgttggctaagctgaagtttgaggtggtgaagcaaaaaacggagaatggttcgacgggtgtcgatgtgttggcgggtatcgaactgaaggggatctcagtcagtgattacagtgaaggcagcctcttgctctcgaccggagaatatagccatacgggagggaaaagtgaccgtacgctgctcagtagcgggttctctcaaacggtgacggaaagtgtgttgccggtaactacggacgggcaggcgggcggtgcggctgccgaatgtctgatattcccgactctctccgggaccacggagggacttaaaataaaagtagctacgaaagggacgaacagtgcggaccgcacggatacgtatgaaattcgtgtcccggttgtcggagatgatggagaggtccggaaggatgaaaacggtaagactgtgacggaacctttccgcttcctgcccaattacgagtatacgcttaccattacgattactaatagcgatgtacagattattaccatcatcccccgccggtatgattggatcgaacataatgacgattcgcagtatatggggcagcccctgacttttaacggtgtcatgtggatggaccggaatctcggagctaccagtgcggatatgacaaccgccgaaggatgggaaggggccagaggatatgtatatcaattaggaagaagtattccgtattatttgcctaaaacagtagagtatacgggaagtgacggaaagaagtatctgagacctagaagttgtgttgaccaaaacggaggggcaagaccttacccacaggtagtgggacatgaaaacgacgctcccgtcagtcggcctgcggtggcgtccttagcacttaatccgggagatgccagtaagacatttaattacgttatgatcggtggggattgggataatactgctgctatcagctctacttattgggcgactacaaagaatgatccctgtccgacgggctggcgtgtacctactaaaaaagattttgatgggattatgcctataggagaaaaatatggcgacttgacatttataaacggccatagcgggacggcttggaaagaaaccgctcagaatgatccggaaacaggagcaaaaacggtttatgtctgtaagcgggtaaatacgagtacgtatgggattatttatgccattaagtaccagggaactccacaagcttaccgcctgatgtgggctttgaatatggttggggacaatcagtctgtaacggatgctaatggaacgcgatatcgtgcttatgtcacaatagcgaggtttccgtgtggtaaggatgatgatctgaatataaatacctgtcatacggattatgattgggagcatcccagtgattttatcaatcttcctatttccggttatatttatcctgatcaagcggcactgtataatgccggtgctgaggtagtatatgcgacatcgactcctatcggtgtctatatgtatggcgcttcgtttaaatatataggtaataccggccatcgctattttgcgctatatcagatgggaagggctgcgggtgtttccattcgttgtgtgcgggatgtcacttcacaataaaatagtatgatgtatgaaaagaatgatcgtttataaaagttgctcgtatgtaatcatggctctgctttgtacggcatgtgccgctggctctcccgaagaagatatggaggatcgggtacggattgatcccgttgccggtggatattatccttcaatttctccttcggcccagacccgtggggcgacaccggatggcgaaacgttgaaagatagaccgatttttctgctggaagacgggagtacgatacgcctggtggtatatgatgatgccaagaatctattggaagagtattccaaagcttatctggtacgtaacgccggtacgtcaggcagcagtctgctctatccctgtgaggtagacgacaacggagcggtaatatcttcaagcagcactcctctttatatgaaggcgggtacttattacttcagaatcctgtcacctgccaaggccttaaactcaaagggatttgtcaatatcggtaacggagaatacctgcttgcgaccgacgaccggtatacgcaaacagccatgacggcagtgaccattacgaaaattgatgaagggggtacattgaacaatgtccagacactgtatctgcccccatcatcaaccagacagcgcggatgcagtttactgtcagggcgggtgaaggggtgcacaccttggagatgcttgccgaaggaatcgaaatcagcggtattcagcagccactggacaatacgaccagcttcgactgggtaaatggagatgtgctgcctgtgaaagtgggggatcagagtgcatcggtacgtatcacacatgccacccaaaatgccgataacagcctggtggcgcataccggcgtattgcccacagacgcacgctctcactctatcagtgtgttgctgaacctgaaggtgaacggtaaccccactcagtatcagatgttgctcaccggtttgtatctgacagcagggcattcgtacaactatacggctacggtgaagatcagtaatggcgtcactgtgctgacctggcaaaaccgttcgtggacggagaatgtagtaatggataaataagaattcaccaccgattataccgatcaccaccgattaatgattaatcccggtggtctttaagattaaaagtcctgtgaaaatccgtgtaacctgtggtgaaataaacagagtagagtaatgaataataatgatcccatgaaaagattcggatatatcgtttttagtatttgcctgtttgcgctgagtgcctgcacaccccatgaacagatggatcaggaggagggaatagtgaaagtgtcgatgggacttactgccgcttctttcaccgatgatgatgcgacaacccgtgcggagcagccgatggcacctgattatgaaaacctgattagtaatttgtggattctacagtttgaccgtgaaggtatcctgacaggcagcgaacataaagtgctgcccacaccggtgctcaacaccacgcttgaaggaattgcgttgaggaccgggcgcggtacggtttgtgtggtgggcaatctggcggatggagagattgccgcgtggcctgataacttgagtggtttcaagagtctggtggtggatatgggatggctgaaagaacggaatacggaccggaatgtgtgtctcttcggttattacgaaggcgagattgctgccggcaccacagctgtgaatgtagtattgggacgtctggtatgcaggctcaatatagctgtttcggccaagacggcagggatattcagcaacgtgaggatccagttgcagaatgcgcagaccaaaggctatttgttcccttcggatgtatatctgtcaccggaaggaggcgggaattatacggaagaggttgtcatcggtgccgacaaagtattggggacagcccccctttaccgctactattatatggctgagaatgtgactgagggaaccgactccggtgaacgcacccggctccaaatcaaagcaaagaaaggaggggccgaatatacaaaagccattgacttgggcagaagtgacatccatgattattccctccgccgaaacaataactatacattcaacatcgttttagagtaatcataaattctacagtgtggaggcatctgtgacagacacttccccttgtttgttttgtttgtaaaagttccgcccgatcccgatggggagaggacggaactttctgtgtatgggtggtatgaatcctgaacatgggctgttaatgcttcagcttgccttccatcgtactcaggtagatgtccagggcacgggtggatatctgtatctcgcggagggaaacccccaaagaagcgatcagcagtagcaatgccaacccgaagatatagattgagagcaggaacaatccgatgtagataagaaacatggtgactacgcagaagaatagactggcaatgccgaatacctgcatcatacgggtcaggttgaggcgtttgcgcagattctcaatttgggcaacattgatgtcggaaggatcttccatatagcggtcacgaagaattcggaccaattgggcatacgagagaaagcggttggtgtatgccaaaagaataagtgaaacggctgaaaatagcagcgcgggtgtcgtgagtgtaagttcttccattgttatcgtatttttttatatacaataacaatggaagtgggagattggtttacttcagtacacttaattctttacctactttgatgaatgcagcgatacatttatcgaggtgttctttttcgtgaccggctgaaatctgtacacggatacgtgcctggtctttcggaactaccggatagtagaagcctgttacgtagataccttcttcctgcatgcgggctgcatagatctgtgacagtttggcatcgtaaagcatcacggcacagatagcactctgagtcggcttgatatcgaatccggctgcagtcatcttgtcgcggaagtagtttacgttgtctaccagtttgtcatggatttcgttgctttctttcagcatcttgaatacttcgaggctggcaccgataatgcccggagcgagtgagttggagaacaggtacggacggctgcgctggcgaagcaggtcgatgatctctttgcggccggttgtgaatccgcccaaagcaccgccaaaagctttgcccagagtaccggtgtagatgtctacacgtccgtaagtgttgtactgttcgcttactccatgaccggttgcaccaaccacaccggctgagtgagattcgtctaccatcaccagggcatcgtatttttcggccaggtcacagattttgtccatcggagcaacgtttccgtccattgagaatacaccgtcggtgacgatgatgcggaaacgttgagcctgtgcttcctgcaggcaacgttccaggtcggccatgtctgcattggcataacggtagcgctttgccttgcaaagacgtactccgtcgatgatggaagcgtggttcagcgagtcggagatgatggcatcttcgtcggtgaacaacggttcgaatacaccgccgttagcgtcaaagcaggctgcgtacaaaattgtgtcttcggtcttgaaatagtctgaaattgcggcttccagctccttatgtatatcttgagttccgcagatgaaacgtacagaagacataccgtatccacgacggtccatcatcttctttgcaccttcgatcaggcggggatggttagacaatccaaggtagttgttggcacagaaattcagcacttctttgcctttaacggtgatagcagcttgttgtgcactttcgattaagcgttcctctttgtagaggcctgcttctttgatttcagcaatcgtattgctgaggtgttctttcattttaccgtacatagtgtttggggttttagtttcttttgcaaaggacacaatttttcttggaataaacaacatatatttggtataaaaatgaaaaaaaagtgcttactttgcgcaccatttagcttaatacaccttattagtaaagataatgaaaaatattttggtaattggagcgaccggacagattggttcggagctcacgatggaactacgtaaacgctacggaaacacacatgtagtagcaggttatattcacggggcagagcccaaaggggaattgaaagaatccggtccgtcggctgtagtcgatgtaacagatcaggatatgattgcctctgtagtgagagagtataatatcgacacaatctacaaccttgccgccctgctgtctgttgtagccgagtcgaagccgaagctggcttggaaaatcggtatcgacggtttgtggaatgtacttgaagtggctcgcgaaaacaaatgtgccgtattcactccgagttcgatcggttcgtttggtgaaagcactccgcatgtgcagacaccgcaggacactattcagcgtccgcgtaccatgtatggtatcagcaaggtgaccactgagttgctgagcgactactattttaataagtatggcgtagatacccgtgccgtgcgtttcccgggaatcatttcgaatgtaactcctccgggaggtggtacgactgactatgcggtagatatctactactctgccgttaaaggagagaagtttatctgtccgattccggaaggaacactgatggatatgatgtatatgccggacgcgctgaatgcagctatctcgctgatggaggccgatccgacgaaactggtgcaccgtaatgctttcaacatcgcttctatgagctttgcgccggagaccatttatgctgctatcaagaaacatgttcctgactttgagatggaatataaggtagacccgctgaaacaacgcatcgccaacagctggcccgacagtatggatgattcttgcgcccgtgaggagtggggctggaaaccggcttacgatttggaaagtatgacagtggatatgcttgaaaaactaagagctaaattaaaataatgtgatgatataaatcccatgtgccgaccggagtatgaaagagtttcgaaaaccggttggcatgtgggaatatcgacacattgctaattattaaaatgaaaacaataatggcgggagtcaccgtcctggtgttgttcgcttcgtgcggcaacagtaataagaccgacgctgacccctttgcatctattacacatctggtagattcggcaatggtgaacaaaaccgattctattgacagagaaaagacttcggacgaacctaaaccgattgaggctgacgaatcgtttgacgactttatctacaactttgcttctgatgacgctctgcaaaggcagcgcgtggtgtttccgttgccctactacaacggagaacgggcttcgaaaatcgacaggaagtactggaagcatgatgacttgtttgccaaacaaagttattataccttactcttcgaccgggaagaggatatggatctggtaggagacacttcactcacatccgttcaggtggaatggattttcgtgaaaaaacgaatggtgaagaaatattattttgaaagaattaaaggggcgtggatgctcgaagcaatcaatctgcgtccgattgaggaaaacgagaacgaggactttgttgaattcttcggtcattttgcgacggatagtattttccagagccggcgaatccgccaaccgcttgtctttgtgacaaccgatccggatgatgacttctcgatactcgaaactacacttgacttgaaccaatggtttgcctttaagccggcattgcctgccgataaactttcgaatattaactacgggcagcaaaatgatgacaatgcctcacataaaatattggcactgaaaggcattggcaacgggttctccaatatcctctatttccagcgcaaagacagtggctgggagttgtacaagtttgaggatacaagtatttagagattgcttttataggattatggaacagaaatactctcttttatcacataacacttttggtatcgatgtgtctgctgcttgtttcctggagtatgcttcggtggatgaattacgcgggttgatcgggtccggacgggttacctctccttatctgcatatcggaggggggagcaacttattgtttactaaagactacgaaggtactatcctgcattcacgcatcgggggcgtagaggttgtggccgaaacggatgacgatattgttgtgcgtgtgggggcaggtgtggtctgggacgacttcgtggactattgcgtgcaacggcattggtacggcgtggagaatctttcactgatccccggagaggtgggagccagtgcggtgcagaacatcggggcctacggggttgaagttaaagatctgattgtcagggtggaaaccctgaacattgaagggaaagagcatgtttatgatgtaacggagtgtggatattcttaccgggacagcatcttcaagcgccctgagaataagagcgtttttgttacctatgtcagtttcaggctgagcaagagggaacattatacattagattacggtactattcgccgggagctggagaagtatcccggagtgacattggatgtggtgcgccgggtgattatcgctatccgtgaagagaagttgcctgatcctcgggtaatggggaatgcgggaagtttctttatgaatccgattgtgggtcgtgagcagttcgaagccttacaggcagaatatcctcaaatgcctttttacgagatcgatactgaccgggtgaagattccggccggatggatgattgatcagtgtggctggaagggtaaagcattaggccctgcggcggtacacgataagcaagcgttggtgctggtgaatcgcggaggcgcaaaaggagcggatgtcattgcattgtccgatgccgtgcgtgcttcggtccgtgcgaagtttggcatagacattcatccggaagtgaattttatctgattacgatggggctgcagggcatgtcggctttcaggaatgacagattgataattgaaagaaatgaaaataagaatacttggtagcgggacttctaccggagtgcccgaaataggatgtacttgtgcggtttgtacttcaaaagatccgagagattgccgtcttcgcacctcagcattggtgtatactgacgacgctactatactgctggattgcggtccggattttagggaacagatgttgcgcgttccgtttggaaagatcgatgctgtgttgatttcgcatgaacattatgatcatgtgggagggttggatgatcttcgccctttctgccgtttcggggaagtgcccatctatgccgaaacttatacagccgaacgtttgcgcagccggatgccctattgctttgtggaacattcctatccgggagttccgaatattcctttgcgtgagattgaacccaatcgcccttttcttgttaatcataccgaagtgttacccttaagggtaatgcatggcaaactgcccattttgggatatcggatcggaaagcttggatatataacagatatgctgaccatgcccgatgaatcgtttgagcagttgcaaggaatagaggtgctggtgatgaatgcattgcgcatagcgccacacaacacccatcagagcctgtctgaagcattggaggctgtgaaacgcatcggagcgaaggaaacctggctgattcacatgagtcaccatatcggacttcaggcagatgtagagaagcaacttcctccgcatgtgcattttgcattcgacgggcttgaattagaatgttagtgattgatgctttataattctttctttaagtatattttgttttatttggagaaattattatttttgcactgagccgataaacaacgaatgccatgaaactccgtacgatagtgaaaatagccgtaatctcgtctgttgtactgctgtgtacaggctttgccatgttttctttcttcaggttgtcggcggtggaaggacgcaaggattttaatctctacacgcttgttccgggttcggccactgtagtcctcgagacggatgatcttgccggaatgatacaggggatcaatgagttgagttgcagtaaagaccgacattttctttatgtttccaaattattttcttatctgaagctccatctgtatacgttgttggaagatacgccgcacggattgagcaagcagatgaataaagtgttgttgagtttccatgaacccgacaatgatcgcaaccaggtgttgtattgcagcttgggaaacggcgattacgagttggtggaaaagtttatacgtaaatactgttcgagtagtttcccgtcaaagctgtttgactataaaggggaagagattcgtatttatccgatgccggatgacagtttcctggcttgttatttcacttccgactttctggttgtgagttatcagaaaaaactgattgagcaagtgatcgatgcccgtttgtccaagaaatctttgctgaccgatgcctcgtttgccaaagtacacgaggataaacgtgcccgtgtggcagctactatttatgcccgtatgcaaccgttgagtatgggaaaggctaccgacgggattcgttcgtgtacacagttgggcggatggaccgaatttgatatgaaaatgaatggagatgccatttatttctccggtgtcagccatgatacggatacttgtctgacatttatgaatgtgttgcgccaacaacaaccggtggaggatttcccgggagatatcctgccggcttctacttttttcttcaataaacggtcggtaaccgatatgcaggctatgcttgatttcactgccaggcaggagtatacgacatcgacttattccgactatatcagagatcgggatggggagttgctcgcatatcttaaagagaatgccgggggtgagattgtgacttgtctgtttcattcgacagatactctttcaaatccttgtgcggtgatgagtattccattgagggatgggcagcaggctgagcgtgtgttgcagggaatgcttcgcactgctccgaaggaggtagacggtcctccgaaaccacgtactactttctgtaaaactcctttaagggcttatacgctctatgtactgcctcgtaatacgttgtttacgcaattgaccgggataacagagtcggctttatacatttacgcttgcttctacgagggaagactggttctggccccggatgtggaaagccttaccgcatatctccgtcatctggataaaaaagaaattctggatgatactcccggatatgaagaggcggtggtcaatctttctccgtcgtacaactttatgatggttgctgatttgggagagactttctcacaaccggagaattatgtgaggctgatacctgcatttttctttcgtaatcaggagtttttccgccactttattctttctgcacaatttacttgtacggacggaattgtatatcccaatgtggtattgatttacaaaggtgagtctgatgacgtttcctgaccccataaaaggtataaaaccccgaaagatcttgaagaattttcggggttttatgccttttgccaaagcttgtttgcttagaaaggcagatcgtcttttgcgtcaccggcaataaattcgggtgccgaagagggtgccggaggaggaaccggagctcccggagccatgggtgcgcctgcgcctacgcgttctactttccatgcgcggatactgttgaaccagcgatcctgccattgacgtgcatcgatatcgaatgacacggtcaactcttcacccatttggatgttgaattgttctattttgtctgctccgaaaatgtcgaaacacattttcttagggtattggtcatgattttcgattacatactcctgggctttccattcgttgccgctggttttagaaactccacctctgggctggagtatagcgataatttttcctgtaaattccattgcgataattttaaattgtgcggcgaagttacaattttttagggatatccgacgaatattcccctgttttttcttctcttttattgtgctgcctcgatcttttttgtaactttgtgctttgcaaaaatataaaatttaaaatcacagattatatgaaatttatcgtttcaagtactgcacttttcagccatttacaggctgttagccgtgtgataaactcaaaaaatgcactgcctattttagattgttttctctttcagttggaggacggaacactgtctgtgactgtctctgatagtgaaactacaatggtaacctcggttgaggtgaacgagagtgattctaacggaaaatttgctgtagctgcaaaaacattgctcgatgcattgaaggagataccggaacaaccgttgacattcgatatcaaaccggatacttatgaaattacggtacagtaccagaatggtaaatatagcctgatgggacagaatgccgatgaattcccgcaatcggctacacttggcgataatgcagttcgtgtagagatggaagcacagattctgctgggaggcattaaccgttcggtatttgctacggctgatgatgaacttcgtccggtgatgaacggtatctactttgacattacgacggaagacattacgatggtggcttcggacggacacaagttggtgcgttgcaaaacattggctgcgcgcggaaacgaacgtgccgcgtttattttacccaaaaaaccggcgactctgttgaagaaccttttgcctaaggaatcgggtatggtagtgatcgagtttgacgaacgcaacgctgtcttcacgcttgaaagttatcgtatggtatgccgtctgatagagggacgctatcctaattataattcagtaattccgcaaaataatccgcataaagttacggtggaccgtatgcaactgatgggcgccttgcgtcgtgtatctattttttcttcgcaggcaagcagccttataaaactccgcatgcaggaaaaccagatcgtggtttcggctcaggatattgacttctctacctctgcagaggaaacacaggtatgccaatatgccggtgcagccatgagcatcggtttcaaatctactttcctgatcgatatcctgaataatatctcggcggacgaagtggttatcgaattggctgatccgtcaagggccggtgtcattatcccggtagaacaggaagaaaatgaagacttgctgatgttgctgatgccgatgatgctgaacgattaatcgcggaacagaaataaaatcggattcattacagaggacacaaagatcacagggacatcattcttttttgaattgaaactctgtgccctcagtgtcctttgtagtgaattaaaacaaaaccgtataaacaatgaaactcaacctaaagaatcctatcgtcttttttgatctggaaacgaccgggacaaatatcaactcagaccgaatcgtagaaatctgttatcttaaagtgtatcccaatgggaatgaagagtcgaaaactcttcgcatcaatcccgaaatgcctatccctgccgaatcatctgctgttcacggtatttatgatgctgatgtagccgattgtcctacttttaaggaagtggcaaagagtattgccaatgatatcgagggttgtgatctggctggtttcaattccaaccgttttgatattcccgtgttggcagaagaatttctgcgtgcgggtgtggatatcgatatgagtaagcgcaaatttgtcgatgtacaggtgattttccataagatggaacagcgtacccttacggctgcttataagttctattgtggccgtaatctggaagatgcgcacacagcggaagctgatacccgtgccacgtacgaggtactgatggctcaactcgatcgttatccggaagagttgcagaatgatatgtctttcctggccgattattcaagctataacaagaatgtggattttgcaggacgtatggtatatgacgacaatggggtagaggttttcaactttggtaaatacaaaggacagtcggtgagtgaagtactgaaaaaagatccgggatattacagttggattctgaacagtgatttcacgttgaatacaaaagccatgttgaccaagattcgtctgcgtgagttaaccggaaaataattatgctgaacggaaagaaaattatactcggtattaccggtagcatagctgcctataaagcttgttacatcatacgtggcctgatcaaacagggagctgaggtacaagtcgtaattactcccgccggaaaagaatttatcactccgataactctctctgcgttgaccggcaaacctgtcatcagtgaattctttgctcaacgtgacggtacgtggaatagccatgtagacctgggattgtgggcggatgctatgttgatagcccctgccacggcttctaccatcggaaaaatggcgaacggcatagccgataatatgttgattacgacttatctttctgctaaagcgccggtttttgttgctccggctatggacctggatatgtttgcccatcccagtactcaaaagaacctggatacgcttcgttcgtatggcaatcatatcattgagccggcttcgggtgaattggccagtcatctggtaggaaaaggccgtatggaagaaccggagaatataatccgggtacttgatgaattcttttcatcaacgggcgaactggcggggaaaaaagtgctgatcacggccggaccgacttatgaaaagattgatccggtgcgcttcatcggcaattattcttccggtaaaatgggggttgccttggctgaggagtgtgcccgtcgcggagccgatgtggtactgattgcagggccggtacaacagaaaacatatcattcacatattacccgcattgatgtggagtccgctcaggacatgtatgaagcagccatggcgcaataccccttggtcgatgccggaatactgtgtgcagcggtagcggattttactccggacgctgttgctgacaagaagataaaacgcgaaggagacgagttgttgctgcatcttaaacccactcacgatattgctgctgcattgggcaagataaaaactccgggacagaagttaatcggttttgctcttgaaacgaatgacgagcagcgcaatgccgaaggaaagctgatccggaagaactttgatttcattgtgctgaattcgttgaatgatgctggtgcgggattccgttacgataccaataagataagcattcttagttgcaggggcagaaccgattatccgttaaaatcgaagacggaagtagccagagatattattgatagaatgataaaagaaatgtgatttatgttacgttcattatacatccagaattatgctctgattgagaaactcgatattcgtttcgaaaccggattttctgtaatcaccggagagaccggtgccgggaaatccattattctgggcgcaatcggacttttactcggacaacgtgccgatgtgaaagctatccggcaaggcgcttctaaatgtgtcatcgaggcacgattcgatatatcggcctatcacatggaagccttttttgaagagaacgagttagagtatgagcccgaatgcatacttcgtcgtgaagtacagtcatccggtaaaagtagggcatttatcaatgatacacctgcttcgctcacacaaatgaaagaactgggtgagcaattgatcgatgtacactctcaacatcagaacctattgctcaataaggagggcttccagcttaatgtgctcgatattctttcccataacgaagaggctttggatgtataccatcatttatatcaggattggaaaaaactctgtaaggaactcgatgaactgattgttctggctgaacaaagtaagacggatgaggattatattcgttttcagttggaacaactggaggaggcgcatcttacggccggagaacaggaagagttggaacaagaggccgagacattggcacacgccgaagacatcaaggccggactgtaccgggtggggcaaactcttgcttcagatgaaggagggctgctgcctgtattgaaagaaagtcttggcactttgagtggtctgcagaaagtatatcaacctgccggtgagttggtcgaacggatggagagcacttacatcgagttgaaagatatagctcaggagatatcagatcagggcgaaggcattgaatttaatccattacgactggaggaagtaaatgaccggttgaacttgatctactctttagaacaaaaacatcgtgtgcagaccgtcgaagagttgattgctctttcggagcaatatgcaacaagacttgctgccattacttcgtatgacgaccggatcgttaaactgacggaacggcgcgatgcacaatataataaggtaaagaagcaagccgctgtcttgacaaaggcccgtacagagattgcccgtgaagtggagcaacagatggctgcccgtttgattcctttgggaatacccaatgtccgctttcaagtggagatggggttgaaaaaagaactgggtccacagggcgcggatactgttaatttcttgttctcagccaacaaaaacggaacgctgcagagcgtgtcttctgttgcgtcgggtggtgagatagctcgtgttatgttatctattaaggctatgattgcaggagctgtgaaacttcccacaattgtattcgacgagatcgacaccggtgtatccggtgagatagcagatcgtatggcggatattatgcaagagatgggcgaacaaaaccggcaggtaatcagtattacgcatttgccgcagattgcagcccgtggacgtgcccattataaagtgtataagcgggataatgatacggagactaacagtcatatccgtcgtttgaccgatgaagaacgggtagaggaactggctcacatgttgagtggtgccaccctgacggaggcggcgctgagtaatgcgagggcattgctggaaccatctttgaaagaaagaaaaataataaaataagtatatggtggtgtacaataagtgataacgagttgtatgtcctaaaatgcagacaattacatgattgataaaagcgaaatgattttcggcgttcgtgccgtgattgaagccattcaggctggtaaagagatagacaagattttggtgaaaaaagacattcagagtgacttgtcaaaagagctgtttactgctctgaaaggtacgctgattcctgtccagcgtgtcccggtggaacgtatcaaccgtatcacccgtaagaatcatcagggggtggttgcgttcatctcttcggtaacgtatcagaagacggaagatttggtgcctttccttttcgaagaaggtaagaatcctttctttgtcatgcttgatggaattacggatgtgcgtaattttggtgccatagcccgtacttgcgaatgtgccggagtagatgccgtcattattcctgcaaaaggaagcgttacggtcaatgcggatgcgatgaagacttcggccggtgcattgcacactttgccggtttgccgtgaacagaatctgaaaacaaccttgcaatatctcaaagatagcggcttccgtattgtggctgctaccgaaaaaggagattatgattatacgaaggcagattataccggcccgatgtgtatcattatgggggctgaggataccggtgtttcctatgataatcttgcactatgcgacgaatgggtcaagattccgatgctgggcagcattgaatcactcaatgtatctgtagccgcaggtatcctgatttatgaaggcgtgaaacaacgtacaaattaaaagaaacaacattcaaatacatgaaaaagagcatactattcacatttgtgctttgcctcctgtcacaatggagtgtagcacaagcccctaagtgggttgagaaagcgaaacgatcggttttttccatcgttacgtatgataaagacgacaaaattcagaataccggtaacggattctttgtaaccgaagacggagtggctctgtctgactattcactgtttaaaggtgcccagcgtgctgttatcattaactcagaaggtgaaaagatgcctgttgagtgtattctgggagccaatgatatgtatgatatcattaagtttcgtgtgggcattacagtgaagaaagtaccggctttacaagtggctgctcttgctccggctgtgggtgctgaagtttatttattgccttattccactcagaaaggcggtaacgtgacccgtggtaaagtgaaaaaggtagataatatcggtggtgataaatatcattactatacgctggacatggtattgaaagataaaatggtcagttgtccggtcactacggcggacggtaaagtgtttggagtggcacagaagtcctcgggacaagatactgcctctatcagctatgcggccggtgcggctttcgccatgtctcaaaatatcagtgcacttgcgctgagcgaccctgccttgaatgctatcggtataaagaaggggttgcccgaagatgaagatcaggctctggtctatctctttattgcttcaacacaatccacacctgaggcttatgccatcgcccttgacgattttataaagactttcccgaacagtgccgacggttatcttcgccgtgccggaaactatgtttttgcagacaaggatgaaaaccacatggataaagcggctgccgacctggaacatgcgctgaaggttgcacagaagaaagacgatacctattataacatagccaagctgatatacaattatcaattgagtaaacccgaaactgtttataaagactggacgtatgataaggctttggagaatgtacggagtgcgattgccattcagagtttacccgtctaccagcagttggaaggagatattctttttgccaagcaggattatgcaggtgcatttgccagctatgacaaagtgaatcagaccgaactggcatctcctgcctctttcttcagtgctgccaaagcgaaggagttgagtaaagctgctcctgaagaagtaattgctttgttggacagttgtatagcccgttgccagacacctataacttccgatttggctccttacctgttggaacgtgcccagatgtatatgaatgtagagaagtatcgtttggcactggcagattatgatgcctatttcaatgcagtgaaaggtagtgtcaatgacctgttctattattaccgtgagcaggctgccttcaaggctaagcagttccagcgtgcgttggatgatatagcaaaggcgatcgaacttaatccggaagatctcacttatcgtgcagaacaggctgtggtaaatctccgtgtaggccgttacgaagaggctgagaaagtattgaaagacgcattagctatcgatccgaaatatgctgaagggtatcgtttgctgggaatctgccagattcagttaaagcaagagaaagcggcttgcgcaagctttgccaaggcaaaagagcttggagaccccaatgtagacgaactgattaaaaaacattgtaaataaactatccccgaaatctaaaaaagaagaggctgtcgccattgcgatagcctctttctttttatggagagcgtcattgcgacttcctccgttctgtaaagtttaggtcttattgagttaaagttatatctggttcttttgtgtattcatatatataaatgcgtttgtttgccaaatactgcatagctcttccatatttttcttatctttgttcacctaagagtatttttgatggatgcttttagcatcttcaggatactaactttgctataaatattaattattaatgaattaaataagatgaaaaaagtaatttgcagtgagaaggcaccgggagctatcgggccttacagtcaagctattgaagctaatggaatggtatttgtctctggtcagcttcctattgatgcggctacgggtgtgatgcctgatggtgtggaggcgcaagcccgccagtcactcgagaatataaaacatatccttgaggctgccggtctgacaatggcagacattgtaaaaacaactgttttcctccaggatatgtctctgtttgccggaatgaacggagtatacgcaacttattttgacggtgcatttcccgctcgttcggctgttgccgtgaaagccttgcctaaagatgccttagtcgagatcgagtgcatcgcggcacgataataagtcggctacaataaagctactgcctcctacgaagatcaggtcttccgggaggcttttttcttgtgcggcctttacggcagactgaacatcgggataagcctttccttgcagtccggcagaagctccgatctgttgtaactgagcctccggtaatgctcttttgacgctcgcttttgtgaaatagtacactgcgttttcaggaagtatggacaatactccacttacgtctttgtcgttcaccatgccgatgaccatgtgcaggcgattgtatttcatttgtttcagttgctccacgatataagaaatccctgctacattgtgtcccgtatcgcaaatgacagtgggagagtcactcaatttttgccagcgtccttgcaaaccggtcattttatctacttgcaggaatccgtttctcacgtcatgatcttctatcttataacccaggcttttcagaacagggagagccgacagtagcgtatttgtattttttagttggtacgagcctcccaatactccttccaacccgggatatgcatcattttcatagatccagccggtaatatactctgtatctttttctgctgcggtattcggctgatgatctgtatactgtcccggttttcgatccgcgcgagttttgaatttagttgctccttttagtcgttgttcttcttctgcaaaggtgacaggtgcctccatctcttgtgctttccgataaaatacaggcttggtctcttctgtcgtctcaccgacaacgaccggtatgccccttttgatgatacccgctttctcggttgcaattttggccagcgtattacctaaaaactgcatgtgatcgaaactgatgttggtgatgatgcttaagtccggacggatgatgttggtacagtccagtcgccctcccaatccgacttcaatgacagccacgtctatatgttgatcggcaaagtatcggaatgccattgaggtggtcaattcaaagaatgaaggatgcagaggttcaaaaaacagacgatggtcttccacaaagcggatgatgtattcttgcgggatgggctcgccattgatgcggatacgctctcggaaatctactaaatggggcgaagtgtagagcccgaccctatatccggccgattgcagaatggcagccaatgtatgtgagcaggaaccttttccgttggtccctgcaatgtgaatgctttgaaatgctgtgtggggatgtcccaaatattcatctaatgcataggtgttttccagtccctctttgtacgcgctgcttcctacctgctgaaacatgggaacgctgttgtataggtagtctaaagtctcctgataattcatgttttataatatttaacgggcaacttcctttgtttgcctttttatttgttatcttagttgcaacaattcatcacagtggtggtcaattggctttttgattgcaaatatcaacatttaaatctaagaatcatgggaacaaagaaaaattttgtgctcgacacgaatgttattcttcacgactacaattgcctgaagaattttcaggagaatgatatttatcttccgattgttgttttggaagaattggataagttcaagaagggaaatgaacaaatcaattacaatgcacgtgagtttgtacgcgaactcgatttgataaccgacgacagtctgtttacccatggtgctcctttaggtgaggggttgggtaagttgtttattgtcactggcgattcggaggctcccaaggtacatgaatcgtttccggcccgtaaaccggatcatcagatattggcggtagccgaatatttggcccggaaatatccgaagatgaaaaatattctggtgaccaaggatgtcaaccttaggatgaaagcccgttccatcggtatactttgtgaggactacataaccgataaggtggtgaatgtcgatatttttgaaaagtcgaacgaggtgttcgaaaatatagaaccggatctgatcgaccgtatttattcgtccagagaggggttggatatcagtgaatttgactttaaagacatcatccgtcccaacgaatgttttattctgaagagcgatcgcagcagtgtgcttgcccgctacaatccttttacacatacggtctgccgggtgaataaaaccaagaattacggtatcgaacctcgcaatgcggaacagagttttgctttcgaaattctgaacgatccggatatcaagctggtggccttgacaggtaaagccggaacaggtaaaaccttgcttgcactggcggcagccttgggtaaactcacggaatacaagcaaatcctgttggcccgtcctatcgtggctctttccaataaagatttaggattccttccaggagatgcaacagaaaaggtagctccttatatgcaacctctgttcgacaacctgaatgtgatcaaacgccaatttgcttctaactctaccgaagtgaagcggctggaagatatgcagaagagtgagcaactggttatcgaggcattggcattcattcgcggacgaagcctgagcgagacctattgtatcatcgatgaggcacaaaatttgactccacacgagattaaaaccattatcacccgtgccggagaaggtaccaagatggtatttaccggagatattcagcagatcgaccaaccttatctggatagtcagtccaatggcttggtgtacatgatcgatcgcatgaaagatcagaacctctttgcgcatgtcaacttggtgaaaggcgaacgtagtgaattgagcgaattggcaagtaacctgatgtgatatctatatcttgaagggggtggaagagaaggattccaccccctttttgcactgttattctacttttattgtgttaaaaactttattttgtcaaataaaaacgcacgtgttagtgaaaatagtgtatctttgcaccgcctaaaacaaaaactgtaaaacaaatgaaacagaatttttttcatcggtatctttctgcgaaggtactgcccatttggactattctattgattgatatatttattatcgtcgcatcctgcttgctcgcttactcgcttcgttacgattttcgcagcattttcttggattcgtcgacaatagataagaccattctttggacggtagtggctaacttaatcttcttccgggtattccgtacctattcaaatgtgcttcgcttttcttcgtttgtagacattatgcgcatatttgtgtcgcttacggtctcctatggggtattgatgattctgagtcttctgctggatgcttacctgggcattcggattggtgccatcagtgtactgtttatggcatatgtgatcaattttgctatgatggcctgttcgcgtattgtggtcaaaatgttcttcgaggtactcaattttgacggtagccacacgaccaacgtctttatttatggtgctaaagaagccggagtaaacatcgccaaatccctgcgtgtcaatttgcgtaatcattatcgtcttcgtggtttcattgccgatgaacccgaactgattggtaaggtgatgatgggggcgaaagttttcccgaatgatgaagcattgattgaaaacatgaatgaccgtgatgtgcataccatcattgtttctccggctaagatggaaaagctgaagaaatcagatatgattgatactctgctttccaataacgtgaagttgcttactgctccccctttgagtgaatggggtgggcaggcactgaataaaactcagttgaaggaaatacagattgaggaccttttgcaacgcgaaccgattgaggtggacatccataagatagcttctcacctggaaggtaaacgtgtaatgattacaggagccgccggttctattggtagcgaaatcatgcgacaggttgcttctttcaatccatataagttgatcctgattgatcaggctgaaactccgttgcatgacattcgtctggaattgcaggatcgttggcgtgacattgatgctgaaacgattgtagctgatatttcgaacgcaactcgtatggaggccattttccgtgaatacaaacctcagtatatattccatgcagctgcctataagcatgtgccgatgatggaagacaatgtttcggagtctattcagattaatgtatcgggtacacgtacgcttgccgatctggctgttaaattcggttcagagaaattcgtaatgatttctacggataaagccgttaatccgacaaatgttatgggttgttcaaagcgtatttgtgaaatctatgtacagtccttagccaagaaattacagaaggaaggcacacgttcggtacagttcatcaccactcgtttcggtaatgtattaggatctaacggttcggttattccccgtttccgcgatcagattcagcgtggaggacctgtcacagtgacccatcccgaaataatccgttatttcatgaccattccggaggcttgtcgtctggtactggaagcaggaagtatgggtaatggtggggaaatctacatcttcgatatgggtaaaccggttaagattgtcgatctggcaaaacggatgatcagtctttcgggacgtacggatgtgaaaattgagtttaccggtttgcgtcatggtgagaaactgtacgaagagttgctcaatgtgaaggagctgaccaaacctacttatcacgaaaagattatgattgccactgtgcgtgagtatgattatgacgaagtgaaagagagaatccagaaattaattgatgtaagctatacctatgatcagatgaagatcgtggctgccatgaaagatattgtccctgagtttgtgagcaaaaactcttgttttgaggcgttggataagaaagactgatcgtataggaatatcctgatcttatttatataatccgaaactatagattcaactatagcttcggatttttttatgtattcatgcttttcgttacttcgtaatcttattaaacatgtcctttacattttgtatttcaggcatattttgcagataaaacttttcgtaggctcctgctccatattggcagttaaccgttccgaaatcttcttctttacgggatggattatttccgtccatgcggagaaatacattcggaaaagctgctgattcgattgtatatgaaccatcactttgttcgtgtaacttgaaacgttcccaggcacttgctccgaactgacagtttacacgaccgctacccgatcctgcgaatgcgtgaatgccatttccgtccatacggagaaatactccgggatactttgaagattcgatagtaaatgtaccatcggtctgtttttgtactttaaaggctccgttgggagccatgcttctctgacagtttactttacctgcaccggcaccacaggctgtgctaattcccttcccatccatgcgaaggaatacatctttgaaagctactgattgaatcagcatcggttttgagaaatttactttacttttgtccatacggctcttttcccttcttttaaacttaatttaaatccttctttaatattatcaatggatatgtccggaccaatagctggacatgcaattgatgcatacattgtttttcccttttgtattgcatatagcgcatattctccattataatatgtacgtcctacgattttagtgtattgactttgattgtcgacacgatattggtctttgttaggtttagttggaatctctgttaaaccatctattaattcatgaattgctttttgttgcttactgttaaagttatcaaacttaccgcctgctttttctaattcccacatgatatattaattgttatatgatttatataagatagttagattttgtcgaaatcagaatgatttttaattaccattttaattccttttgattttaaattcagacaataagtcttaaattcagtttcggtaaaagggtgattaatatctacttcgaatttgctacattcgtagtaagttaaagtgttattctttcgagtatagatagctggaacgattccatccgaccatacttttaatccttccttattgccatttatccaccgttcataggtgtctttacctgttttaatttcgatgctgtttacttggcagatacctacatgacataatatgattccatcatctgttaacatctctttgaaatgtggaatatggcaggcgctatggcaagcatcaagaactaatctacaaacttttcctttgaagaaataggtcagatcttttatgtctggtttggttagtttgcaaatttccttttcatttccgtgtgttccgtaaataattaactctatacagctatcgctattaatagattttgtgttcaaatccagagtttttttcagtacactataatctttgtatcggatttctaaagagtttgttgtacatgtcgtttgtgcaacttgacaactatcatcttgttttaaaataataagcataatagtgatttgtaaaaagttcctactctttcttcggcttttcggaatccgccgtttctatttattctttgtaagcttacggtgacaaaagtgagaagaaaagttccatcttaaaaatataaattctgaatacggaatagtttctttcaggagtgtaaatcaatctttcaagtgctgtcttctaagccacgaaagcaatatacctgtatgcttataagacaatatcgtctattcggaaaaacattcttcctgtttaaaatataaaattgtaaccgggtcgatcactctctatttttgccatcataaacgtcagaacaaacggttgaaattcataaataacaatagatatggcagtaaaaatattgagtgtagatgatgaactcgatttagaagtattacttacccagtacttcaggcgacaaatacgaaaaggtgaatacgagttcgcttttgcccataacgggttggaagctttacagaaacttctggaaactcccgatttcgatatcatcctgagtgatattaatatgccggagatggatgggttgaccctattggctaaggtcaatgaactgaaaaatccggcaatgaagtgtataatggtctctgcttatggagacatggataacatacgttctgctatgaacaagggagcgtttgattttgcaaccaaaccgatcgatttggatgatctgtcgcggactattgaaaaggcgatcgaacaggttcgctatatccgtgagtcacagcaggagcacaaccaactggaatctatcaaaaatgacctggccattgcgggagaaatccagcaaacgattcttccccgttcctttcctccttttccggaactgacggaagtggttgatatttatgcttccatgactccggcaaaagatgtagatggcgatttttatgatttcttccagattgacgatgaacgtatcgggctggtgattgctgacgtatccgggaaaggggtgccggcatccttgttcatggcggttagtcggaccctgctccgtgcaactgctcttcggggtgtttcgtcggcagaatgccttacttatgccaataagttactgtgtaaagagagcctggactctatgtttgttacggtcttttatgggatttatcattataaaaccggcatgatggactataccaatgccgggcataatcccccttatctccttcgcggcggacggactgttgaatgcttgcctgtcgcttctaattttgtggtaggcgtgttcgatgatattgaatttgagagtaatacattgacgttcggcatcggtgacactttacttctgtatacggatggtgtcacagaggcttttaacgacaagcgggaacaattctcggaaagtaacttacaggatatattggcgtctatgcacgaaagtagttccgcaaaagaggttgttacgagtgtattgcagtctgttaagactttctccggagactatcctcagtccgatgacataaccctgctttctcttcaacgaatcaaataatattaaaataaaagaacgatggaaaagtatgaaattcattttgtaggttccgtcttggattcaaatacaagcggtgacgaacaagcaaaaattgtagctcttatcgagcaaggacattctgttgcattagatctcagcggctgttcttatgtatccagtgccggattgagagtcatgctttatgcctttaagctggcgaaagctaaaagtagagatgtttgccttgtcggtgtgtcacaagaggttaaagacgtgatgcacatgaccggattcgataaattctttcgtttttatcagactctcgatgaattatcacaaccctaaaaattacctgagcaatgacgttacttcagtttcgccctgtcgatgggaggttagatgaaattcttagtatgctgatgcatagtcgtgaagttgcttcacatccttccctgtcttatgccatccgtttggtcagtgaggagatcattgtcaatattctcaattacgcttatccgcagcaggcagaaggttatctgactctgtgcttatgggatgaagacggagagattactttggaatttatagatggtggtattccattcaatcctttggataaagccgatcctgatatttcattaccgttagaacagcgtgaaataggaggattgggcattttcctggtacgtgaaatgatggatgacgtagcgtatacgtacgtgaataaggagaatcggttgaccattaaaaagaaatatctgcaacccactgatgaacctgtatcatgatcaagttaaacgaaaatataatccgttggatcattgccgttccttgtatacttttgacagtatgtctggtcctataccgggcatatcgtcattcggcatcggacagggagcgtcttgctctgtctctggaggaattccgggataaagaaaagaaatcggttcttatacaacgggtcagtcaacaaatggaggagattgcttatcaacaaaaggatatttccgaaaagagaagacaggaagccgttgcgcaaactcaaaaggccaaccgaatgcaacagcaggcagagttggcacgggaaagagcgcttgctgcacaattggaggctgagaaagcgtatcggatggcagatgaacaaaagaatctggcgatggaacggcaactacaggccgaacagtcgaagagggttgccgatacattggcttttctggctttgggacgttcattggggacactctctgttactcaatatcggtcgggcaacatggaattagcttctctgttggcatataccgcctggtggtttaccaagcgatatgatggcgatgtatatcatccggctgttttcaatgcattgtctttgtcttgcaggcaagatcagctttggttcgggcataaaggagctgttactgggatcaaactgttatccggaggcgaggaaaaagcaagagccggtcggaatcctctgccgggattggtcactgtcggcaagtacggtgagatgatacgttggaaatcggaaaatgggcagacctatatctccgaattactgttgaatgatccctgttatgattttcgggatgtgctgttgcggtccgattcacagatgtatgccttgtcatactgcgggcagcttatctccacggattccgccggtatcgttacccgctttttgcctaaaggagaatatcggcaattgatttcgattgcctctaacttggtattggcagtttccacaaccggtatttattcttttgactgtatcaaccatgagatacaaccttattttcagccggaacattcgataacttgtgtcggtcaaatggaaggctatctctatgttttttttaagaatgggacagtagctttactttcgtcggatggtacatttctcagatttatagacagcttgcccgagaatagtgtggttactgcattctgtcctcttaccaatgaaagatatgccattggctgtcgtgaaggagtcatcctgatttgtgataagaatggaaatatccggcagaagttgatagggcatcaggctgcggttactgctatttcccggaaagggaacaaactgttttcgagtagttacgattgtacgctgcgtctgtgggatcttcgtaaaggaaagaccgagtcggccgttattgtgacaagccccggttggattcatactttttgctttcatccggacggtacatctgtctttatgggagacgaacaggggcggttgtatcgggtgcctatttcacccgatcacatggctgctgttgtccgtcaggggttacagcgtgattttactcgagaagaatgggagtattatatcggtaagcaaattccatttgaatcctattacctaaaaacgtatcagccatgaaaaagatagtctttttgataatgtgtctttgctcggtatatgcaaattcacaagagggtgtcccgttttttgtaaactatccggcttcggtttatcaggcgcataatcgtaatttcgatgtcgtttgcgacagttgtggaaatgtctattttgctaatttcgaaggtatccttcattatgactataaccgttgggaaactatttatacaccgggcttttcccgtgtcacccgtttgtttcgtgattcggaaggtaggatatgggtgggaggatataacgtgttcggacggatagagcgtgatggacgcggatgtattacgttgagaacccttctttccgatctggacacagactctttgggcgaattggaagatatggcagaaatagataaacgcatttatctgaaagctacatcaggaagatattatacggttcagtcagattccattttgacaccggttcaggtacttccggcccaattgcaggaaaagtggagaaatcaatcctcagtctcaatgaatcgggcgttttctctacccggaggagaaacaatctcgataaactctgcccatggattaataatggatgacagtgggaaaaaagaacggttttccgtaactgagagaaatggcttatgcagtaacgctgtttcgggtattgcggccgatgggcgtggcaatctctggggagctacggataacggtgtgtttcatgtttttattccctctttgttcagccgttatacctctggtgaaggtctgaagggagaggtaatatcggctgtctcttacaaaggaatgatatataccgggaccttacagggattatacgtattgaagcaaaacacttttgttcctgttcagggaatttcgcaagcatgttggcaactgtgtctttctccacaaggagaattatatgcagcgtccggcgatggtgtgtatgtgatccgggattataatcattcggaaaaactcacagatatggcagcttattcattgacattcattgggcatacgaaccttctgatgggcactatggatgggatttatcaatattcggcagatgaggaacggataaagaaaatttccgatgtcgaaaaagtcgttcgtctggaagtgaagaaagatcgttctgtatgggctaaaacgttgtacggagaaatctatttgcgggaagagggcgaaagctcttttgtacttcaagacagagagagtgaagaagtaatgaccgagtatacggacaacgatggctgtcattggcagacaaatctgaaaggaaaagaggtacaggtacatcattcgcaaattgatacggagaaattcaaccaatgcctgtatgccattcggaattatgtcgtgagggtgatttatattgaagaagacagggcggcatggttcggcggtgattttggtttaattcggatggaccttgaaaaggcccggacatttactccggttgctccccgcatctatcttcgtgaagtttgtctgaaccgtgattctgtctattggggaggagatctgccggaagagtcctggggagcggactggcagataaatagtacagtacctcgtttggggaatgatgtacgttccattcgtttttcatttgctaccgatgcgccctgtttcaccggttccaatgagtatagatatcgcctggtcggttatgatccggaatggagttcgtgggattccgggactgtgaaagagtatgccaacctttcgtcgggtacgtatacgttttgtgtccgggcccgtgatatttacggcacagagagtgaaatgaaacaattccgcttttcgttattgcctcctttttatttgcaatggtattgtctgatcctatataccgttgcttttggaatgctgttgttcgtattgtttaaatggagaatgcgcagtttgctgaaagagaaggagaggttagaggcccttgtcggccaacgtaccaaacagttggtacaacaaaaaaatgaaattgaggaaaagtccttaaaattggaaaaagcattgaaggagctgggccaggcacaagatgaattggttcgacaagaaaaaatggctactgtaggtaaactgactcaagggttgattgaccgtattctgaatccgttgaattacattaataatttttcccacctgacctcaggattactgaaggacctatatcagaatctggagagtgtaaaagaacttttggatgaagatacctacttggattcggtagatgtcatcaacatgatgagagataatctggaaaagattgaggaacatggaagtaacaccactcgtgtactgaaggccatggaagaaatcctgagagaccgtaacaggcaactggaaaaaacagaattaatcggtttatgccggaaagacatggagctattgagcagttattatcagaaggagattacggctatgcacattgcggttcgtacttccttgcccgataatccgttgtttattgacgggaatgccgaacaactgggaaaaaccattatgagtcttcttaacaatggtatgtatgccatagccaaaaaatacggtaagaaagcctatccggcagagattggcctggcattggaaagtaaggacggacaggcagtcattcgcctatatgacaatggagtggggatcgagcagagtattctggataaaatcttcgatccgttctttactaccaaaacaaccggagaggcagcaggtatcggtttgtatctgagtaaggaaatcatattaaatcaccatgggcagatagcagtacgttctgaaaaagatgaattgacagaattcactatcactctgccattgtgggaggaaaagtcagtataaataaacatagaacagattgattatggaaaaaaacatttcacaagagaaacgaattgaagagttggaagcacggctcaaagagcaggaaaagctgggatcattgggtttgttgagtgcaggcattgcacacgagatacagaatcctttgaattttgtcatcaatttcagtaaactgtccggtcaattgttggccgacctggccgatagggtggatgaagcaaaagctcgtattccggaagcggaactggaagatatcaaagatatactttccgggctgagagagaatgtggacaaaatcaaagagcatggtgatcgggctatcagcattattcgtggtattttgctttactccagggggaaagaagacgaattcatgcctacacaaatacaaaaattgactaaagaatatgtgtggctggcttatcatgccatgcgggccaattataagaatttcaatattgctatccgtgaagattatgctaaagatatcccctcgatccggctgatcccgcaggatttcagtcgggcagtcttgaatgtgatgaataatgcctgctatgcagtatggaaaaaatggcagaatgctcccgaaggatattcccccgagataatggtgaccttagaaaagttggataaaagaattgtactttctattcgtgataacggagagggcatgggtccggaggtcaaacgaaaactatttgactcttttttcacaacaaaaccggtggggcaggggacaggccttggtatggcaatcgttcgtgatattatagaaaacaaacaccatggaaaagtattgtttgattcggtcctgcatgaatatacttgtttccggtttatcattcctatcgcatgaaacgctgtctgctatatatcctttgctgctttggggttgtgcaactgtcagctcagccggcggataacatccgtaattcgtttgtaaaggcggaaacattttataagagcggagatatcgatgaagcttgtcgtatcttggaggagaatctgtcgtcttttcaaggtacgatgcataccgaggcgtgccgtttggctgcattatgctgtttagctttagaccgcttcccggaagcggaaaagtatgtttcgctgttattgaaagacgaaccttattattatatctcgcttcaagatccggaacgctttgcggatatggtaaggaaacacagggagactaaagtaactctggtcacagcctcacaacaggtagagaccccggaagaagctccggtgcctgttactttaattacggaggagatgatacgggctatccatgcccggtgcctgcgggatgtactgatagcttatgtgcccggtatatccggtttgtcttccaatgaagagatgaatctggctatgcgcggggtatattctcccgaacaggagaacatattgattatgcaggatggacaacgtctgaacagttatattactaatgctgtttcgccggattatggtattagtctggcaaaagtcaaacaaatagaggtgctgcgcggaccggcttcttcgctttatggcagtgtggctttgacagccgtgattaatatagttactaaagacggggtggatgttcgtaatggttccatatctgtcagcgccggtaatcggggccagttggctgctgacctgctattgggaaagcacgacatgaacatggactttatggcatggttctccttgtaccgtgcaacgggagaatcggtttttgtcccggccgaaaaacaatatgctctttaccccagggacggattcatccgtctggacaattattcgggatttcctgccatggatggaggaattaaattgcaacgtggaaatttgctttttagtttcagtatgaattacgcgaagaaaaggcaaccttatagcatgtggctcttttcttctccatattcttatgagcggtttcgtacttttgacggttccggcccgggatattccaggtggtcggcaagagaacaggctgtttatagccgcacgtggcagcggatcactttcagtaccgcattttataccgattggaataaaaacgtacattatgaaacctcgggagatactttacaagactatcctatttttcctaactatgattatcaacctattatttatccgactcgcggagcatttcaatacatccgctggatggattttaacgtaggctttaatgggcgtgtaaactatgcctatgattgggggaagctggggaaaggcaatatgcttggcggtgtggaatggaatcggtatacgctttatgattccgagtatttggaaggtatgaattttaaagagatcgtcaggacgtggatcgaaaaacgactttacacgggacacgagatgaacacggatgcctttttccagattaaacacaacctgcataaaaattggattgtcaatgccggcatcaggtatgactataaacggcgaagtaataagcggacattacaggctttttctccccgtctgtcactaatttatctcaggaacggattaaatatcaaagccagttattccagagcatttgtcgatgcgccctattattacagaaacaatgaaatggatacctattcgggtggcgaaaatctgcaagctgaatatctaagttcatatcaggtaacttgtgcttatcatcattcaccttcacatatagatgtagagtgtaatttattttataatcgggcgtcccatttcctgttcacacagccggaaacacgtgtttatgaaaatgccggttctctggatatgggaggtgtcgaggttgttgctcgttataaggcagaccgactgagcctggatggaaacctgtgttttcagaaagtattgaattataccaatttttttgttaccgatggatctgtgaataacgtacccggcttttctatgaatcttgtagcaaactactttttacttaaaaagaaagtacagagctggtctgcccatttaaaattgaattgcagtagccactgctacactcaggtaagtgtattggaagatggactcaatggagatgcgacgaattacacagtccgtttgcccggttatgctgtcttttctttcactaccagatataagtataaaaggatagaaggcagtctgggcattgagaatcttttcaataaccgatatgaatgcggaggagcgactgttcctatccgccagaaaggaaggtggatttccgccagtatattgtataatttctaaatcaaactaataatgaaaacaaacattcaagaaaatctttctcgatcactctctacctggggtgacaaaccggcggtcgttgcaaaagacggtaccgtctcttatcaaatgctggaacgttactctgccaatatagcacaatctatccgtcaacgtttatcggtaactgatccgtccggacttcggaatatctgtatcggagtttgtatggaacgaaacaaaactttagtacctgccattctggctattttccggttaggggcaacttatttaccgatagatccctcgctgccggataatcgtaaacggtatatggctgaaaatgcggatatggttttgttgttgaccgattcatcgaatgaagtaggtggaattccgtccgtccgccgactttacctgaatggggagcaactatccgaaccggttgttggtgactatactgaagttcttcccgatgattgcgcctatattatatatacttccggaacaacaggcaatcccaaaggtgtacgtattagttatcggaatctggatacatttacgaggaatctggtagataagaaattgtatcatttgtctgatccggcaaacaggtatctggcgtttgcgagtatcagttttgatgcttccatattagaactgatgatgtgtattccggtcggaggaacattgatcctggccggtgaggacgaacgcagagatatttctttactagacgaactgatcaggcgcgagaaggtgaatattgcttttttccctccttcgttgctgggcatgtttgccgaccttgactttccatcctttaagactctgctctttggtgcggaggctattggtgaaaagttatttaacaggctgaaacagcagccttaccggttgatgaatgtatatggaccgacagagaataccgtactcagtaccatacggattgtaggcaaagatacgtcgtatgacgatattggctatccgctcaagggaactgtctgttatgttttgtctgaaaacctccaacagacaactcttgaggctacaggagaactttgcttgggaggacctcaggtttcgctgggatatattgggagtgttcagctgaatgaaaaatcattcatctcgtacgatggagaacggttgtacaggacaggtgacttggtacagcagcaaccggacggttcaatacggtttatcgggcgaaaagatactcaggtcaaaatacgtggctttcgcatcgaattgactgaaatagcagaacgattgaatagagatccggacgtggagagagcccacgtagtagttgttgagcggaatgggcgtcaattattgggagcttatttgcaaccctcagtctccggtaactttcatctggaagaggtcaaagagcgtttgcgtgcagaacttccttactacatgatacccaatttatggcaggtggtagatcattttcagcgtactataaatgataaaattgatgtccgggcgctcccggcttttacttcgttggagttgaagtatgttcctcctgttcatccgggggaggttatcttatgtggaattttgaaggaaatgttaggtttgcctcaagtcagtgttgaggccgatttgattgatgatctgggattaacttcgctggatatgttgaggcttgttaccgaggccaataaaaaaggatgtcccatcaacgtatctgcagtttatactgcccgtaatctgcgccgattattgctcgttccgcggcaagaacctatctattggtacaggcagcaaaacctgaagaaacccgtaatcattctggtttgtggatctgcctattttaatcatttgtactttaatttggccgaccgcctttatcccaaatatgactttctagttgtagatgctatctacgatcattttaataaagtggccacggatattccggaactgttggaatattatgtccggacggttcagccaatgatccgggagcgtaccgtctatgcgcttaccggcttctgtatgggagctgaactggctatcggcctggccgaaatgttacatcgctccatggggataatgccaaaagtttttgctctggatggacaggcttggcaaaatccggctctctgtcaaaattatcctttgttggtatttcccggagataccgatgaaatggtacgtgaacggaacgaaatcataaatatttattttcgaaccactcctaatctgatttatcagggagaggttattgttttgctgtccggattgttccatcaacaggcgggattgtctcctgaagagtcgtggacggaggaaaactatcgtatattccggacagaatatgacaattgcgaaagattatggaataaatattatccgaacgctcctgttttgcgattgccggcaggatcattggcactttttagaaggggaatcattggaacaattaataactgtgtttttgaagtagatttatgcagactgaaaactttactttaggtaagaaagagcttcttattttgcttggcttgactcttgtactgccttttccaatcaattgggcattaatcgaactgaatccgttgactctgatggcgggtgcagacgatgtgcccacctggattggtttcggcggcagttatattggaggaatcatcggaggggtcatctcgattatgattctgaacaagacacttcagcagacaggtgtacttcatcacgatttgaaactcctgcagttagataccataatttatactcagcaacaagattggtttaccggtttcaaacaagaactggcagagaatctcaaatctattgatttgtatgtgttgaatacggttgtttcgtctatatccatgaaaaactatgcatatgccaaagaggtgttgacagaaatcaataaagggctcgaatatcagatggttgccgcatccttttctttcacttctacgcatttatcatccgaagaaaaaaagtatatgaatctggtacgccgcgtacagactgaatatagctcttttatcaaggatattctttactatattcctttggcagaaacgatatcttccaggaaaaaactaaactatgatcagctgatggactatactttgtcccaatatgattatttgcaaggtcaggaaggggagtctacagcttcgggagccatcataccgcgtgttatggaaatcgatccatctgatgatatacggaaagaactagaacggataatggaagaaagattaaccgggcgtacctatttgtatcacctgaagtcagatcttgcagaggctacgcatcaattaattatttatgaagagaaccgtataaactctattctgcataaacctgagagagaaatgaattgacatatattaatataatatggtatttttttatttcagtattaaaaatgaatttatatttgtttttatttggatgaaaagttactttaaacttgatttatcttttatataggaatagttttagaaaaaataatccggtattcggaaaaaaaagagatctagtcagaatgtaaaatttccatagattaataaaatcctatttttgcactaaatgaaatttaaaagttttatatatgggtaaaaataggaatcattacagcttttttttgtattttgtctttatcatatttgtgcttttgggttgtcgacctgtccgggtacagatgccggacggaatgtatggaagatggaaatcttctgcaggccgtccggatattacattagggacagacagcatagggagcttcgctatagttcaccaccgtatttatgacggaaaaatttgtcctgtccgttatccgcttcatcttaattcacctactaaagggtatatccgtgcagaaggttgcatcctgttttattatgacagtttgaaatgtgttttatacttctctcccggaggtgattatacacaataattacatgcaaacacttcagttaactaacaataaataatttatgaaagagaattcaatcaaaccgtattgttattgtggtgagtcagaaagctcattggtcgataatgctatttttgtttattttggtgatgaatacagaagagtacttctggatgaaatcttatggctggaagcatccggcagttattgtgtactctgtatggagaacggtgcagagataacagtcagctatcctttggatcggatcttcaataatgaccttcctcgcggtaagtttcagagaattcatcgttcttacgctatcaatgtgttcaaggtgaccggatttgcaggtaactatgtacatataggaaagaagatgttgccggtcagcgaatctcacaaaaagaattttttagcttgtttccataaaatttactcaaagcgcgcattgggaaaataatggaggtaactaaaaagaaaaccagtttcgtttaaaattaaaaatttactacgcaagggatgtgcactacctttgcatcgtaagcttacaaaagagaaaaacaattaagtaacaatttaaaaaaacaattattatggcagttgacaaaacaccgtcgcaggttgcaaccagtgcgttgcaggcgattccgttcggttctattattggtggtccgttgaaagcatgtgtggaagcacaggctttggcagcaaaaacaacttgggaatttattcagaatgtaggtataaatgttaatcccgaaaccggtgagaagacagcagtcaatgtttctttctctttcattcaaggcggacgtttagtccagttgaatattccgttgttgaccattgttcctatcccttatattgcaatccgtgaagtggatattaattttaaggctaatatcagtgcttcctcttcaacaacggcagagacgaatgaatctgtatctaaggatgcggctttgaaggcttcggccagtatgagattcggatgcttcaaaatgaatgcggatatgaatgcaagctattcatcgaagaaggattctaaagcaacttccgattctaagtacagtgtagagtataccatggacgtggctgtaaaagccggacaagacagtatgcccgcaggtctttctaaaattctggaattgctgggcaactcactggatgtttccgatcctgccggtacactggaagtgaacagcaacttgctgcttattgaaaatggtaaagaaacagtacggttgattgccacctataaggatggaagcggtctgttggctcctgacaaactgactattacaggaaccggagccaatgcggccgactttaaggtaagtggtgacagtaagattatcgacttgccggaaggtacatatactatcaaagcagagggaagcaagaaggaagtgattgtcgaagtgaaaaaagatacggcaactccccaggaagaggtaacggaataacgttaattaaaacttaaaaaatcatattatggctcagttaagttcagtaatcggctctatattgcgtgatatcgtttcggcacaacacgaagcaaatctttattcgttgtcgcttggcgactcttacggaaaagacggaaaggcgaaagattttcaattgcctaatgttatggtaagcgatatggaactggatttgaaatatggtgtgaaaagtgcatcggaaagtcagcaacagtttaatatcaagtatgataagttccgtcaattccttaaagaactgtgcgaacaagttgccagggtagccattagcagtgctgtcaccacagtgatgacttcggatatagagagaaatgaaggagagaaacacttctttgaacggcttaaaaaagaaaacaaacttcatcaggaattctgcacttttctgagccgtaatatgagaaactctttccgaaataatctctatgatgccgtagacagtagtaatggttctgtgaataacgatgttgtgattagcagactgacagatgtcgtacgtaaaaaatttctttacgatacagatcttgatgatctttttgccggagaagatggagaaaaacttcgtgataccgctgaaaagaatattataaaagcgatggaagctattgtaaaaaagctgtcggtagatgccaactttaaaagtcttcattcatttccacagctggatgtggccatcacggctgatgaactgatgaatatgcctgaagaagcgatacacagttttaagatcaagttcagccctcgcaattattcagtcagtcaaacggatgatgattcgttactggaagattttgtgatgcgataaaatcaaatgatataatatggataataagaaagttaggagcactagtagccaggtaatggaacttcagcaattgattgccggtcctttgattgcaactattgaagcggattcattatcttcacaaagatatctggattatctgatgaaaatcgcatttgaatcctatgatcctgtgacaggacggaccggtaagatacgtatgcttacgttcaactatcagagtcaggatgccggtgggggaagaacgcaaagtgtaagtataccgatactgacattggtacctctgccactgttgcaagtacaggaagcagatttcgatttcgatattaaaattctggatgcgctgtcggaaacagctgaagagaaattttcactggaagaaggtaaaagcatgaatgagccgcaaagtggagggggatttaaactccgggcttcactggctcccaaacaaggagaaggcagcagcacttcgaatgtgcagcagagcttgtcggcaaatatgaaagtgaaagtgaagatgcgtcaggcagatatgcctgcggggttgtctaatctgttacatctgacggcgagcaatatgcaagtagaagaaactgaagctgaagaaataacggaaggaggaaataaatgaataatgtagccgaacatgcccgtgaacagaaagccgggatgaagtgcccgcaatgcggagcatttattgagacatcgatctttgaattattgacatccaatgccttgcagtgtccatcctgtcacttgcgtttgaacatagaccgcatgaagtcgaaagcagcttttgacgcattgcggaaagttcagaatgcgcaggagaatttggagagaaaaagtaagttcaacggttaaacggacgaggcatgaaattgacttttttcaagcggatgggggagaagatccgccatccgttccgaaaggaaattccgaaaacaattctcgttgtagaaactgcccctcagccgatagcggataatacaaccgaagcaacggcagaagaatcttccgtcataagatcggcagatcaatgtggggaacaggcacgttattttttactaagaaataacaagccggttggtaaacctttcagttattatcatcccgagatacggatcgttcatgtcggtagttttgtaaatgcctttttatttttcttgcgtatgtgcgatcagcgtctgttgacctatcgccagaccggagaatatctgcattgtacagccgtttttccggatgaaagcggtaatttgtatttcacgaataaagtgacttgccgtaacaaggaaaatactgttgcggtcctgaaaattgattatgttggccttaagccaaaaatcactgaaattagatttaaattaaatattaaaaaatgaaagagtatgaatcctatattgaataaaatgggcgcaaatgccaatgaacagaaaaaacttttgatggagtgtgtgtcaatgcttgaaaagtatgtgaacagatttccggcagaaaagggatgtgcttcattctccggagaagatatgaagctgtggaaggaagtttattttccgaaacttgttcagacggatattttgttggacggtaaatttttctgtggcacgtcgtccggtaatagtggtattggtacagacggttgttttaccggttatgaatttttccagtttatttatcgtgcctacaaggcgctttatgaactggaaaaggcttcacaaatgagatgataaataaaaaataattgtaatatgaagactattaaattaggttatgaaggtgaagaagctctcttgctgtgtcgggagttgaaacgcaatggttattcagtaaaggaaaaccggacttttacacaagaaatgaaagaggcagttattgattttcaacagaaaaacaagttggatgctgatggaatcgtgggatatcgcacttgggaagttctgttctttacagggcatcccattaccgaacgtttgactgaagaagattttattcttgtggcccggttgctcgatgtggaagtggctgctttaaaagcggtacagcaagtagaaacaggagggagaggaggattttttgctcccggtaagcccgccatccttttcgaaggtcatattttctggaatcaattgaaaaagcggaatatcaatcctgaatcgcatgtgaaggggaatgaaaacattctctatcccaaatgggagaagggacattataaaggcggtatgggtgaatacgatcgtttggaacaagcccgtaagatcaatcatgaagcagcggatgcttctgccagctgggggatgttccagattatgggtttcaactatgcagcctgtggagagaagagtgtcgacagctttgtaaaagctatgtgtatgagtgaatgtcgacaattggtgctgtccgcccgctttatcaaacaatccggaatgctttccgctttgcaagccaaagactgggcagagtttgccaaacgttataatggtcctgcttatgagcagaatcaatatgataaaaaattagcagcggcttaccagaaattttcgtaggacaattataacctttgaactatctcaataaaatttgaattaaaagagaactgtggattaaaaaagagtggtgaacaaactgtgaagcttgttcaccactcgctattatcatcttacttctcagagaagtattttaagaactgggtacgttcaaacatgttgatgccttccacatctttagcgttcagcttacctttgaattgagagatgtgcttaaatcctttccgctccatccatgcgctaaggaagcggttcatttctcctacaaacagattggtgttctggtagatggcactacatatttcgatggccgatgctcctgctaaaatagcttttacaattccgtccggtttatgaattcctcctgaagcggcataatcaattttagataccagtgaagaagagatacctatccaacgcagggttgtcgaaaggtcggatgcgttgctgaacacgtctcctgaagtatgctccatcttctctacgtcaatatccggttggtagaaacggttgaaaaggacaacagctgctgcaccgttggcataaagttgatcgatcaaggctaccggattggtaaagttactgcccaatttcataataaccgggatgcgaattgttttcttgatgtggctcagaatatcgatgtgacgttgttcaaatgagccgtatttatattggatgtccgattgtagagcaagaatatttatttccagtgcgtctgcaccggcttcttctatttgctttgcaaagtctacccattcagcgtcggtatagcagtttatacttgcaataacaggaatggtgcatatcttcttgctttctttaatcagttccagatattctgccaatttatgattacggatatattcagccagataatcacttccttccggatagtatgatggattcctcagacggtcagcttccatcataatttgttcttcaaatagtgatttcaggacaatggctcctgcaccggcagcttccagctttgcgtttttagcggcactgttagtaagtcccgaactactgataattacaggatttttcaaagtcaatcccgcaaaagttgtttttaagtcggccatggtaattattgttaatggttttttcaatgaatctgttacttcattgattcaattattaataaactctttccccgaagattttacttcctactcttaccaatgtactgccctctttaatggccagatgatagtcatgggacattcccattgaaagttcgcaaaaagtcggttcgttggcaaaatattgttttttcacctcatggaaaaaacaatttaaagaacggaattcccgttcgatttgttctttcgaatctgtgttggtagccattcccatcagtccgcatatctgtatgtttgccaatgctttccattcggcggcattcaacatctctttgcattcgtcaaaactgaaaccaaacttggtttcttcttgagcgatgtgtatttgcagtaaacagcgaataactctttctgcctttatggcttgtttgttcacttctgccagcagtttgtaagagtcgattccgtgtatcatggacacataaggcgccatatacttgatcttgtttgtctgcaagtgcccgataaaatgccactcaatgtctttgggcaggctttcatacttgcctgtcatctcctgcactttgctttctccgaaaattctctgtcccgcgcgataggcttcttcaatggcttcgttcggatggaatttcgagactgcaaccagtcgaacgccggatggcaattcggccaggacctgctttaagttatcagtaacattcatttttatactgttttgagttcatttcaccacagattacacggattttcacagattgataattttttatttcattgaaaattagattaaaacatctgtgttaatctgtgtcaatctgtggtgaacttagttcatttccttatataatattatacttccggtttatcattaggctcagaactatatggatatacatccatgattgctgtttcagcaacagaacctatctgataatcagccattgtacctttcatgccttcgtccagcttttttacagcatcgcgcaggtcggctgcctgtaccaaaacttgtgtcgacgtttttttctcagcaccacttttttcgtctagtgtgataaaaatcagtttacacttaaaccagcggtcagcagcttcttcttcgctggggaaaagttcactatagttggctcgtttgatatccgatacggtaaattctcctgtaatgaacggagtcatctcctcaataatgcgtgcttctgcttctgtaaagctgagtgcatccacgagataaggttcagtaactttcttgttcattccgttttccatcaatttctcgtaacggatcttacactcaaaccaagtatgcattgacatattctcttttgatttttaagtagttaatatatgattttctatatagatctgcctatatgctaatctattctactacaaagatagttcaaaatctctctttatgctgtgataaagataagaatttattgccagtttattgtaatttatcacctcacagcccggaataggggcttattgagggatttttagttgatgaattcgtaagttggcgttgggtatacaatttctacaacatatcaagtatgtgggatttagtgcctcattggagaaaagatccagacacctgtaagatcaaaaccatttcttgcatatatgcgcagaataaataatggataaaatgaataaagtggtttacgtatatctcgtctttgagaaaaaagactattttttcggcagcatcgccgccatttatgaccacctgagcgcggaacaggtcggagccggctaccatacgctctggaatgtccggtggaaagagacgtcggtcatactacgtccagggctattataaaggtcagaaggcttctgcgtgcctgtagtggcaggaagtgaccttatgtcggggtagccgtaatttatggcaatagtgattgcttgaggagtggtccgcaagtggagggtaaattgaggcaatattaccttgattttaataaaaagcctgtttcccggtaatattcagcggtaaatttgtctgtttccggataaattacacacctgtttccgtggtgcgtttcattaggaactgcagggtttccggatttagagaaatggtatcatttgatggcgagagaccggaaagagaagaggcgttagaagcaagcaagaaggaactgattatacaaaaatagcctatacggtttatatagactattctttttatatccgggttaccacaaagcgacttttcctaaattgccaatttcaagtttagcgcttattcccatagccttgaaaactctggaaatagtagaaaaagtcaggttcttcccattctcgatccgggagatctgtgctctttgtaccccgatcaagttgcctaattcctcttgggtcagattctttgattgccgggcttgtttgatcgcttcgccaatcagaaacgaatgcaagtccgcttcaaacttatctctcttgggagtgtctttttctcctatgtgcctatctaatatttcttcttctgtataaaacttcattgtttccatacgctttatttttttgagttaaaatatgcttttctgatctcttcggctttggctgtttctttgggcggtgtcttttgagtcttcttgataaatccatgcgtggcaatcaccaacgtgtctgcgccgttatctttgtcccaaaaggccagcagcctgtattttacttttttatagaatgtcctgaactcccaaatgtccgtatcatctaattttttaaagagttcggggtcaatcacaaacttcgctttggcaatgttgtagatgatcttgtctttgatctttgagggtaagtgattcagaaaatcgtctgcctcctttgaatatacaaccttgaatttagcttttacttccattacttttattttgatgcaaatataagcaaatggttccatataaagaaacatttttctaaagaaataaaataaattaataaaagacagcttcccggtatggggctttttgtgtaccgtttcttaattggataataataaacaaggcattcaggagtaaaaaatgttcccgttgttcaaaagaagaagaacgagtggagtatcggtggaataaatggaagaaaaccattacattttaatcattgtgtcgtgatgtcgtgttgtttgtcgctacagaaaatgatatccaaaagttcggttgcaagtttaaaatctggacattttatgatactatcttcttctgtcggataaccaaggagattaatgctaccataccaaactatagatttatcaatgacacatgaacataatgacaaattgggtacaacccttacgaataatccttgtttttttagatactctgtttgttcgtttgaagcggatgtaataatcgctacttcaatgccgtttgtttgaagctcttttagaattttgacaaatgcgtttcgttctgtgtgatagagttttggagaagatactacaacggattgttttgaacttttcaatgcttttgtaaatgactgacggaatgtgcttccattgaaaatctgtccttcatatgaagatgattgtaaactatcgatattgtcaaataaggtaaggttgtctttggacaatacactataaccaatagcagcatatcccttgagccgttttcggtacatgttttcacaaacaggttcgtgtatatcaacataatcatagacacgcacatctgttttaccttctctctcccgatgtaagcgaccagcatattgggcaaccagccctttccatgatataggaagagcaagaaatagcgtatccaatcgtggataatcaaatccttcgccaatgtattttcctgtagccactatcacaagaggggcatcttgcggtatgtcatacagtctttgaaaggcttctcgcttgttcctggttgacccttctcctgtcagttggattacattggcgatatgtggttccagcatctcggcaagcaatttcacatgagatgttctgtttgtcaatataataggagtgcgactttccgctacattatgcagcacgtcttctacaataagtgtgtttcggatttcagactcagaaagcgattgcgataatgccgtaaacgactgtttgtcatcagttattggacgataagatgtgaatctgggcacaagataacgccgaaacgattgtttttctatttgcgctttagcatcagacgagtatcgaataggtccgcattgcataaagatgatgggttgcaaaccatccttacggattggcgtagccgtaagcccgtaaacaaaatgcgatgtgatgtttttaagtacattttcgaatgttacggaagacacgtgatgacattcatccacaatgaccattccgtattcttgaacgaaaggcttgacttcaccattttctaagcatgattgcataagtgcaatatcgataactccatgtagtgtgtttgaggttgaatctaaacagccgatgggcgagaaaacattctttctaccacgcttcttgggaatatctggttctgtgaaatcaatgtcaagaaattcggaaaggcgttcgtgccattgcaaaagcaatgcttttgagtgaatcagtatgagcgtgtttaccttttttcgggcaatcaatgctgctgccgttacggtttttccaaaagcggttgttgctgataataccccattggtgtgagccatgagggtattgatggcatttaattgctcttcacgttccttgcctttaaatgctacggcaatatgtttgccttgattagttctatctactatttcataagtgacaccaagagatgatagcattgctgttattgcgtcttcgcaaccacgaggcattacaatatattcatctgtgaaatcggcacgacaaataatgcgaggaacattgtaagtggagattcgcatagcctgtttactgtagaactcaggattcttgaatgctgcgatacgtttaagatgattgactatcgtatcggaaatggagttcagtggaatgtatatcttatccgatttgttaattttcagcctcccatcgaaatcattccgtgtaatattctgaataacaggggactcccacggttttgtctctgaagatgttgccaatgctccaaaatcttcctgccggtattgagccagtaatccatccacaacactttcatctatcttctttataccgtataaataagcccattggtctttgaaaggtagaaattcttcatctacaaaaacactgttgcctgcttttcttgctctgccttgcaatggcaaggctatcagatttccgaaaccaccttctggtagcctgtcttgattggggaaaaagcggtcgtatgaatcaaatgtaatacgcccgtttagtttcatggcttttgtcaggatggtgttgcctaatttccttgctttgtaggaaggtataggctctttaaagaaagtccatatgtgcgccccgttaccggagcgtgagcgttctatgctgtatggaatttcccagtccctgcaaactgcaatgaaagccaatacatcctctttgtatccgtgagtgcaattcttgtcgtcaaaatcggcacatagaaaagagcatttattgtcgagggtaatagcgtatagtccaattacgtcacatccattttcatcttttccctccaaatggcgatagatgttttggtttgtcaaaggagcaaagtttcggttcgggcattctgtgcacttgtttcgttttttgtcacaggcacctctgtaccattcgttgatacagaccggttgatagccacctttttcagtggtcttgctaaaccatcttcgtgcaaagacatcttcacgacctttgaagaaactgcgaaacaaggcaactttttcgtcaagagagagcttgatgggaggaaatgtgatggaagagaatgccgacccgttcgtaatattcctggcaggatatataatgccgtgttgtagaagaattgatttcaactcttcgttttcatccaatagggtattatacctcttaattagagcatcgtatttctcctgaagattttccatctcattttgcagctaataattcgtaaaacagtgctattccaaaatttaagaaggtccctgcaagaacatattcggttttagcggtatccttagaaacaaccaactattcataattttcaaaatttatcttgaagcaagtggcatagtttctttgtttcagttcaatggttttagatgctgataatgaagtggaagacactatatctgcagaaatggttgcatacatattttttgctttttgtttcaagtgcaaaaataataattttatctgtcgctgtcaagaacaatagcctataaaagctataatgttaatttatagatgatttaggctatatgcactatataggctatgcagtgattctgtgttattatatgtgaaaatgatagttaagactaaaaatggttgcttttaattctgtattccatacacttgtaaagtaatacttaatggtgttaaatattatggggtgcgtagggacaaatcgaagtttcatgttcttaattataatatatggttacttgtttatttattgtatgaaagtaaggaaatgcaatacatgattgattattcttaattaatggcaaagtgttgatgagattcattttatttatcatattttctttatgtttgcctttggtcatgcaaggacaagaacaaaatgtgtggacacaaaatgactctttgaagttaaagaaaatattagcaggacaagctgaaatccgaattaaccgggaggcattaagagaactcgacagagctttttcttctccacgacgcttatttaaatctcaatcttgttctgccattttactaatcaaagatttcctattgtacagacctaacgtctttacaggtaaataccatatatccacttttaaagttaatgagttgaatatccggcaagattcgctcttcatgaatgtccacatgttgggcaataaacagttatttgtaaaatcccagttggatataggggatccccgagtattgataaagaggaaaactgatatacagtttaagtttacagaccatttggcgtatcgtgtttatggtggctatactattgataagaaccgaacaataatattgccaactacagctactccatattatgtgggtacaggcttttcttatagtctcaataagaaattacagttaaaaacagggatagagtatcagtacaatgttatttataagcgttgggaatgggtttggaattccggtatccgttttaacttttaatgatttcaggctagattctctacttgtgttgaactatggaataaacctttatatgctttactatataaattggaagatttcgttaaaatagagtggtctctctgatacaagaaagtatttttataaatacagtttgttatccttataattaacattgttaactccctttctcagccatttttattcttgtgtgcaaataacaagccttttgcatttaaaacacttgttatttgcatccaaagaataaactttaactctgtgttaaaacaaagcttttactgacagatgttttgaactttgaatggtttgtatttcagcttgttaagtctgatctttacttcttaggcttactgaagatctctgcaggctggaaccgatatacttgcttttttgtcaactatgaaaagaggggctgtactgttccctttctttcataatctgacagtctgagaatggcatttacttcgttcacctcgttaatgcctaatcttttcaggatatctgccaaacccagataattgtgggccattgtattaaaggcgtatcctggtatcggtagaggaacagaatcctctttcccctcgggggaggggaaccacagttacggatgctccgttctatgggaatggtacgagtgaacgttcatttaatatcggtctgtgtctgccttcgggacctatattgacagatgaggatatcaggagagtggtggatacgatcaggaagatgtagtgaaactataatattcattgcaaagagaatcggctggaatgttctaaatgtttcagccgattttttgtattcagtttactgttccggttgtttgctcgtataacttttatttgtggttcgttgcttttggatatattttttttacctttgtggaaaataaataaaagaatatacttatggaaaaattgcatatccggaagattgcttcattggggttgatgctttgcttttttacggggggaggagcacagacacctgtcaaagtggaaaaaaggaaagagcataaatcgaatactgtaatacctgttgtcaagggaaatgtgacagataccttgtcacttgtatcatttaacgattttcatggagcctttgcctgcgataagggtgttcccggagccggccaactggtacaaacagtgttgacacagaaagagaaaaataaaaataccatcgtgctttctgtcggagataatttcagcggaagttatttctcaagaataaccagaggcaatccgttaccggaaatgtttcaggaaatggatgtaaaaatgtccgctgtaggcaatcacgagtttgattggggattaccctatctgacggatacggcgaaggtatatatgaattttgtggcagccaatattataacggatcggggagatacgttggagtgggctaaaccttaccagattgtgactctgaatttgaagaatggaggaactgtgcgggtggctttcgtagggttgacaacgactgatacggcacataaaacgagtccggaaaatataaagggactggcttttgtgcatcctgtatatgcagcccgtgtcgagactgcctgtcggttgaagaaagaaggcaaagtggatatggtagtcctcttgatgcatatcggcactaacatgaagaatagagatattatagaagaggagaatgctaaattgctgcctttcctgaaaggagtggacgcaatcatttccgggcattctcacgaagttgttcttagtaaggtgaacgatgtacccattatccaggcaggggtaaacggtactcatatcggtaagttggattttagagtagtgaaagaagagggcggcaatcgcatctcttatataggaggtgatacaattcggacagagaggccgtctaatgcacatatcgattcgttggtcgataaagtattggcggcatacggactgtcggaaaagctgattttggcaaaagatgccctgatccacgatcgtaccattaataaatgggagtacactccggtgggagcttatgtgacagctgcctacgtccggagtttcttagagaatgaaaaagtgcctgccgaattgaaagtgttgcccgtcattggggtaaatcattttggtggtttacgtgccagtattccggcgggtgaggtcacaaggttgcgtgccggcaatgtgcttccattcggtggtaacgtggtggcttatgaatttacgggtgaacggttgaagcaattattggacgatggacgcaggaataaaaacggttttctgcaaacttcttatttaaaactacatttgaattcgaaaggaaatgttgaaacgataaccgactgccgtaccaataagataatccgtgataacgataaatgtatcgttgtattggatgctttcatcacctcgggtggcgacggttatgacagcaaattattttcaggttatgaaataggagattttaatagtcagaatcttgaaacaactgtggcttttatcgattatttgaagagtctgaaagggtttgtttcctctgaggctgcgccgatacccatagtacaaaagtaaaaaatcagggctaagacaaaagcgatcaggcggctcaaaatgtataattacattttgagccgcctggttgcttttgtgttttttaagttttttatctttcacttattaataaattattgctaaattcgaacgattttttgcaaatcgacattgtttactaataatttaattatatggaaaatttggaaacagcgcttctactgatggtagtcgggatggcaactgtctttgctatcctcctcattgtgatctatttaggaaagttacttatctcgttggttaataaatatgctcctgaagaacagcttcctgcaaagcagggtacccaatcaccggttcctattcccggaaatattgttgcagccattacggcggccgttaatgtggtgactcagggaaaagggaaagtggctaaaatcgagaaaatctgaaaattaatcttatagaataataccgaaaacggaaatgaaaagagaagtaaaatttagtctggtttttagagacatgtggcagtctgccggtaaatatgtgcctcgggtagaccagttggtgaaggtagcacctgctattgttgaaatgggatgttttgcccgggtagaaacaaacggcggtggttttgaacaggtaaatttattgtttggtgaaaacccgaataaatcggtgcgtgcatggacaaagcctttccatgaagccgggatacagacacacatgttggatcgtgctctcaacgggcttcgtatgagtcctgttccggccgatgtgcgtaagttgttttataaagtaaagaaagcacaggggacggatatcacccgtacattctgtgggctgaatgatgtacgcaatatcgctccttctatcacttatgccaaagatgcaggaatgatttcgcaatgttcgctttgtatcacccattcgccaatccatacggtggaatattacaccaatatggcactggaactgataaaactgggggcggacgagatttgcattaaagacatggcaggtatcggacgccccgtttctttgggcaagattgtggcaaatatcaaagctgcgcatcccgatattcctattcaatatcacagccatgcaggaccgggctttaacatggccagcattttggaagtatgtgaagccgggtgtgattatgtagatgtcggaatggaaccgttgtcgtggggcacaggacatgccgatttattgagtgtacaggccatgttgaaagatgcgggattccaggtacctgagattaatatggaggcctatatgaaggtgcgtgccctgattcaggaattcatggatgactttctgggactgtatatcagtccgaaaaaccggttgatgaattcattgttgatagctccgggacttccgggcggaatgatgggaagcctgatggcagatttggaaacgaatctggaatctattaataagtataaggcaaaacacaatcttccttttatgacacaagatcagcttctgatcaagttgttcaatgaagtggcttatgtatggccccgcgtcggatatcctcctttggttactcctttcagccagtatgtgaaaaatctttcgatgatgaacgttatcgcgatggagaaaggaaaagagcgttggggaatgatcgctgatgatatttgggatatgattctgggcaaagccggacgtctgccgggcaagcttgctcctgaaattatagagaaagccgagagagaaggacggaaattctttgagggaaatccgcaggataactatccggatgatcttgagaaatatcgcaaactaatgaaagaaaagaagtgggagacaggcgaggacgatgaagaactctttgaatatgcgatgcatccggctcaatatgaagcttataagagcggaaaagcgaaagaggatttcttggctgatgtagcaaaacgcagggctgagaaagagcaggtgcctacggaagaagcgaaacctaaaacacttacggtacaggtagacgggcaagcttaccgggtgacagttgcttacggagacacggaactgcctgttgcaccggcttcacaaccgtctgctgctgcaggtgaagggaaagaggtactttctccgctcgaaggaaaattcttcctggtaaagaatgcgcaagagactccgctcaaggtaggcgatgcggtgaaagaaggtgatgtgctttgctacgtggaagcaatgaaaacctataatgccatccgcgccgaatttggtggaacggtaacagctatttctgcaaatcccggtgatacggtttctgaagatgatgtattaatgaagataggatgatgaacggaatatttgaaaaattatatgatatgactgccttcagcaatattgttgccgaaccgcagtttctggtgatgtatgtcattgccttcgttctcttgtatctgggtataaagaaacaatacgagcctcttttattggtgccgattgcctttggagtgctgttggctaacttccccggcggaggaatgggagtgatacaggctgacgagaatggcatgatcctggtgaacggagtaatgaagaatatctgggagatgcctctccatgatattgctcatgaattgggactgatgaactttgtgtattatatgcttataaagacagggttccttcccccgatcatttttatgggagtgggggccttgacggacttcggaccgatgcttcgcaatctgcgtctgtctatattcggggctgccgctcaattgggtatctttactgtgttgttggtagctatcctgatgggatttacacccagtgaagcagcttctttgggaattatcggtggtgcggacggacctacggccatctttaccaccatcaagttggctccgcatctgttgggcccgatcgcgattgccgcctattcttatatggcattggttccggttatcattccactggtcgttcgtcttttgtgtaccaagaaggaactgagtatcaatatgaaagagcaggagaagaaatatccatcgaaaacggaaattaaaaacctccgtgtattgaaaattattttcccgattgtggtgactacggtcgtggctctgtttgtaccgagtgcagtacctttgatcggtatgctgatgttcggtaacctggtgaaagaaatcggtgccaatactttccgtctgtttgacgcagcttcgaatagtatcatgaatgcggcaaccattttcctgggtttgtcggtaggagccacgatgacaagtgaagctttcctgaactggacgactatcggtattgtggtaggaggattcctggcttttgctttgtcgatagcaggaggtatcttctttgtgaaactggtgaatctgtttacgaagaaaaagattaatccgctgattggtgctacgggacttagtgcggttcctatggccagccgtgtagccaatgacattgctttgaaatatgatcctaaaaatcatgtattgcaatattgcatggccagcaatatctcgggagtgatcgggtctgccgtagcggcaggggtgctgatctcttttctgtcttaatccgggctgaccggttgctattttgtttggctatattctgttggcctttatttcctggaccataacagatcaggctgaatcttaaataggaatctgcataattaatttgtataaaagcttccggttcctttttttaaaagaaggaccggaagctttttttatactttatcgttgaaacatttggtatgaatctttcattttaaggttgagattggtgacttggacgagatagtctttaaagaaattttcggattggatcttgaatcacaagttgtagaatacgggcataaaaaaatgttcctccgaccacgcctggccggaggaacacacacaaacaaaacaaataaaagcagtcacgattcgcatcgggacgcccctacacccggtattataaccgggatttataaatattgaaagggatcaacatttattcttttgagaaatctttaattcgttgctcttctgataactggcatattaataatatattgtctttttcggctatgatgtaatcgttcagcccttgtatgactactcgtttttcctgtgaggcgtgcaccatgcagttttgactttcatacatccggatatccggtcctactgttgcattgccttctttatcttttggcaacaaggtgtgtaatgctccccaggtacctaagtccgaccaccccatttgggcaggtaatacataaatctcttccgctttttccatcactgcataatctatcgagatactttcggcagtggggaatagcttcttcacgctttcttcctcgcgttctgtataaaagtcgggatatatccggtcgaaaatctgagctatccccggtgcatatacccgcattacggctgtgatcgttctcacattccaaacgaatattcctgcattccagaagtagttgcctgctgccagatatttttcagcagtttctttatcaggtttttccttgaatgcttctacgtggaatatttctttgtctctcgttatcggttcacctgcggcgatatatccatatccggtttccggacgggcgggttttattcccaacgtaatgatggcactgcttttatcagtgaacaaaagcgctttctcaatcaccctgcgaaattcagtggtatcgattaccacttgatcggaaggagtcacgacaatgttggcttccggatatttcttttttattttccagcaggcatacgcaatgcagggagctgtatttctgggacagggttctgccagtatattactttccgggatacccggcagttgctcccgaatagtatctatatacttttccgaagtgaccacccacatgttctcctgtggacaaacattaccgaatctctctacagttagctgaatcagtgtttttccacatcccaatatatctatgaattgtttgggacattccggtgtactcatgggccaaaatcgacttcctatgccaccggccataattactacatgattgttcattgttaacctctttctttatttgttacgtttgccgagcagtttctctatccagcttaaatcgccggtcggtttctgcctgtcacatagaacaggttcgtatggcttttgttcatggatcatctggtagatggttccccagtcaggcaaacctcccaggttccggtcatcaataaacaggtctgctttcagtttacgggagaatccgttatgactcttttcttcttccggatagtccttgttgacagaatagaaaaagactccccgttggcggcaccattcaatcgcttcttcaagcaattctccttcgcgtacggtccataagataagcttatgtcgctcctgagccaatattttcagggtttctgttgcgaatggaatttcttctccgatcttcggatagcggtgttctacgatggtaccatcaaaatcaacagcaatcgtcatgtgattagtgtgtgtgaattgtgattattatttgttttcaggaatgtatacaatcattgcattacatcccgttttgttttcatatcccatcgcttccggtgtcgattccgaaatgcgttcgggagagatgtgatatttctctatcaatatcttccggatggcttccgaacgacgtttacgcagctcctgatccgcttttttgtcggtcaggttatcactgaaagcaatgatccggatacttgcgttattattcttcatccattcgccaattccgtctattttctgtccctgctcttcgctaacgaacgaactgaattcgtcgaacataatatcgatggagagtgcatcctttggcggaacaatcatcaggttttgcccgtctgttattttccggcgttcctttaattcctgcttcatttgcattacctcttcacagagcatccctattttctcctttatctccagtagatccgcttccggtagatagagggggtggatgctgttgtccacgctcttccgatatttatctctgaaagtatatgcaagtcctattgtgaggttgctttgcatataaattttgttgttcagttctttgctgtagtatttgggtaaaacctttaatcccggttctataaatacgctgaattttctgtttacattgtacgaagcctgaatcgagaagttacccgaaatagtgttgactcttgtatatttcggatcattgtccccaaagtcataatagttgaaaccggcacccagaatagccgccagattaaatcttttgaatccattgtttcctatcagagtcaacatataatccaggtttgcgctgagttgcgtggcttctgtgtcattccctatccggttcttaccgatctccgcagtggctctgaatcccgaaagaggcgtcagatatacacctccggagattttaccgcctgcatatacgttaccgattgtcttggtcagccattctccattcagggcaccggatacaaaccaatttcctttttcaaacttttccctggcgtttggctgttcctgtgcctgtaagttacaggttgtcagcagcagtaccgccccaacgatccatctgttttgtttcaatcccaatatatttgtcatggttgtgttatattaatacgacattgattgatgcaatctgtttctttttgtttcccggaccggtcacaacaatcgaagtgatatagaatttatctcctttctccagttgtctgatcagttccatttgcctggccgagaatttgttcccggtgttgggtattgaagttaccgctttactgcttcctttgatcaataccatttcaaagctgctgatctcgtagttggctttcggaccatcgctgattgaagctcccagctgtgtcatgttggataccagccgtttgttaatgggcacatttccccggtattgcaccgttctcccgttttcatccgtgcagagtatataaggtgtcggatcgggcagtgcctttacggtataccggtattcggccagttgccttgccaccccgttttttatctgtgtggcggtaactgtcgctgtctgtgctttttcgtcgggaacggctatgcaatggtttcctcttttgagtatctttccgttcgtcatccggaatgtcacctcgttgaacggtattcccgcagtcagtatatttagcgggttttcatagtcggtatacaagatacttgttaaggcgggtgtgatctgtactacaggcaggtccaccgttccatctttatttactatcatctggtcttcattgatgaatacaaaagctccgccttttccatcttctgcctcttcgtacagcagtgaccgatatacttcattcacgcacatcaacacctcttcctgcattttattgataaatgtcactccaccgatggcaggaagataagagaaggtttccttttcccaggatattccggtacccggactttccgtattgaggtaagtgcctaccagttgtctgtgtgcatcattcttgatcagcgataaagcgtcttctttgaatgtatccagtgagagcctgagtgttttccctttccccccggtgaccgacagaaatacctccggcacagcgttcaagtcatcttttgcttttagcttgccggcttcatatttctctttgtccgctttccgggcgatatcttctttcagttcctccagtgtatccattagttttcctgccgccgcatctatgttctgtgcagataaagccgctttatcatttcggctgttaattctttccagtaaagtccggttatattcttccagcttttttatttgtggaaggtagtcgttgttcattcgtccatacccctctaagacatccgacgatatattgatggccagcatagcaatcaataccacgtacagcaggttaatcatcttttgccttggcggcaatgtatatttagccatgtctcttcgtcttatttcccggtttttacattcatggcattcagcatctgactatattgcttgttcagtaattctatgtatgctgccattttttctgtctcctttttcagttcctccgaattcatctcgttcaacgacttagcatgttccgtcattccctttatttgcgcttcgtacgtttcattgagtttacacacgttgttttccagtcttttcagctgctgtatgtacttttctgtcatcagtgtatccgatactcctgtatggggatttatgtttgcgtttttatcattcaatagcggaaacaccctttcccatttgtactctcttgccggttcgtcaaatccggagatgaagaagatgaatacctccgtaaataatccgatcattaaaaacagattatcataaggcatgtgagcgattttgaatacggctcccaaaataaccagacaggctccccagcaataacagaggttatagaaacgttttcctgttctgctcgataagaatttacttaatttcattgtagtcaatccgttttttttgatttccccacggagtttacacagatcgtttcacggattaatctcgtggaatgatctgtgctaatctgtggtcaattttatgctattagaatttgtatatcacacctacggtcatcattccgccggcaaacacatcatctttgttttcgatgtcatagaacttggtactgattttgattcccggttcagcaaagatgctcagatgcgaattcagcctgaaagcagcttgcagagagaagttaccgctcatggtattcgtctttgacagtctgggataatcatcaccaaacgaatagtagttataccccaatccgaaaatggcgttcaaccggaattttctgttttcgtcggtataattcttcatcaggttcaccaggatatccgctccggcaccgactgtcacggcattgtatccgcctttcagccatacgttgccggcttctgcatcgacgcgcagaccgatgatcttgtttaaccacacgcctccggagactttccctcccaatatgttgtttgccgaaccatttaaagctgtgaccccgttaatacctcccgatacaaaccattccggtttgaatggattatcctgtgcctttacatttccgaatagcagcagcaatccggccaacagcaatcctgtttttatattattcagcttcatgatttatttgttttttagttagtgtttatcggacaacttttaaatcttacctcccgagtgctggcttgcttccacgttggtgtaagtaatctgcattcctgtatagaatttcagggtgatggtcactgttcttccgccactgattttgaatgtatatgtcttttcgcaatatttagcctgattcaggtaataaaggatatggttaccgctgatacccgctatcagttcgtgagccactttataagttcccgtcgttccttcctgcgcttcaatggcactgttgatcgtcgtggccatgccttgggcatccgcagcgtctacgcctgcattcatcagcgccttttccggactgacagtatattcccatccggccgtagcctcaaagttgattttgtattccggaatggcagtcatattgccttcattgctttttttctcttccttgtttgtctcgcctaccagttcttttcctgtggtcttgctactcttgacacgcatcgaatattttccggacagtgatgcgcctgcgggcaatgtgaacttatagctgttcgtttccgagtcataaatggcatctgccactttgttccagttttctccggcccttgtggttgttttctgattgtacacttccacattttcgaacgttgtatgttccgaagctttgtttatgattgccagtgttaccggtttggccagagtgacctctttggctgtttccacttcgatgtttgcgatcgctaccggagtctccacattatttcccggtgtcacggttgttgtcacggcagccggttcttcatacggagtcacgcttacggttgtagttgtttctatggctttgggaggaataattacagctgcttctgcctgagagatattgctgtctcctttatcggttaccaccacttcttcttccgcatcggccttcacttctttttccggagctttcttgcttaatttcacactcagactcaccatactgcggtttgccgcattgtctgcgatggttgccgttgcattgtctatgctcatatacccttctttgctgaatgtcacggtgtacaccttcttgctgtccactgtcagtttataagccccttccgcatccgtcgtagccgttatttcaccggctttcacttctacaccggacagcgcggtcgttccttccgtcactttacctgcaatgtagtattctattgttttttcggcaggatccactacaatttccggtttcttctcgtcttctccgaaagagcatccggttgttcccaaggtcgttgccatcagcaacacacctatcttaaataagtcactctttttcataatcatttttgtcattaagaaaatattaaaactgttttttgtttctctctttttcgatactttttatcaggaaatgccgtatatattccggctgaaagaatccgttgctccggttttctgccggtcgtgtctgataggtatatcccattttcctatcggcatactcgccccacgacaccatgctatattcggcggcaaaaaactcagccggcttcatcctgacagcatgattccggttccatttctttccgggcagggggatggcaaaatgaaatcctccgttaacttctccttccacatacatggcatacactcctacggcatactctccgaagtggcgtgtgcagtctcctctcagcccatagtctccatacaaatatcttccggcctgtaggtcgagttgagtattgaattgcggtacatagagcgaacctttcacggctgcattgattcgttgacgggtaccgatataccatccatcgtacgtgatgaccgagtatccggttgtgcctatctgcgctcccagctccacccgtccgttgccggtacgatatttcacttcagcctgtgctccgatccgatgatcggtgaagttgcctgccacgatgcgggccagaaaattattccggaaccttatttcctgtgaaatcgtcattacccccggacgtatctttttgtattcgcccttcatattggttgcgatggggaagaccacctgtgccgttgctttcgctcctttccacaagtccatttctacagccggcgacagattgactctgtacgaatacagtttatcgaaagtggagttttccagtgacacttccggatacaggacgatgtccgctttccatgccgagcggttgatcacccctgtgcttcctttcaatagtcccatagggcggtcggtatcataactcatctccatccgttcgtacacctctttcaatgaaatcccaccggatttatagcccgctatcaacgtatccggcaggctgatgctgagttgtggaataccgtttccgtccagtgccaccagttccaggttgccgttgcccattccttccattcctgcgatgattgcttttcccactccgcggtaggttcctctgtatacattgtcctcaaaggcggcaacagtcgttcctcccgtttcaatggtccggatattttccatacccaactccctgagcttttgggcgacctgtgcatggacagtgatagaggaggagaggagcaggccgattattattgtcaattgtttcttcatacagcttaatggattaagacacattcatatcgtattcctccggagatacatttaaattcgcgggtaaacacgttcagtgagagatgtttccacaactttgcggctgctcctacattgaatccgtcggagtcatattcgaccatgatggacagtggcttgcaaaaagagggagtatagctgaggccgccgaatatgccgtcctgcaaggtatacttgtctttacttaatggataataatatcctacggttgctgccagccggtgttcgcctatcatgaaactttttgtggccactccatatacggatgcgaaataattgtatcctttatctttgaacggatcgttactgccaatgacaattgccggccagtatttaccctctttcagcgggcggagccttacagataacgatctgtcttgctgattgaatttaggcttcttagccatgtagtcacttttcagcaagatgcaacggtaattcaattccaggaatgaaaagaaggtgatgttcacgaaatagtttccggagttgtatttaaaaggattcagctcttcaggcaaatagttaccgccgatcatgaaggtacctgtctgttgcatctcggcggtcggaatgttcatcattcctgttgtccccatggtatactgtgccttgattcctgatgttatcatcattacacagaccgttaatactgctttttttagcctcattgattgatgttatatagagaatttttctttggtgatgttccacaggaacaaggcattcccgatgatataccggcgccacatgcgcctaggctctttgatcaggcgatacagccattccagtccgtgctcttgccaccggaccggagcacgttccaccgtacccgcaaagaagtcgaataccgctccgatagttcctatatgtccgttcacctccagtgcatccagatgcgtatacgcccatttctcttgtttgggagccgtcatgcctatccacaataagtccggctttaccgcatttatggcatctatcatcatttgattttcttcttctgtaaattccggtttgtagggtggggagtaagtctctattcgaatattcggatatacggttttagctttttctttgatcaatttaagtgtatttttgctgcttcccagaaagtagcaaatacctcctttccggttcagctgttccatttcatattcaaagagatcccatccggcagtacgttctatgctctcttttcggagccatctaaacgccaataccatgcttgctccgtcaggaatcagtgctccgcctttgagcagagcctctgcaaacccggcatctttcagcgccgtattatatgaatgggcgttaatcgtgtttatcaataatttaccttcgggcaatatagataagtcgctcctgtgcttcaggagtgaaactgttttgagcttcaacatgtttctgagatggaatgggtagttataagtacgctacgctgctacctgtcacgaagagcaggctttggaattatggggtaagaatttctttgcaaaggtatgctttttccgataaagaggaaagtatttattaaaaaagatatcatacatattatttttatagcttgtatcttttactcatttttgtgacaatacttttttatatagactgaccatctgtttggctttattgtcccacgatagttcctcttgacggactctgcaattttcagacatttgcttaagtacgtctctatggttaaacagatatgttatcttctccgcaaaatcgttgatggattgttgcggagtagataggggaatttttatccctacttgttcattaattgagtcaccatgtccacatatatcgaaacagataacaggaaggttattgctgatggcttctaaaacaacatgtggagttccttcagctatgctggtaaaaaagaaaatatctgctttctgcatgagttcctgaacttcattatgtgagataaccccatgccagatacattgatgtgatatgttcaattccatcgctaacttttgataggagttattgttaccacctacgatatggagttttatatgtggattagccagtcgtgctatggcctttatcgctaaaggcaattgttttctgaaatctaatttacctacccaaagcaaatttaaatcacctttttcttttgtactgtttattattgttgttttaggataacaccctgtttcatttaataagggagcgtcaatatgaaaatatttcttgaaactcttctgagattcagaagatgcggatgttactacagaggctttttttacagctttttttactcgttgtgaatatcgtaactgtaaaccggttatgtgattttttaatctgatgaataagtttgcttttatccctgcatctcttagatatgctgtcggaaatttttctttagcatctaccggtccccaaacaaatggcttatctagtttccaaaggtatccgggttctctaaagccaatcatatttaattggtgtacaatatctatatgttgtttgactattatttcctgtgccatctcgtaagtcttccattgccatttcttatagtgtttatagaaacgccaatctccttgattccaacacatcttccgtacttcttccgaaaccggattatagtaaaagtgcatgtgtttcccttgaggcagggtagggagcactgcctctattttgtctctgaattcaccttcagtgataatgtatagttcacaatgcctggctaggtttatgcaccagttccaggccatacccggttcactgcccatgttgggagaacaagcgtaagcgttgataaggatacttagcatttcttcatttgacatacttttatttgatttttatagcatttttaaattcaaaaggtgcagaagacaggaattgcagaaatagtgatgtcattactctaagacaataagctgttatacatataaaaataaacacaattacagtattcaaagggaagagtctgttgaatttatctgtaatgatatgaaattgaacaatatatatttcaagagtaaggcttgctatcgtagtgagaattcttttccatcttgaagactgaaataaagttgtacaccaatgataactggctgttttatatgcatagaagatgaatagatgcaaaggtaataagcctactatttggacgtagtatttataatcttgttttcctttccctatataaagaatgataaagtataaaacgaaccaaaagatcgcccataaacagtctttccataatgattttatttttattttatctttatatagatatgtcattcctcccattatcataatactgaagtggcaaacaaaatgtaagttcgtatggaatatggagcctgttgctttaggcatgaaataaaagtatagtaaagatgctgctatggagaacataaaaagtattttttgtacacagattttgccccccccataatagaaatattgagatttccaaaaatataaaataaaatatagtaaattgcgatacattgtagaaaccaatagttattggctattagtaagtttttccacgtgatgggatctttccaaataatggcggcaataatactccataaaaaaacagaaggccatagtctttgtattcttttcttataccaattaacaaataaatcttgtttcttttcaaatcccatcattagcacaaaaccggaaacgaagaaaaataaagcatttccatgtactccaaaagtagccaatgagggtgatatatctttgtataaaggaataaaatgagaattggttataaatatggcagcgagaacttttaagaagtccaaattgtaatatcttataggcatgcgttattatttttttcagtttgctttgtgagtgtaattaatactattttatcttgaatcctagttttagtgagtagcatgtgtcggtaaatagtaatccggtcaaatggtgtgttatacaaaatgaggcaatctttaacttaaaagacaggtcttgatagtctaagtttttaaaagtatattgaaccattgatggtgattacttcataattaaggaaatattgagttaagatgctattgatgcatctctcaatgtattgaactattttatagcatggaagtattatgctgattttgtaaggttccatgggaatggttttatgattttaaactttggtatatgtttcctaactgtgcattgattgtcgtaacgttgaatgttgttcgtgctaattttaaagattccttcgcgattgcttccctcagtttcttttctgttatcatcttttccagttgttccgatagttcttcttcattatttatttgaaagatcaatccgttcttcccatcttccacgatgtctggaatccctcccacaggggttactatgcatggaatgccgtaagcccaagcatccaacattcccataggaaatccttcaccgtcacttgccaagcaatagatagaggtttcttgaaaaactcgttctttttgcttatcggttatccaaccaagaaatgtaatttgtttactgattcctaactttgcagctatttttttccctttctcaatctcgccatttccggcgaatatgactttccattcgggatatttttgagcgattcgtgcaaagcttcttaataatatttcatatccttttcttggaataatacttcctgcgaatagaatctgttttttttgcaggtccttccgctcatttactgaagggcaagggttataaagtatctcaacgtgttcggttactcccaatgcttcctttatccaccattgccattgttcggacagtactaatactaaatctgctttagagaatagttttctataaagtatttgattggatgattcaaataaaaacttttcattggagggatggaaatgtaaaatcacttttttcttcaaccatttagcaggatagaaaaaaagtgcttttcgtctggctgattgcgttgtggctatgtggatatgcactatatcataaaatggcagtaagcaaatgtattctatcagagcagttcctaaataccataattttcttacgctatttccatcccgatgtgtttcaatccatttacaatgaaactttttccattgttctccagtttcgtgagcttttataacagatgttataccaccacgagttttttgggaagtggcaacaactaaaactttaggtgtatgcatgggcgttaaagtgtttttgtgatttctttccagttatattcaccatctttaaatgtttggctaaagatacgtgcacagcaacgtagcaggtatactcccattaatatgatgccaaacatgatgattaaattcaaaggaaaaatggaattcattttgtctgtaaataatgattcttgtattaagtatatctcaaggcatagtccaccgataaacttaatccaccaacctactattttgtgtttatagcaatattttaaggcattactattacatattttataaaaataaaatgtagtcattaatagaggtattagagatagtatttggagttcgtctacaattgcaattttcctgccgataaacagataaatataatagatggcaatattccccattaatttcaatccatcccattttaaagagtaagtttgttctttgcggctgattcccatcatggcccccataagcatgaagaggaagtaatgacaccatttataataagtatgtccatatatattatactctatgggtctatctatggcgatataccagattatacatatcccagctgctatgacaaatgccaatttcaatctgctaagcatatatcgttgaatgaaataaagagcaatataatatatcataatgcaagttacaaaccatcccctccatttatgaccgtgtatctcatttcattatgataattaaagatgaaagctcctactattgcccacgcaaagactgtgggatatattctgttgatacatctcttataccagttgtcgaatcgtcctattcttcctaaaaaaagagtgcatccggaacaaaaaaagaataaagcatcaccaatagctccacctgttgctaaatcattaaaatcaccatacagtaatttcatgtgcgaattggtaattaacagtgctgttatacattcagtatatctatactaatattttgttgtttcatcaatgtgttgaattgggtaaatctttttcagacagtcttccttttccggtatatgtagtttatttttttaacatgatagtcctcatctttttataacatctttgcatactatatgggtgatcaggcattttcttggttgatgtttgtatttcgttaatagcttctatccaatcttccaatgtctttactgcatgaaatgcccggatacgctctttcgaatgataagggttatgggttataattagtggcttttgcaatccctcagcatcggcaattgtggacagccctacgcagtagttcagtttatcctgacgtaatgggcaaaccaatgctttggcgtcagccatagcttgtaccatcattggataggcattgccgttgttttcagtgattattacctcaatattaggaatgtttttgcatcgttccgggaggttctcaaagttattgcccgcatgacttttgcaggtaataatctttagtgggacaccggtatgtcgaaacgcctcaatcaacgtatcaaaatcgcgctgctccttgcccgtacttacaaaatacccattatctgtcgtggatacttttgcgaagaaattcatatccgctccccatccgggtacagaacatttccctttctgtatatatttgccttcaatactttcttgcatcgtcagttctgataggaagaataagtgtctcactccttttaacaacagtcggtaaagtatcttcttggatccgttaccaccgtttggtgtatggtgcagataagcgaaaatcggaattcgtattccattgaaagctgccagcaacaataacaatttatgtgcctgcagattcaaattggggatgaatactatatcaggcttatgccgtttgattaaactcaagtcattgaataaattgtattgctcctgtttccaaatcacttcatgcccgtcttcttccatttcgcatgctccatagagccagtgagacggatttttcccttctttccataaatcgtggttatagggtgtaccgatatataatattttcatacttttttatagactatgttgaaccgattttagttagcagtaatttccatatccatttgcgaggttggtctatgagtatggcaaaaatgaaaagaattattataaggagaattgtatgaataataaattcatttatcgataactctttaatccacgtacctatttgtgaataataccaatgagatacgtttccccccccttcatgtataagataaataggtaacatggagctcgctacccaatttatgatggagttatggctgatagagagactggcaaaaaacataaatagacagacagctccaactaaaacgagaggtgaagagtaagatgtggctaatcttacatcccattgagtcccttgcaagagaatggaaagtgttaatgtgatacacaaaatgattaaatacctccttctatgtgatgcaatatagctcttttgtgatattttttgtagcccatttccaatataatagagtaatatgaaatgtaaaagactgtatccggaagcgtcaaaatgtttatgaaataaaaagccataaccaacatcaaaaagtagtaatattcccaatccgatccggtagtcatgccgattaagcacagacaacaatttattcaataggggcgaggagagcatgagtaatacataaatgtcaataaaccatcctcctcctgatattggaccgctgaatggttttgctatccattcaaatatgggatgttctatttttaggaagaaagtatcggcacataggtgaaacagtttatagaaggctataatgtacattagcgagagaaatgatcgccaagatagcttaatgccaaaataaccggagatgagaacaaataggtttactccgaatattacaggcgcacatagcattggcggaattgttttggggagtattcccgtaggggcaattccatgtataatgacatgatacactacaatcatagccatagctacaatgcgtaataactctatgttcgatttacgttgctgaaaagccatttgacgttattgtataaaattaaacataccctttatttcatgtgccaaccttttcgaataaatctctgcacctgcatggttcatgtggtatgaatctgaaaataaatatttacgatagattatatcttcatcattgcaatgtgagatgattggaatgttgtgtttttccgctaattcatagatggccgcataagtctgatggagatgcttgttgccgccatagaatggagagaggggaaatacaagctgggttccgttatctttgcaatttgggataaacttctccatgaaatacatttttgtgctatctatctttataatcatttcgttgttctgtcaatgtgttgaactgtgtaaatatttttttattttctctgttattttataagtttgcatattaaatttattatggaaaaaagtctgtatttcattagatacatcatcacataatgccctttgggcattagtcttattgggtatgtattccatatttctttccaaactttatctgtacacatttgtataaccaagcttcttttctctgaatatgccatactgctcctacatatttgtcggatatagaaccgtacgtatccaataaacatacgatctgtgcgtataccgacttcatttattaaattatattgtttagtacggcggactatctcttgacgtatgtttaggaaatatgaaaaacgatctgtacgtgttttttttgataaagacttagtgttattgtaatagtaatagaaagtttgaggcagcaaacaaatgcatttagcatgacataatatgtcaatatgccagattagatcttcactgattaaaatacgctctgattcaaaacgtagatgattgttggctatcatttcgtgtctgtataaagccacttttgcagacataggaacttcacgatcttctttgacagaaggttctgaagcaatcatgtttagtaaatatctatgaatatgagctttatcacggatagtttctttctgtttaggctgtgacataggttttactattccctcttgattaacagtttgaatacctgtaaataccgcatcagcttgttcttcaatagcagctctatacatggtttcatacatgtttttatccacatagtcatcagaatcacagaatgctatatattcgccttttgctatttccattccactattgcacgccattcctaacccttcgttctttttgtgtattacttttatacggacatcttgtttggaataatagtcgcacatttgtggacacttatccggtgattcatcattaacaagaattatttctatttcttttaatgtttgatttaaaagagattgtatgcaacggtcaaggtattgctcgacgttatacacggggacgatgacagatacttttggagccatttttatttatatatttgttcatggaaagcttttgtttacggaactttattccgacaaaacataagctgaaaagaatgaatggaaagtagtaagccgaatagggtacagcgttataccacataaaaatataagatacacatgccataaaaagaccaattgatgaccagtatttgataatactgtcttttgtgttttggtagtatctataaaaacgataagctatgagggcataaaataggaggaagagtataaatcctaaccatcctaattctaatagaatatatgaaaaagtaaagaaaaaatagaaagtgggataatacatatcagccaaaggtgttttgaacagttgtgattgtgttaatgagcctatgccatttccaattaagaaagttttagattcttgtgaaagaataatggagctccgttctatacaagtgttcctgttgaagcttaacaaccggtaagttccggattgaagcgcataatcgttttcgagatacttgctcatttcctccttatcaaaaaacgactctacatagttttcgtcataataaagtaagagcgcaaacttcatgatcgggatcattgaaaaatatgctattactaaaataatcacatgtttaaaattgaatttatttaatagtacataacctccatatagcgtaagtggcaacagtatataaagtaacttgatctctgccagaatacttgttgcaaagcataaacaacatgctgctataaacttttgaatagataatctatgttgcaaatattccatctctgcgataaaggcgataaccgtaagatagacagacaactctccattaccactgaatgttccacccatagaatcacctacttgtcccaaagcaaactctactatcacaaaaaacatattccataaaaaagactgatataagagttttcgcccccatactatatcccttggtctaaaataaagtagaatcatataggccattaaaccataacgaaagaattgcctgacaccccatattgtggcagtcatgggggtaaaacttatgagtgaagaaattactcctaatatcaatatgctgtaaaagatggatatcacagccttgcctacatataattgcagattatttttttctttgcgtggtttctccataaagagaagaatacatagtaaaatatccggcattatagtaatcaattggttgttccatataaatcgattaattaaggaaccgtaaatcacccacaaaattgataagtgtagaagctttcttttatccatatttcaatatatactttagtttagctgtccaatattccttttttattttggtttgtgataaataaatttttttttagatctaatttggatgtttacgttaatgtacattgaaaactttatcttcttagcatactgattgcagtcttaattccacgtcccaagatatttgttctgaagaaataccctttccacatcatgaatttatctttcctggacatccaggtggcagagtaatgatggatggtgcgggtattttccgttatctcaagtttattcgacataaactctataggacagaaataatcccaaggatagacggttatgccctctatatttgttggcttgtctactttactgtgcataccatgtttttgcaatacatttgtcacgacaggaacaatggggatttgctccatgtgtccatcaggaaaaatgtaatgagtgttctcgtaaaaagccatcacttctttgatgatagggtgatgtgtctctacggcaaaaccgatacccacatttaccatgtcatctgtttccggtgtggcggtatgcttttctatacccatccatgctccatgggcaaggatatcatccatgctttttatcacctcaacatccgtgtcgaagtaaacgccaccatgctcgtaaagaatcttcagccgggcatagtcacttacgtatgcaaacttcttcacatcataagcctcgctgctgaaagggatgcaatgaacatcatagttgtcctcgttccattctctgatttcgtggtctggaagaaactttttccaactatcgatatatcgctgatattcggcaggtataggatttcctccaaaccagcagtaatgaatcgttttaggtatcatgatagacagccttttacttctttatggttgaatattatttttttgtagcctttaaagtgttctttatcgcagataccattgtcgctgtctattttccaatatccttctctccaatagtatgcagtagttagccaaggcgtttttttaaagaacaagaagtggagataggggagttctcttccttccggatcgataatctgatgtttctttacgtcgtatgtccattctttgtcaatcccattttccggtccggcatgagggcttgtccaaaactctttgaataagcatttgtttactaaaagtggatttagaaggtcaagtacagtaaaataatggataccgaaaggttttaatagaagtccatgcatgcgatggatgtatttgatgaatggatttaccattcctgaccattcaccttcatcaaatgcataatgctgattgtctacgagacgtttcttccaattctttattctgaagcatagcgtgcgccaatactcgttgtttctgcagagagtaaaatggcctgcaatatggtaattatgggttgttagcaattcgtaactgcttagcattttgtcgttgattatcatggataagtctccatatacaagatccaaatcaccgaatccccaaaaatcatagtctttcagttcttcttgatgaacgatacctataaagggttttaagtcagtgagtttgtaggcgctattgatgacatagttaattccaagccgggttccaaccagcttacaatatttctcaaaactcgttgagataaacttagtgttagaataggtctgttgaggtacagggcagtctgtatagaagatgaagtctatattaggattttgcccgcatgaatagaagtatagttctatccatcccggccattggccaaagtaaggtataatttgagctactttatatttcatgattttgtatatatgaaacttggatcctcttttggtggtggaatagatactattatgcctattgcttgggtgttatcaatatatgttattcttgatccgcttttcattagatgttggtaacaatttcttttatcttattctccaatgttacataatatccccaaatgatttcatctgccccagtgatgaaacgtttttgacaagcgaagtccatgtactttttcttgtcggcatttagttcatctatcagttttattgcatcattattctcttttcccatttcaaaaaatactattgcttcttgatttaacacattaggctccggacggttatctgaaccatgataaatgggtacacagccggcatatatggcttcaaaaagtttttctgtcacataaccgtcataattagagttttccggggtcaggttaaaacggtaatgtgtcaggtatttcaatttgtcatcaccgtacttcaattttagttcatcattgttatggaacaagtgaccatcgcaatctactttatcgatattgcaaagttgattgaatatctttttacgtcctgtatcatcgtgactgcataagaaagaacagaactttctgttctcgtatgcatgatttttaggagaattcatttgttctatctgctgttttatttcattgtgtgttgcggtcggtgagaagacattccacatgatccagaaaggaaagcgcatgtattgcgggtggttaatctcgtcgaaacctaatgacaggtcaatacgtttgtcgtcaaggaaacgatgcaaccattgttgcatcgtttccttatgtaaattctcccgttctacaaaaatacgtatatcactacgatccagataattgagccacatgggtgcaaaaatactgtaaagccctattctggctttagggttattttttaataaatcacgtttctcaataaaatcgattaaccagtaatcctgtttacatacattacaccaattgtataaacgtacttgatgattatgggttgcttttaaggcattgtgtcgtatttgaataatatttttccaatacgtatatttatttataaacttatttttcatctggtggcatttattttaatatcgaattagtttatgggctattggatagcatcctatttttatcatcaaatatcccaatctccagcgtagactttttacgtcatggaaagctgtatattcattttttttgaattctctttttatttcttcttttgtaaggcatttattcataaatccttcggcgaatattccaagagaagagattcgttttactttattgtacttattgtctataagaattgaatccaatttatctttaaacgcccttcgcatgctataacttttacgattgattttatgtgtaattgagtccacattgataaagtaatggtagtaggccttgccgagataagtaacctttacttcttcatgctttagaatctgtgcccatattaatacatcctcgcaataattaataccaaagaaaaaccgggcattatatttttgatatagttctgttctcaccattttattccataaggcaccaaatattctgctttcaagaatatccattaatacttggttggcattaatggatgatggcttttgttttttgataatgccttgagtagcggaggaaggcgcacttttattgatgaagtaatcggctattactacatcggcttcttctgcttttgctttgttgtacatttcttcaagcatagtcggctctacccagtcgtcagcatcggcatgtatggaatactcaccacaagcattgtctacgcctaattgacgagccatagccactcccccgttcattttatggaaaactcttattataggatggtgggagttgttgctatcactatattttgctgcatactgattgcagataatagctgtgttgtctgtagagccatcattgatcagtagtatttcaaagtctttgaaagtttgggataatagtgtttctactatgtaagaaatactcttttctgcgttatatacaggaatgattacagaaattttcataacgtttttgagaactctatgtaagcactcactgtttgactataatacccataaaggtactgtagcccatattgagttatattcttgataaagataatggacgctaacctaatatagaatctttttcatctgcatcagttggcagaccatcaacttggacttcaacggttttgttatgcgtatccttataccacttttgaaagaggttacaaggaacgttgttctttacacagaatgactggagagattctccatgaggtaggggcctccgtttggtactgaaagtaaaacctttctaaatcttcgctatacataatttttgaattctgtttgcaacgaaggtaggccttttaatttatagccttaaattgagttgtgcttacagtttggtgtggtggcgtttttactatgtggaaaatatttttccgatgttaattcattgagattatatagatgtttttatgctttcattttatgttattgcgtttaaaaaaggctttgaacttttgctttaccatttgtttggcgttgtatcctaatccccatttgtaaatgatacttgtagaacaaataacagataaagaacacactgtaaagaatctggaaacttcatcgtttgtaataaggttatgtgctattaatgggatgactgctgaaagtgccattagcgataagttctttaagaatatggaaaaaaagtatttttttgctgggaattctgcatattttgatagaatatgcaaattcgtacagaacgctaagaatagagggatgatagctactaaataagccgaattaggggatccccaaaatttgaggacaatatatactaatggaaaatttgtaagatagatggaggatgtccataatgctaattgtttcatctttccgatagctactatgccttgatctatcattttgttggagtagcttattagactaataaaaatacttatttttataaaagtaccagtgtactcaggtacttctgttagccatagttctaatacaaaatctatttctatcaatactggaattactattattgaaagtaagaaaagcgtatattgagaaatattgaaaataagatctctaaatttatctttttctccggttccgtaatatttcactaattgtggaacagatgctgtaataaagccatcaacaaattgtcctattgtaaatataactgtagatgccaatcctcttgctgcgttaatggcggtattgaagaatagatttagtaatactgcaaccccttgagtgttgagtactgcactaaagtgtccaactgttgaccatccggaaaagtgaagcattgatctaagaagagacttatctattttaagagagaatttacattcattgaattttttgatacaatagagtctatatagagagacgttgataatatttacagctaactgaagaattgcataaatgattaatttgtctccatcaataaataccagaagataaataatgatgagttttgaaattacatcaaatatacttaaaagcgcatatatgttaaatttctcatgagccgtgaccgcagctgtataaggggtctgagtaatagttaacataacactgattagtgataattgatatacccaattggcagcttcaattctattaggattgatgttaagattattgtttaaaaaccataatccaaatgtttctgtaaggagtaaaactatacaggctattagtaaatgggtgaaaaatgcagttgagaatgttttttgtagtaatgtggcttctccttttcctatatttaatgctaaaaaacgacgggtacttgtttgtagaatgctgttaagtaatgtgaacatagaagtgaatccacctactatattatatatgccataatcactgactcctagtttctcaaggattattctggttgtaaagaaactgatgcacatggtaatgaacatgcgcatatataagaataaagtgtttttgacaattcgtctgttgttttcttccatagaacttttaaattactatttaaatagatcgaaaattttatttttaattacagatgtaaatactcgaagtttaaatagtaaagtgagttgatctttataataggggattatttccttataaaagctgttgctcctaaaagtcgcctctaaatacatgcgtcgtatataggtttggcgatgtgttttataataatctacatcaaataccgcgcgatagtcatctattacattcaaagcatctaatgtaagaagagttctaatacatttgaaacatttgctatcattttgagattcattcacacatacgttaagatacttctgtgccggtttataagaaataatatacttcgttttctctaagcgattcgcttcactgccggcagaataaaagcgtatattatttatagaggccattgataatgttagtaagtcgtaatgtgctgagcctaactctgcattatggttttctctcttcaaagtaaattccgcatatgaataaccagaagaataataatatgtctttattttattttgtatatggtaaatacaaaataaggccatatatgtgtgattttctgtatgggagtaagtgagatatttatttaagatcaaatgtagatttgtttcaataaatataaaatcaaatccatactctgcggcgaatgctttggcgatctgtaaccttccttccactagaggtgtccttaatatatccgccgctttcattgaactacctgcgttaaagaatgctaatgtgttaattcggttgttctcgggcgtgtgctgggatgtatgttgcgctatggtatataaagaatctacgccacatgaaatgccggttgcaacaatgcgcctttctcctttgattccatttatcagtggagcctttatttgaatcctgtgtaatgatgggttacagcccgttaaggcattgataaaatgaaattcaagattataatataattcatctgttatgggtatatctgatactatatcataaccttcacaaagggcgaagaacagaaaaccccatacaaaagcgtctattctatctgtgatcgtatcattggcgatttctttattaaaggttgtttttattatttcttcgttttcattgatgaaaatccttgcctgaatactatcttcagtcttaatgatttcttgaattcttatttcattcattggtaatttatgttttgagataaagatctgttgttgatatttatagtggattacacatgatgaaccactcgaaatttattgtggtctcactcttgtggaaacaatgggaatggcgctgcgtcaatcagtggttgtaggtttatatatccttttttatatagagattttgttgctaaaatatcagcgagacttgtcttggttcgcatgatgaaaggtttttcgcgatctgcgtgaatggatagaaagaaatcatggaatttaaaatgtcctcccatcaactttcccgacagctctatccataaattaggaatttcataggtctcactcatgataagcccgtgcagtgatgaagaggctatatactcgcaatcgcaaatctggtcaattatttcatgccaatctttataaccctccatgcggattattagtactgccggatcattcttaaatttgcttaaggcagggtgattaaaatcactgtaatggggaatgataccgagtttgtatgtgggagttgtatgttgtggtgtatagactaatttagcaagcattgcgggatctccataaacttcagggcattctacctcattgttgatgaagtattttcgtgttagcggtccccttaccgctaatattttcataggtggggttgaaagtgatactgtcccatcaataatcccagccccccatatgacactgcgattattaccaagcatgacggctgtagaacctatcattatataattggtactattgcgatgcatggatattgaagaggtgtaaagatatgatacctttctgttgaatagtcgctctactaaaaagacatttatatcgtctccccaattcctgtgcatcaatttgccccatgaataatgtagacaggcatttatgcatataggatgacaaaagagatcgagcagtagagtctttatctttgtaaaaatgatgttaaaagacgagtgtttatagggatctttcatgtctttagatgattggtgaggatattattgggtcaagtgctcattatacctcagtatattgaaatcattgagtatattttttatatgcttgttgaaccgttggaataatgtgagacgttcaaagacggggaatcgctgatgcacatcataccagggagtaagttgcaagtattggcggtaaagatatccgaatggatgattgcaatcacggaaccaaggttttatgggacatgcaaaatgaataatgccgggattgcgtttagcctcttttagctgcgggagatattggctgaaaatcttaggcttacgcataaaatagaatgttaccatattccatcggattggcaaggttttaattttatctttgaagtacatggctattacatcctgttcgttttgtattttggcggcaactgaacgggtgaagttgaaaatcggttggctgtattccagcattctccatttctttaaatcacaaaccatgactcctgaattgatataaagatcgttctgtgatagaccaatacgctgtttgtgcaatatacagtccggaatatcctcagcggcagctatgacgttatcagataactcaatattgtagagttccgctatgtccgcattgataaccatgtccacatctaagaacaagcaacgttcagcttcctgtggtaatatggtgggaatgtaaagtttgtagtacatcatggtgctccattgtcccacgggtaagtctttgatctttgcgtcagaacagatatgttgggtgagataagaatcatacctcctacaaagtgaagatatgcgtgattccgatttttgtgataaaccgttagtcagtacatacacatgaaatattttccttcgatttgtctcaaaaagtgaggttagcatgactgccgcatgttgtacatagccttcgtctgtaactatgactatatgatatggtttattcattaattgtgtaatatgtcttgatttttgtgaatttacgatttagattttaagcactctcatgattcttttatttatccaatgcatgcccaatgaagatataatggtggagacaatagccaaaataaagaaaagcggtctgttgtgtatcattgtatcaagtagtaagaatacagtaccttgcattagataaatttcataataacaattttgtgtaactttgatatttttcccaaaattaactctttggagtatatacaagactaataaaatgaacaagatatttacgaggtagaatgaagcgtatgtatagcgccatcgcgatagcatctgaatatggtcttgaacaatgtcgagacgatatgtacagagaaacaggagtatcaaagtgatgaaatgctgttttttaactttattcatttggttcattatgggatgttcgtatttataataccagaggcctataataaaacagggagatgcgtttatccaccaatgtggcaggccggccaatagcattcccgctaacatgaaaactatggcaaggctcaatgccggcagtttatatctgggaatgaaacgcatcactagataaaaaagtaaatataagagagtgatttccgtgacgtaccagctatagggtaggagcggattggaggaaaataatctttgaattgcttctattatccctcctgtatggtttattaatcttaatattggtatgtatataatatacgctgtcagcaaagggattataattttacttattcggtgtatgcaaaatccttcaaggtacttcttgcctttgagactataactgcacattaatccgtagcctgacagaaaaaagaagatagaaacggaaaggcttccaaattgactttctgctgcccatgcgggattatgcatgtagaatgtagacaggtggcatacgacaactgcaatggctgcgatcaatttgaccaagtccgttaaattacgtttttcacaaaggcggcggttgctacgttggtgtcgtgctattatacatagcagtagcaaaataaatgataagaacatggggctaagattatattaagaaatcgggcagaacacttccgtatcgatctgttctttcagtcttttgtgccccttatccttttcactaagtgctactttctctcttggaattctccaatcgatccctaaatccggatcatcccacgctacagctccttcgctttccggatgataaaactcatcacatttatattggaacacagcttcttcacttaatactgcaaagccgtgtgcaaatcccttcggaataaaaaactgaaggtggttctcaccggtcaattctactgctacatgctgcccgaaagtaggggagttcttacggatgtctactgctacatcaagtacacagcctttaatgacacgcaccaatttactttgtgtgtagggtggtttctggaaatgtagtccccgaatgactccatagcaggattgggactcgttgtcttgtacaaaagtcacaggagtcaccttttcattaaattctttctgggaaaatgattcgaaaaagtatccccgatcatccttaaaaagccggggctcgatgattactaatccttcgatggctgtttttatgatattcatttctgttggtctagtttgtctagttcgtctatcacttttagcaagtattgtccatattggtttttttgcatcggctccgccagtcggcgtattttatccggtgtaatccatccttgtcttaaggcgatcccttcaagacaggctatttttaaaccttggcgtttttcgataacttcgatgaatgttgaagcttcggatagggagtcgtgtgtgccggtatccagccaggcaaaaccacgccctaaaagtttcatctttaactccttgtcatcaagaaaatgctgattaacggtcgttatttctaattctccacgaggggaaggttggatgttctgtgcaactttaaccactttgttgggatagaagtagagtcctactactgcataattagacttggggctttcaggcttctcttctatatgaagaacgttgcccgatttatcgaattctgcgactccgtatcgttcgggatcgcttacccaatatcctaagatagttgcctttttgtcttcttcggctgtacgcactgcttcttttagtaattgggtaaatccgggaccatgaaagatgttatctcccagcactaaacataccgaatcgtttccaatgaactcctgcccgatgataaatgcctgtgctaagccgtcaggtgagggttgttctgcgtattcgaaatgaacgccaaaatccgagccatcgcctaacagccttttgaatccgggtaaatcgatgggggtggaaatgattagtatctctcgaatacccgatagcatgagtactgagataggataataaatcataggcttgtcgaaaataggcagtagttgtttgctgactcccttagtaatggggtagaggcgtgtacctgaaccaccggctaaaacaattcctttcattgtcttatcgtttcttttatttattcatatccttcatctcaccgcctccatctttcccactctctccacgaaccccaccggcatatccacatgggcgcagcccagcatatccagccttaccgccaccttgcttttgccgtcgatggtcaccagctcgccttccagtccggcgagggggcctttgatgactcgcacctgttcgccgggggcgaggggggaggagcacacttcgatggcttcttcggagtagtcgagcatgaagcggaagcgctccatctgctcgtcggggatgacggcgggggtgctttgtccgcgcaacaccatgtagcggctgacggacgaaagggtcaacacttcggcacgttctgccgggtcgacgtgtacgaagatcatcatcgggatgactacgcgctcgatctttttgcggcggtcgctccattgatggatttcttcctgcacggggaggaaactttcgatgcccattgccgtcaggcggtcacgggttttcttttcgtgatagagacggacataggcggcaagccaggatttcatgtctgattgggagtatggtttgagaaaggggagggagcggcgctcccggatacgctacgcggttacctgtcacagttgcctgctggggtaaaccgaatcttacgtttgattttgctgcaaagatagatataattttactaaatacaacaaattgtttatgaaaatagaaaaaataatgaattttaatctttaggtgttacttttgtaagttttaataattaacatatcttttaattttaatgattatggaaaaaaaacgacaagtttaagagcccgaacgaattgcttaaagagttgtccggacaggtgtttgccctggtgcgtgagcttcccaaaccgctttcgagagaagagatgcgggagttgaaacggttgtgccgcttcctgaacaatacggtgaaggatcaggagcggaaacaggaggtgagaaaataaatccgggtgttaaaaagaaccgggagacggatggcgaaagtggggtgcgggtgggtgtggaggctttccgaagagacttttacggcggttttaacattcggaagtgtaaaaagtttgttgttcttttgcatcatggttcattgcagaggatgcgcagtggcaaggggtttgctttgtgcgcttggcggcggatcgggattaaaaacattaaaatttaatactctatgaaaaagagagagtttaaaatttcctttttcctccatgtgtgggaaaagaaagcggaagagatttcgctggaagagtttcataatgacctcaggggagcacgctggaaggtgcttgccgagtcgtaccggcggtggatgcggacgggcatgaccgaggagggcaagaggctgaaaggggcgctgaatgcggtggtagtggccggcaagtgccggggcggacatgcggcgagccaggtgaccgagctgaacggactggcgctgttcgactttgatcattgcctcgagatgctggccgggatgaaggagaaggctggggcgctgccttatgtggtgggggcttttgtcagtatctcgggtgaagggctgaagctgattgtgcgcatcgatgccgagaatgccgggcaatatgcggtggcttatcctgtcgttgcccgtgagttggaacgggtgctggggcatccttgcgatatgtcgtgccgcgatctgggacgggcgtgctacgcttcgtatgatccggaggcgtactataatcccggtgccggggtgtttccgtggcgggagcaggtggacgggctgttgcaggcggaaggggagtgttccgcgcagtcggtgggcaaggcttgtccggcgggcgttgcttccgaagcgggggatggctttatgcaggttttcctgaatgattttgatgcccggaatccgtttgtggcgggagggcgccatgcgtttgtgctgaagctgggacgtgttgcccggtataaaggtttttcgccggaagaaatgcggctgttgcaaaaagcagtggttgagaaatacgcgcaggctgatttcgggaacggagaaatagagaaaacattatcgtctggttatcagtatgtttctgccaggagggcggacgctgtcatggcgagtcaggggccaaaagtccaagggccactctatgcgccagaggagggggagagtgaagaggatatggaggatgtgttgttcggaaaaagtgaagaatttcgtcgggtggctccttactttcccgaagaggtgtttgagcatttgcctgatctgcttgcgcagggggtgaaggcggccggcagttatcgggaacgcgatatgttgctgatggcgatgatcaccaatatcagcgcctgtctgcccgaggtgcgtgtattgtacgatcaggtgtattactcgccgcatctgtattacatggtgatagcccatgcgggaggcggaaagggggtggtgtctctggccggcttgttgcccggagagattcaccgctattatgagaagcagaacgaggagatgcgcctggtgtatgataaggccttttttgagtgggagctggagttgaaaaaggcgcaggcggaaaagcgttcgccggacttttcgctgcgtcccaaagagcctgtccgtaagctgttgacgctttcgcccaatgtgtcgaagagtatgctgatcagtgcattggaggagagcggcaagctggggtgctgcatcaatgctacggagctggacatggtgtcgggagctatccggaatgattacggaaagcacgatgatgtgtttcgggcggcttttcagcacgaagtggtttcggccgatttcaaggtgaacggccgtcaggtggtggcccataatccgcatttggcgttgtgccttgccggcactcccaaccagctggtgcgtttcattccttcgttggagaacggtttgtacagccgtttcctggtgtatacgggccagagcgattggtgttggcgttcggctgccccgcgggagggaggtgaagatcatcgggcgatgtttgcccgcctgagcggccggttgttggagttgcaccagttcttgcttcagtctcccacggaggttacgtttacggctgcacaatgggaggaacatacgtctcgtttctcctcacacttgtccgaggtggtgaacgagcgggatgattcgccgggagcgatcgtgcttcgtcacgggctgatggcgagccggatagcaggggtgctcactgcccttcgcaagggagagtgcgcctgggcgatgccgcagtatgtatgttcggacgaggatttccataccgctatgttgatgacggatgtgttgttggagcatagcttgctgctgtccaccagtgtgcggaagagcgagagtaagtccgggcccctgaagccttatttcaggttgcgtccggtgttacagactttttcaggaacttttacttataaggatgcgatggatcgggcggtagagatggggattccggtaaccacttttaaacggctgttcaggaagacgatagagcttaaaattattgataaagagggagatatgtatatcagaacgcggcggggctggcgggagactgacgcatagagtggcccttggacttttggccctcggaaaacaccggagcaaacgaatgaatgtatgaaaaaactcttaagccttttccgaaaagacttaagagtttagaggaaaagacttggatgtttcgagggaaacgtctaagtctttttcgtgtttttcaccacagagggacacagagtctcacagagttttttttctaaaagcatatccaatgaaaatatagattctctgtgagactctgtgtcctctgtggtgaattcccctctgtggtgaattcaaggttctcccaggtaatacacgatcagcctgacttcccgtttaaggaagctgtggcggtatttgttgtaattgacatcggacagtgcctgtgtcagggcggtgtttttacgcatccagcggtagagtttctgcagggcgagcacggggtcgagtcccgggcagtaaagctgtgcaagttcggctttggtgtacgagcggatgatgaaatcggcttcggttgtgtcttcttcttttctttggttcatggctttgattatctgattgttacatactgtaaatgtacggaaaaatatccggaatgcagtgtgtttttatattcttttttcctcaaactttgtcatcggtcctctttctttgtcattggagcatcgggggtgtcgtatctttgaaatgtgattgaaaaacagatgtttaactctaaaaagaaagtacgattatgagtaaagaagttacgtattcggtagtggcgcgcaagaacatgctgaagaaggatgatcccgccaagtattatgcccaggcacaggccagcggcgatgtggggctggacgagatctcgacccgggtggaaaaggcctgtacggtacattcggcggatgtcgtggcagtgctgaaggcgctggaggatgaaatggtggatggcctgtcgaggggagagattgtcaggctggggaatatcggcaccttccaggtgggcctgcgaagcaggggagcggagaaggcggaggatttcaaagcggcgaatatcagcaaggcgagagtgaacttccgtccggggcctgtgctggcggatgcgatgaagacgctcaatttcagtaaggtgagtacgcgggcggcgcagaaaggcgatggcggcggggacggggatattgtggatgacccgacagcatgacccgaccacagagtgacacagagtctcacagaggaggaatttcaacgacctttctgtaaatccggaaattaaaattctctatactatagtcccggggattaagattctatatcagcttgaaaataaagactctgtgttgctctgtgtcctctgtggtgtaaacgtaaaacaacttaatatagcaaaacaacgatgaagaagttacaaagaatcttggaatgggtgattgcattcctgatgtttctcagtgggaggaatgtcgaaaaatgaagggggaagtatgaggaaaatcgatttgattgtgattcattgctcggcaacgagagaagaccggtgttttacggagttcgatctggatgtctgccatcgcaggcggggattcaacgggccgggataccacttctatatccggaaggacgggcggattgtgtctacccgtccggtggagaagatcggggcgcatgccaaggggcacaatgcgacgagtatcggtatctgttatgaaggcgggctggacgcgaggggccgtcccaaggatacccggacggagtggcaggtacattcgatgcgggtgttggtgaaaacgttattgaaacagtatcccggcagccgtgtgtgtggccaccgggatctgagtccggacctgaacgccaatggggagatcgagcccgaggaatggataaagcagtgtccgtgttttaatgtgattgaggataaaaaattacattgatgttttagaattgattatgaatcgccaaaagggttaattaaattaactcttttggcggtttgcttttcatggaataagtgtaacaaataattaattcattatattttataaaatcatagagatacttttctaattatgcttttgtccgtagccgtagccataaccgtacttctttccgtatccgtaatagcggccgtattttccgtatccatagtaatagccgtatttccgctttttcatgtccaagccgttgattacggtacacaggttggggagcttgttgcccaggcggagatcttcgagcagggtatagtcggctttgtgggtatagtcggcgcggcagacataaaccgataggtcggccacccgtgcgatgatctgtgtgtcggtcaccattccgatgggagcggtgtcgagcacgatatagtcgaagtgctttttcaggatatcgatggcttccaccaatgcctggcgtgccagcagttcggtcgggttgggcggtacggttccgccggggaggatgctcagggtgcgggatatcccggagggctgcaccatagacatcaggtcggtggtctgcgggccggccaggaactgggtgattcctttttctttctgcgagaggttgaagaccttgttgagtcccggcttgcggatgtcgagccctacgatgactactcttttgcccagcagcgagaggctgatggcgaggttggtggctacaaatgtttttccttcaccgctgatggtagaggtgaccaggatgactttattctcttcgcccagcataaactgcaggttggtgcggatgccccggaaggtttccgccatcaggctgttttcgttttcgcggacagcgatgcctcccgctttcccgttaccctcttcggccagggggatgtctccgatgatgggggcggaggtcagcttttccacatcggcccgtccttctatccggaactggagcagccccatgacgtagatgatggctacggggatgcccatccccatgacgagggctatcatatagatcgttttggtcttgggagaaacgggaccgttgtccgccatggcctcgtctacgatcttggcgttgttggcagtggcggccagtgtgatggagttttcttcccgtttctgcaacagcatcaggtagagtccggctttgatctcctgctgccgggagatgctgacgaactggcgttcctgcgcgggcgcattgctgatgcggcggttgaacttgctggcctgacggtcgagctcggccttggtgatcagcaatcctttctgaacgctgtggatggtggtcaggatgttttcgcgcatggcacggatgccgctatccaggttcacgatcacggggttgctttccgaggagttgcgtagcaggcggttgcgctgaagcaccatttcgttgtattgcccgatcagggaggagagtgactggtcggtcaggccgacgttgacgggcagcacggcgttgatcttgtccggggcggagatatattcggcgaggtagcgtacgaggttgagctgggtgccgttctcgacccgttgtttctcgtaggcggaattttcgctcacagccagttgggcgtcgctggcaaggtccgtcagtccggcatcccgtttgaaggtttccagctccttctcggtactgaacaattcgtcgttgatgatgcggatacgtccggcgatgaactcttccgttttctccgccacttcgtttttgtcgttgttggtgttccggttgtagacttcgatcagccggttgatgaagtcctcgccccgacgcttgttggtgtttttgagcgagacgatgacgatggaggtggttttggaggtaggctctacgctgagcgccgccgcatacctctttgccgtctgcatggggttgcttacaacggcggtgagtgtctgcggttcacttactccggcggagtcgccggcaagagtgaaggtgaacgttccggccggagtgacgagcaggcccggcagtttggagaattttttgttgtaggaggtttccccgacggtggctttcacgtcgagccggttgccgggcgacagggtgagttcgaatacggccggacccggcagcctgtctgcttcttgcggggtgaggcccaccagtaccggcgaacttttataaagctctacttcgttgaaactgcctttgacggagtaggtggtgtagaggttcagctcgctgaccacatgcttgaccagcgttttggaacgtagtatttcaatctcgttgtcgatgttcgataccgagttgaccagccccaggccctcgagcgcggcgagatttccgccactgttgccccctttcttatcgtccttgatgatgaccgaggccgagatgttgtagaccggagtggtctgccggaggtgtagccatgctcctgccaggcagatgatgaccgaggctacaaaccagggccaccggatgacgtagcggaacaggagggcatggaagtctattttttcttctttctcttcgtatagatcgtcgtataagtcttctttcattgtcggggtttctttatttggcgatggtgataattaaactggcaagcgacacgagcgtgcttaccacggagaaccagatggtggtgctggcgctgatgtcggctgtctttgccttggtcttattgggggtgacatagaggatgtcgttctgttgcagatagtagtagggcgattggatgatgtctgcccggttcatgttcagcgtgatgatgtgctggtgtccgtcggcgtcctcgcggatcaggcggacattgtcgcgcagtccgtacacggtcatgtcgcctgccatggcaagggcttcgaagaggttgaccttttcgttgctgatggtaaacgtgcccggcctgttcacttcgccgatgacggaaattttataattggccatgcgaaccgtcacaatggtgttttctttgatgtatcctttcagcttttccctgatcagactttccgcttcgcccttggtcagtccgccgatatggagggtgcccaacacggggaagtcgatgttgccccggttgtcgaccagatattgctgaagggccggttggctggtcaggcttttttgtgtattgctgacaggggtggatacggtcaggttgaacggttctgccaattccggatcgctgcacgatacaacgatggtgagcagatccttcggcaggatgcgggcatcatagagcttggcctctgcaacggcacgttgcgcctctcccgggtcttgcaagtagggtactttcttgtaggactggcaggaagccagcaaaatacaggttaacgtgaaaaaaagtagtctttttgtcatttatcttaattttagaatattactatggggtggctcaccacagagtacacagagtttcacagggttttcatcttttgtgtgatggggaaaaaaaattctctgtgaaactctgtgttcctctgtggtgtaatctcttttattcattttctttattttaataagcttctttttctccttccagcgcatttcttacggttttatatataatatatagatcgagcatgaaggtccagtgctcgatgtaccagatgtcgcgttgcacacgtccttccatttgccatagttcgtgagtctctccgcggaagccggtgacttgcgcccagccggtgacacccggtttcacgaaatggcggaccatgtatttgttgatcagttgtgagtattgttccgtgtgtttcagcatgtgggggcgggggcctactaccgacatgtcgcccatcagtacgttgatgaactgcgggagttcgtcgatgctgcttttacgcaggaagttgccgaagcgcgttttgcgggggtcgtgcaaggtggcctgcagggtgtcgctctgcgtgttcaccttcatggagcggaacttgtagcaccagaattcccgtccgtcttctccactgcgcttttgcttgaagaagatgggacccggcgaggtgattttgatggtcagcccgacaatgacatagataatggggaagagggtgcaaagaaacaagagcgagaaagcgatgtcgaacacacgcttcctgaatcggttttcggcaaaactgagcggctcctggcggatgcagagtacgggcacgttgcccaggagctcgaagtacatgcgccgcttcagatagctgcgcacgttggggacactgaaaaagcgtatcaggtgattttcgcaatagtcgatgatggggagaatctcttcgctgcgggccgaaggcaggcaacaataaacctgctcgactcctccctgcttcaggcggtccacaatcttaccgggttttcccagatagttcaccttttcggggaagcggctgccgggctggtcgtcaaagtagccgatgacacggaatccggaagtgacgtcgtccgtcatttgatggtagagttcgattatattgctattgcttcccaccagaatgatgttgcgggagttgcctccatgcttacgataggacttcaggatcttgcggaacaataaccggtaacaaaccaacagcagagtgaacgcaatgtagaacagtaagaaaaagcgggcggaaaggatgccgaagtttccaaaggtgagcgcgcaggaaaaaaacaaggcgtgtcccgcactgttgcgtaaggcacgccatacgatttgctcgggacgtactacacggcggtgcaatatgatacctgaagacatgttgctaaccaggtagcataagttgagcaataccagtacttggggaagtgagtgaatgaatggatctgcaaaaaaattgctccccaatagggtgtacaaggacagaaaggtgccattcaagagaatgagatctccggtgaatacaatccttttaatgactttattgaaccgcaatacctgtttcatactgtacttttagaaatgtttgcgatagttgtcgttaatgtttgaataactaccatcttgctgtgtgcattgcaatttgttcccttacttattaggtaatagaacaaagtgatcccttacttattaggtaatagaacaaagtgatcccttacttattaggtaatagaatgcggaatagcgaaaagatatgaaatataacttttagaggttaactaaacataaaacaggggctggattatataattctgatgtcaaattattgcaaattgtaaactcctgtttgagtaattacatcaaacaggaattatgactaatatttctattaagtgaataaattatttcaaactgatacttcaactggttataattcacttttatagaaaagaaattatcattttgtttgtggagtttcaattattatctctatttttgcagcaataaaacaaatgaatctgttctattacctaataagtaagagaacagctattatcactcctcctcctctttcttaaatctcacggcggcaatcacttttttatttgcgttactgagcgttttgttatcaaaagatgccagataaatgtatgtcaccttctctgaagcatgccccattcccgcactgatcaccgaaaccggaacccctttctgcagggccgtggtcgcccaactgtggcgtgccacataagaggtcagcggagtcttcaatttcagtattccggatatctggttgaggcgtttgttgtataccctcaatgcacttcggtactgcttgtgcccctcctctccggctgcgctgatgacgggcagcagatagacggattctttgcaaagcgaggcatacttacgcaagatcactttggcgcagttttctatgattaccgtaagttgctgtcccgttttctggcggaaataaacgagcatgtttccctgcacatcggtcttgcggagatgtaccaggtcgacaaacgggattcccctcaggtagaagcttagcaagaagaggtcgcgggcaaaatcgagccggctgttcttgctgaaatctgcttcgagcaggcgggaaatgaggacgggtgagatggcccgcttggcagtgggctcgttgccgataaaaacattctcaaacagctcgcgggtgttgagcgaagctatgttctgctccgatgcctgattgcagatggaacgcaacatgcgcatgtagagcgagatcgtgttgtaccgtttcccgttgaggattaagtattgctcgtactccttgatgctctcgggagtgatctcttcaaaagtcagtgaggcttttcccgcaaacttctgaaaactgtgcaaagtgtagaggtaggtattggctgtgctgtaacgcccgcctaacttcgcttttcttgctaaagatttaatgaatttttctatttccattttcttgttctttttagtgtgttcaagaacacggtttataataaaaaagattttgagtgacagattggaaaatatgctggaaattagtaaaaaatcaatagcataaatgtatagacgaatgaaagtttcagaaatacccaagtagcatgagaaaaaaggaacgtaaaaaagtgtcccgtatttgaatgaatagccgttttttcgtggtgtattaatcatttaaaaacatgaattatggtaatagcttatttgagagtaagtacggaaaaacagtttttggctaatcagaaggaagagattatgcgatttgcagagaagaatgggttgtcgattgacaagtggtacacagagaccgtaagcggaagcgtgagcacaaaagacagaaagttatcagagttattgaagagaatgcatcccggggatacactgattgtaacggaaatttcgagattgagccgtacactgctcgagattatgactatcctgaatttttgtattaagaagcaggtagtgctctatagcaccaaagagggctatgtgtttcaggacgacatcaacagcaaggtgctgggattcgcgttcggactgatggcggaaatagaaaggaacctgatttcgatgcgtaccaaagaagctctcgcacgcagaaagcaggaaggaatgactttaggccgaaagaaaggggatactcctaaaataaaattgctgcatgccaataagcgcgtacttaccaaagaacttgacaaaggaactacttactcggaattggcggagaagatgggggtatccagaacaaccctgttccggtttatgaaaacgatgtattagtaacggttaggggagtcataattcaccacagattacacggattctcacagattaataatttattttactgagagtttaattaaaatatctgtgttaatctgtgtaatctgtggtgaataggggttcattcaatgtttatcatttaccgttcatcaccgttgatcgtttatgaaggcttttcagttcgaaggacaacatgacacggaagaatccgatgatcaggaaagtgaatgccagcatatatataacgtagagggcacctacggccggctgccacaggatgatcagcgaacaaatgatggcgaggatgccgaatcccatgtaccatccccactcacgggtgccataacgcttcaggtccatagaatagcctgtggcggagaaaccgcggaacatcatccagaaggcgactatgaacggtatgacttccatgctgagcagtggataggctaccaggtagatgcctaagatcagatcgatgataccgcctgcgaggtaccatccccaggacgagatgcctcgccggttgctgatggagaagatgatttcgatgataccacttatcagcatcgaaatgctgaagatgacgctgagggcaatgtaactgcttcccggtgcgaatagcagacagagagccacgatgatgtacagaatacccagaataagagataaccaccagtttttgactgcgtgttccatctcgtcgaataaagttttcatatcaattttattttttagattattgtccatcgtgaacaaagttcttgcaccgattgtttagaatatagtaaataaaacttagagttatcaattatggcaacaacaaatttcaaaggacaaccggtaaagctgattggcgaatttatacaggttggaaaggtggctcccgatttcgagctggtgaaaagtgatttatcttctttcgcactaaaagatctgaaaggtaagaatattgttctgaatattttcccgagtctggataccggtgtgtgcgccacttcggtgcgtaaattcaataaaatggcagccggaatgaaggataccgtggtattggccatttcgaaagacttgccgtttgcgcagggacgcttctgcacgacagagggtatcgaaaacgtgattccgttgtcggatttccgcttttcggacttcgacgagagctatggcgtgaggatggctgacggaccgctggccggactgctggcgcgtgcggtagtggtgattgggaaagacgggaaagtagcttatacagagcttgtaccggagattactcaggagccggattatgaaaaggcattggctgctgtgaaataatcttttttttgaatggtttcaaggaacagaaagtccgtgttcactccggggggtgagagcacggactttttcatgcgggtataaagcctgtctttacaggctttaccccctatgactactgcttgttacgtgtgttgaacaggcaattacttctttttggtcatatcgaagttgaacagggtctgaggaacaggtaccgctacgcctgccagttccactttatcggcgctgagcttcaacttcaactgatttttcttgtaagcaaagctgcctttgtccggagacgaaatggttacggtaacagtctgtccttcctggccttctacggctgcaggcagttgaagggtcaacggtttcggatcgaaagcaaggtagatgctgtccttctctgtattgagagccggcttgtagcctactttgtattttacgtcaccgatggctttgacaatggcttccgctttgtctttatcgcctacaatggaggtaataagttcggttaccggcaatttgtcgaagaacaccgtgtcatttttcaccgtagcgtttacgtcttgtccctggggagcttctccggcattttcttttgcagtggcgggagtcacctgggttatcagtacttttccgttataggtgcctgccacatcgttggtggatgggggaggaagcggagaattgtcatcgttgttgcaagaagacaaggttaccactgagaaagcaatcgcaaaagaataaaaaagcttggttaagttgaaatcttttttcatttttttaaacattaaatttgttacataaattgctttttcatcaaacaactgtaaggcctaggatttgtttttttgatgaattgtcaataactggtttggtgtacgtacaataagtaaatgcagaaaatataaaggtactgcatggaggacgaaaaaaaagaaagattttttttgagggagggatgaaggcggagttttaccacggagtaccacagagtctcacggagtaatagagagtagagagtaatacagagtaatacaaagttcttagagttcactaccattcgttatcgatagattaagttcactctgtgttgctctgtgttactctgtggtgaatgctgattcttgctgtggaggcactatttctttttcttcattcctttgtagacaaggaaacctacgatgaagactccgatgacgatgaagcagtagcccagttcatggctgtattctgttactttggcaagcagttgctcttcgctttcgatgccgggtacggtggaaaggtaataaccgatggcagcgaggatagtgttccataatccggcacccagagtggtgtagatcaggaacgtgtgcagcttcatgcgggcaagtcctgcagggatggagatcaactggcggacagcgggaatcaggcgaccgataaaagtggagagtgctccgtgcttgtcgaaatattcttcggcatgctgcactttggcttcatcgatcaggcacatgtgtccgaaacggctgttggcgaacttgtagacgatgggacgtcccagccagcgggccagatagtaattgataatagcaccgaggttggctcccagggtggcgaagagcactaccagatagatgttcagctcttcgttgactgccgctttgtaggctgccggaggaacgactacttcggatggaaaaggaatgaaagaactttcaatggtcattaataaagtaatggtccagtaattgaggtggtctaagcaccactgaatgaaggctacagattccatttgtttaatttagattgaattgatatagttttgtttttttgatttaccacagagtaccacagagttttttaatctcttgttgataagatatgaagagaaaataatctctgtggaactctgtggtgaacttgattatttttcgtcttttaaaaaatcgtccagttcgcgaagcatctgttctccgtcgacacccatttccagtatcgtatcccggagggagtcgagattgatggaatcgccggacatcgcgttgtatttcttgaatccttcatgatcctgaagaacgaggcatacggcggccagttgttcgcagatcttggggtactcgggatcttcttccagcacctgctcgaagcagaagcgtgcgttctcgagcatgcggaactcgaggctgtagttgcctatttccatccaggtatctgcttcgggagcatagcggagagctaatgcccactctgcacgggccaggtcgaaattgtcctcttccatatagatgcgtccctcgagcaggtagggctctgcatcctggggggcgagctcttttgccagtcggcaaagccgatgggcttcttccgagtcgccctggcgggaagcgcagagtgctttgtttgaatagatatcggacaatagcggggaagaaccgttaccgttttcttcgatcgcccggagagccatgctgtaactttcgttggcttcagcccaattttcctgctgggtgtaggccagtccgatgaacatatatgtaaattcgggggagagcgttttatacttcagggctttccggtattcaacgatggctccctcgatgttctcaagatgaaagaggctgtgtgccttgatgatgtgggcttcgccgaattcttcgtcggctgcgatggcaaagtcacaggactcgatggctttatcgaaatctttggtggcaaactggcatttggccaggcctacccaataagccgggttatagggattcttgtcgatcagcttgttgaagacaacgatggcttgctctatgtattctgctccggccgcaccgtagcaatcggcggtggctgccaggaagtcttcgtcatctttgtacatctccgcaccccgtttgagccattgtacgcctttctccggataacctaagtcggtgtacaggtagacaatatcgaccaggatgcccaggtcgtttttctcttcctcttctatgctgtcgagcatttggtcggcggcatccagtttaccttcgttcagcagcagttcggccaggagtagttttacgttggaggagtaagtgtcggtgatgagttcggccacctctttggccttttggggttgattgagatccaggaacaggtaagcctgttcgaccatgaggtcggtgtgtcccggatggagtccgagtccgtatgttatgacctcctgggcttccttaaacttacgttcggaggcatatagatcggcaatatcagccaattggtcaccgtccaggtatagcgattcgtttttggcttttaccgcttcgtattgtgcgataaggttctgtaattcccgctctctttcggacggggagttttttctgcccaatttaattagcaattatacagttaataatcattcgattcgacggagggggaggtgtgtctcctgtggtgagttccgacacacgctcccttgcccaaaaattatttattgatctttccccaggtatctttcagtcctacggtgcggttgaataccagatgtccgggggtggaatctttgtcgatattgaaataaccgatacgctggaattgcagataagagagcgcgggcatgtcggccacgtacttctctatatagcaatggggcagtacggtcagtgaatccggattgatcatttccttcatggcttcgagggcgtcgcaacctttggcttcacggatggctgccatttcgtcgcgcgggttttccactttccagagacggtcgtacagacgcacctctgccggcagacaatggttgcagctgagccaatggagggtgcctttcactttgcggttggcgtcgggcatgccgcttctggtgttgggatcgtattcgcagtatacctcggtcacggtgccgttctcgtctttcttgcagcctgtacatttcacgatgtaggcattcttcagacgcacttcctgtcccggagtcatgcggaaatatttcttcggggcatcttccatgaagtcatcgcgttccatccacagttcgcggctgaactcgatggtatggcttccggctgtcggatcttcggggttgttgatggcttccagttcctcaacttgtccttcgggatagttggtgatgatcagtttcaccgggttcagtacggcagatacacgggtggcacgggcattcaggtcttcgcgtacggcgctttcgagcagggcgaagtcgttgagtgcatcgtaagtggtgtaacctattttatcgatgaacttacggatggattcgggagaatagccgcgacggcggaatccgcagagagtcggcatacggggatcgtcccagtcgttcaccagtccttccttcaccaggatcagcaggttgcgtttactcatcagcgtgtagttcaggttcagtttgttgaactccgtctgacggggacggttgtcgtccaggtccttgccttctttcagccagtcgatgaacaggtcgtaaagagggcggtgaggcacgaactcgagtgtacagagtgagtgggtgactccttcgaaatagtcgctctgaccgtgtgcaaagtcatacatcgggtaggctttccattgggttccggtgcggtggtgtgccacatgcaggatgcggtacatgatcgggtcgcggaagtgcatgttggggcttgccatgtctattttggcacgaagcaccatggaaccttccttggcttcgtcgctattcatcttttcgaacagggcaaggctctcttcgatcggacggttgcggtacggactctcgacaccgggttgggtgggagtgcctttctgttgcgctatctgttctgaagtctgctcgtctacgtaggccttgccttctttaatcagagtgacggcaaagtcccataattgttggaaataatctgaggcataatatacgttgccccattggaatcccagccaccggatatcttcctggatggcttctacatattccatatcctctttcgtcgggttagtgtcgtcgaaacgaaggttgcacacaccgccgtgtgcggcagcgatgccgaagtcgagacaaatggctttagcgtgcccgatgtgcaggtaaccgtttggttccggcgggaaccgtgtttgtacttttcccccgttctttccagctttcaaatcattttctactgcctgttcaatgaaattgaggcttttcttttcgcctgcttcttcgttttttatatctgtcatatctgtcattattataaaagctcgtagctaataagttgctgcaaaagtaggatattttttttgtatatccttatttcacgggtatatatccactcttttttataatatcctgtccttcgggagagagaataaactcgagcagaggagcgatttgtgttttgttctttgcatcataatagtagtagagggggcggacgatgggataagtcttgttggtggcgttctctacggtcggggtggcatagtgctcgccatcatacgagatggacagagtcttgatgcgcggcgacacataagcgagccctacatagccgattgcccctttggtctggctgacggattggataatggctccggtggcgggcatggagaggctgctgctcatataattcttgttcttgaggacgctctctttgaagaactcgtaggtgccggaagaggtctcgcgagagtaaaccacgatcttgcggtcgtcgcctcccacttgtttccagttggttatttttccgcggaagatgtcttccagttgccggcgggtgagttttttcaccggattggacgggtgtacaacgacagccagcgcatcgtaagcgacgatcacttcgtctatatcccgtttggcggctttggctttcatcttttcgctgaatttgatggggcgtgaagccatggcgatgtcagtggtgttgtccatcagggcggagatgcctacccctgtaccgcctccggtgactgtgacacgggcgtcgggttcacggttcatgaagcgttcggcggtttgctgggctacgggcagtacggtgtcactgcctttgatgcgctgagcgttggcatgcaatgctgcgagtgagagggcggcgaataagatagttctaactttcatatgattaagttttgagtttgattcaccacagagtaacacagagttccacaggtctttaatcttttgttacagtattttagagaaaacgaatttctctgcgagagtctgtgttctctgcgagactctgtgtactctgtggtgaatcctgtggtggattctattttatgtgcaaataaagcaatagcgtgttacattcctgtttcaaaacgtgccgcatcttgtcttgtaacagaaacgtaacaggtttgaaacagttccttcaaaccgtattcacacctccttaatacttactccgtttctttgcatcatgaaaatcaaaaggtatgaagaaggtttttgaaagaattatagaaggaatattgacctgtagcggttttgtaacgagtattacgattctgctgattgtgcttttcctttttaccgaggcattcggcctgttcagcagcaaggttattgaagagggatatgtgctggcgctgaacaaagataataaggtaagcgaactgacaccgatgcaaattaaagatgtctttgatgaagagatcaccaactggaaagagttggggggtgaagatctcccgatccgggtgttccgtctggaagacatcacgcactactactcggaagaagaactgggagaagcctacgagaatgcaggggaaaagattatggagctgattcagaaaacacccggtatcgttgcttttattcctcagaagtttgtggtacggccggatgcggtacatttcataaaggataacaccatttctgtgaaagaggtctttgccggagcggaatggtttccgacggctactcccgcacctttgttcggctttctgccgctgataaccggtacgctttgggtgagcctgtttgccatattgattgctttgccgttcggactttcggtatcgatctatatgtcagaggtggccgattcgaaagtacgtagttggctgaagccggtgatagagttgctgagcggtattccttcggtggtatatggctttttcggcttgatcgtgattgtacctttgattcagaaagtatttgatttgccggtgggggagagcggacttgcgggaagcattgtgcttgccatcatggcattgcccaccatcataacggtgactgaagacgccatgcgcaactgtccccgtgccatgcgtgaagccagcctggcactcggagcttcgcagtggcagaccatttataaagtagtgatcccttattcgatctcgggcattacctcgggggtggtgttgggtatcggacgcgctatcggcgagacgatggcggttttgatggtgaccggaaatgccgccgtgattcccactaccattctcgaacctttgcgcacaatcccggcaaccattgcggccgaactcggagaagcaccggcagggggaccacactatcaggctctgttcctgctgggggtagtgctgttcttcattacattaatcatcaactttagtgtggagtacatttcatctaagggcgtaaaacgtagtaagtaatatggaaatactgaataatacaaaagctaaaagacgttcgcaggggatcgctttcggcatattccggctgctgagtttatgcattgtgctgattttgttcgcgattctgggattcatcatctataagggtatcggcgtgatcagctgggattttctgaccaccgctcctactgacgggatgacgggaggaggcatctggccggctatcgtgggtacattctacctgatggtgggcagtgcgctgtttgcctttccggtgggtgtgatgagtggtatttacatgaacgagtatgcgccgaagggcaaactggtacgctttatccgggtgatgaccaacaacctgagcggtattccgtcgattgttttcggtctcttcggtatggcgctgtttgttaactatatggatttcggcgatagtattctggcgggttcgttgacgttggggctgctttgcgtacctttggtgatccgtactacggaagaggcattgaaggcaataccggacagcatgcgcgagggaagccgtgcactgggagctaccaagcttcagaccatctggcacgtgattctgcctatgggaatgccgaatatcatcaccggattgattctggccttgggacgtgtgtcgggagaaacggctccgatcctgttcacttgtgcggcgtatttccttccgcaattgcccacaagcatcttagatcaatgtatggcattgccctatcacttgtatgtgatatcgaccagcggaacggatatggaggcacagttgcctctggcttatggaacggccttggtactgattgtaatcatactcctggtgaacctgctggccaatgccttgcgaaagtattttgagaagaaagtaaaaatgaattagaaactgtttcttagtgacggagtacaacaaaagatatggatacaacagtaaaaattgatgcgcgtgatgtgaacttctggtatggtgacttccatgcactgaaggggatcagtatggagattgaagaaaaatcggtagtcgcgtttataggtccttccggatgtgggaaatctacttttctacgcctttttaatcggatgaacgacttgattcctgcaacccgcctgacgggagagatccgcatagacggcgaaaacatctatgacaagggagtgcaggtggacgagctgcgtaaaaatgtaggcatggtgttccagcgtcccaatccttttccgaaaagcatttttgaaaacgtggcttacgggttgagagtgaatggagtgaaagataatgcctttatccgtcagcgggtggaggagaccctgaagggtgccgcgctttgggatgaagtgaaggacaaactgaaagaatcggcttttgccttgtccggcggacagcagcagcgtctttgtatcgcacgcgcaatggctgtatcgccttcggtgttgttgatggacgaaccggcttcggcgctcgaccctatttcgacggcaaaggtggaagagttgatacacgagttgaaagaacggtataccattgtgattgtgacgcacaatatgcagcaggctgcacgtgtcagtgataagacggcgtttttctatatggggcagatggtggagtttggcgacacgaagaagatctttacgaacccggagaaggaagcgacacaaaactatataaccggacgtttcggatgacatacgattgatcggcatgcagctcgatgtatcatttaatattgtatatttgcttaataataaatttaatagaatatggtgaagtttatagaatcagaacttgttctgctgaaaaaggaaatagacgagatgtggacattggtttacaatcagttggacagggcaggggaggcagtgttgaccctggataaggaactggcccagcaggtgattgtccgtgaacgcagggtgaatgctttcgaattgaagatagacagcgacgtggaagacgtgatcgctttatataatccggtagctatcgaccttcgctttgtgttggccatgttgaaaatcaacaccaacctggagcgcctgggcgactttgcagaaggaatcgcacgttttgtagtgaagagtgaagagccggttctggatgaagagttactgaaacgactccgtctggaagagatgcagaaacaggtgctttcgatgcttgaagtggcaaaacgcgcattgaacgaagagagcctggagctggcaacctccgtattcgctaaagataatttattggacgagatcaatgcggaggctacggctgttttggcagagtatatcaaagagcatccggaaagcactctctcgtgcctcaatctggtgggagtattccgtaaattggaacgttccggcgaccatataacgaatattgcagaagagatagtcttttttatcgatgctaaagtcttgaagcatagtggcaaggtagaagagcattatcctgctaaataataaatcgcaaatttttaaacaaaaattagtgctacttaaaaaaatgtcatatatttgtctcctgtaacggttcggttacaggagttttttttgaaatgataataaatccaaagaaaaatcaaaaagatgttatatgacatgtttttatatttggttcataacgagaaaagcacctatatttgcatcgttatcctgaaaacaatctttttaccttaaaaaaaaactaatacctattgaaaactgaaaagcggggctttgtgaaaagccccgcttttttatgttgattctttatccaatcccattttctttgtatctttgacccctgtgagggggtgggcgaatgtgagtcgcatcacacctctgttttaattgtgaatcctaaattaaaaatagaactatgttttccggaatcgtagaagagtatgctaccgttgtggcactggtgaaagaccaggagaatatacatttcacactgaagtgttcgtttgtaaatgaattgaagatagatcagagtatctctcacaatggggtctgcctgaccgtggtcagcatgactgaagatacctacactgtgactgccatgaaagagacactggaccggtcgaaccttcgtctgctgaaagtgggggacaaggtgaacgtggaacgcagcatgatgatgaacggacgtctggacggccatattgtgcagggacatgtggatcagaccgccgaatgtatcgatatcaaagatgcagacggaagctggtattttacgtttaaatatgctttcgacaaggagatggccaagcgcggctatattacggtcgataagggttcggttacggtcaacggtgtcagcctgacggtatgcaacccgactgacgatacttttcaggtggcgattatcccatatacctacgagcataccaatttccatactttcgggaagggcagtgttgtcaacctggaatttgatattatcggcaagtatatcagccggatgatccagtacaaataaggtggaccggggagtagaggtgaaaaaagtatgaacgactttctgcaattggtaaatgcccggcaaagtgacagggcttacgataaatcgcgtcttgtggaggcggataagctggaacgcatccttgaagcgggacggctggcaccttctgcctgcaatgcccagccttggaggttcgtggtagtgaccgatccgtcattggcggagaaggtcggtaaggctgctgcgggcttgggaatgaataaatttgccaaggatgctccggtgcatatcctcgttgtagaagagtctgccaacattacttcgcggctgggcggaaaactgaagggaaaacattttccgttgatcgatatcggtattgtggctgcacacatggtgctggctgccgaaagcgaagggctgggatcatgtatactcggctggttcgatgaaaaagagataaagagcctgaccggtattccctcttccaaacgtgtattgctggatatcctgatcggatatccggtgaaagagaaacgaaagaagatccggaaagaaagcgggaaaattatttcttataacagctattaatgatctgagtgatacagaatgggctctgcgggtaggagacataaagaaaacccatattgctcttatcggaaacggaatttatttcaccacagattacaccgattttcacggattatatcatccggttctcggtggaagaaattattaatctgtgtcaatctgcgtaatctgtggtgaaaaccctccgtgagactccgtgtcactctgtggtggaaagagtttggataccgtttcccgtactgaactacaagtccttcagcaatactttgcttgcctttttataatattcttccctggagtcaagcaaaaccttccattgctcgctgaattcctcgtctttatcgactttaaaatcttctgagccgtatgtgtccagccggtcgagcaatagcgctacattcagctgattgatgtcgatggaaggctggtatgcgatatcctcgcttttttgatcggtgactacttcgtgaatcaggtgtatctcctgcagttggtaaagtatctgattggtcagccgaatcgggatgcgatgttcttcggatatctcttcggcggtgtaaggcgtttcgttgttttcgaaacgtttggctataagagacatgattaagatagatatgaaatcgcggtaacggcgactgatgttctgcgtatctctgtcgaaactgaagttgcggatgttctggccagcatacgtcagctcggcaccgaacaggcagatggtccatgatatctgcaaccataacaagaacatcgggagagcggcgaaactaccgtaaatggcattgtatttggacacccacaactgactgctgatgtacaggaactgaaatgcctgataagccgaaccggccaggatgccggagatcagtgcatgcttgaatttcaccttggtattgggcatgaagatatagagtcccgtaaacatcagccaggtcagcacgaacggaatcagacggatcaggaatttcaggataggggcaagtaaaacaaaatccgccatactcttcagcattgtgcctacaaagatggaaagaccgcccgatactacgatcaggatcggcatcaataggaacattgaaaagtaatcggtgattttgcggtacatgctgcgccctttctttacctgccagatgcggttgaaggtgatttcaatgttactgaccaggttgagtacggtccacagcaacatgaccaggccgactccgataaaaataccgtttttggtctgtgacagatacgagtctacgaattgcaggatgatatccgtcgcctcggtggaccctccgaagccatcacgaaactggctttccatcaaagtggagaccccgaatccgcgcgcgatggcaaagacgatggcgagtatgggcacaatggcgagcagggtgctgtaggtcagcgctgaggctttattgacaatgcggtctttgttgaagcggttgacgcagagatagatcgttttgatgatattgtatatcgagaacttggtgcgggtgacttcgctttccgtgatccgccagatatcataggtaatgaatttccatatatcggagagacgctgattcataggtctggtatttgaaattaaaaaaaagaaaagcagtcagcctataagccgagttctgtaccctgaataaatcaaggtgcctgtcatttatctgagtggggtgtcaccacaccactttagcggtctaccctccgacatggagcgagcagctctcatagcgccggtttacatgaccttacaactcctaagacgtacagcccgatatgtcaccatacggctggtgggctcttactccaccttctcacccttacctctccccggaaggaggggcggttcttttcttctacgttactctaccctcacggacagctttctgttaggaagtaggatgctctgtgttgcccggactttcctcctgtaccgaagtacacgcgacagaccggccaactgctttggtcagcaaaagtacaagaattattttgtttgagcaaacggaagggaggattagttcggttcaccacagagtagcacagagttccacagagtttcacgaatgacataaattcaccacagattacgcagattatcacagattaataatttattttactgagagttaaattaaaatatctgtgttaatccgtgtaatctgtggtgaactcaaaactctgtggaactctgtgttactctgtggtgaacatcgtatgactcgatttcagttcttattcttaatgtttctgaaaatatatatctaaaatggaaagagtttctatctttgctaaaaatgtaacccccaaatctttctttcatgaagaatatgattccttttgtatcgctgcttttggcagtgtccgcctgtacgggtattcctgaaaacaagaaaaatgccctccctcaagatgtagaacgattgtccggtgaagtccgcgaccgcttcattcccgataagcgtgtcatcctttgggatgtggattacgatgtatccggaaagacgattaccgtaaagggggcaactacttcgccggaagctaaggcggctttgttatcggggctggaagagaaggcttatgaggtaaaggacagcctgcaactggttccggacagtgcggctctgaaaggaaagatgtacggcattgtcaatctttccgtatgtaatatgcgtgtagaggatgatttttcttcggaaatgaccactcaggcattgatgggaatgcccgttaaagtgttgcaacatcgcaactggtaccgcatccagacgcccgataattatatcgcatgggtacaccgggtaggaatccatccggtcaccaaagccgggctggatgtctggaacaaggcagataaaattgtagtgacgtcgcattacggcttcacttatcagcagccggatgcaaagtctcaatccgtgtcggacgtggtagccggaaaccgtctgaagtacgaaggtaagcaaggaggattctataaagtctcttatccggacggtcggcaggcttatatctcacaatcgatatcgatgcccgaaaaggagtggcgtgcctctttgaagcaagacgcttcaagcatcatccgaaccgcttataccatgatggggattccttatctctgggcgggtacttcttcgaagggagtcgattgcagcggctttgtacgtaccgtcttattcatgcacgatatcatcattccccgtgacgcctctcaacaggcttatgtgggcgagcatatcgacattgctccggacttcggcaatgttcagccgggagatttgattttcttcgggcggaaggctactgccgaaaagagggagcgtgtggttcatgtagccatttatctgggtgataagaagttcatccattcgcaaggcgatgtgcatgtcagcagtttcgatccggcagatgccgattttgatgagtacaatctgaaccgcctgctgtatgcggtccgtgtgttgccatctatagataaggaggaaactttaaataccaccgctacgaatccgtattataactaaactcaaaataggtatgcaaaaccgaagagattttctcaagacggctgcctttgccgctatcggttcgggactgtcattgcaaggagcttttgccggagagaaagcccctgtttcgttcgcgatcaatcaactcggcctgggggcaaagatgaaattgcgttttttcccttacgaactgaagttgaagcatgtatttaccgtggccacttattcgcgcaccaccactcccgatgtgcaggtagagatagaatatgacggagtcatcggctacggtgaggcttcgatgcctccttatctgggacagacggtagactcggtgatggggtttctgaagaaagtcgatctggaacagttcgacgatccgttccggctggaagatatactggcttatgtagacggtctcactccgggagatacggctgccaaagctgccatcgacattgcattgcacgacttggtgggtaaacttttgggagcaccctggtacaggatctgggggttggataaggcgaaagcaccttcgaccaccttcacgataggcatcgatacaccggaagtggtacgtgaaaagacgcttgaagtggccgggcagttcaatatcctcaaagtgaagctggggtgtgagaatgacaaacagatgattgaaacgatccgttcggtgagcgatctgcctatcgcggtcgatgccaatcagggatggacggataagaaatatgcattggacatgattcagtggctgaaggagaaagggatcgtgatgattgaacagcccatgcccaaaacacagttggacgatattgcgtgggtgacccagcatagtccgttgccggtttttgccgatgaatctttgcagcggttgagcgatgtggccgggctgaagggagcttttaccggaataaatatcaaactgatgaagtgcaccggtatgcgggaagcctggaagatggtgacgttggcgcgtgcattgggaatgaaagtgatggtaggctgtatgacggaaacttcgtgtgcggtctctgccgccgcacaattctctccggccgtcgactttgccgatctggacggaaacctgctgatagcgaacgaccgcttcaaagggatggaagttgtaaaaggtaagatcaccctcaacgaccttccggggatcggggtggttaaaatatgaacacaggtaaacttttgaaacttatttggatatgagaaaattgctttatattgtgatgatattcatcggcgtctccgcctgcacctcccggcaggagtccaagccttacgactgggacgacgacctgcatcaacgattgctggcggatttctgcctgaccgaatcccaggtgaaagactatatccgcaaatacattcccgacgtgacggacgaacagatgcgccaatgggaagagagcaaggcgcttgaatgccgggtgatcgacggagagaaacgttatttccgcaatgccggtcccaacctgttccggatagactctgcctgctgtgccgtcaaaatggagaaagagggtacttcactgagcacgagcgaacaggtcaataaagaacatctgcccgaagtgatggctgctgtcaggaaagaaaaaactcctgtggtgcagcccaaacgcatgcgggtcacttatacgctgacggtggacagcaatgccgtacctgccggaaaaatgattcgttgctggttgccttatccccggacagaccagccccgccagcaaaatgtaaaattgctccatgtcagcgaaccccgttacacattgtccccgccttcatgccggcacagcaccctctatatggagaaacaagctatccccggtgagccgacggtcttttcggaaacctttgagtacacctcgtgtgccgaatggcatccgttgaagcccgggaatattctgccttatgacactgccggcgctctttataaggaatatactaccgaacgggaaacccatatccgcttcacaccccgcatcaaggagctggctgccaatctgacagtcggtgaaaccaatcctttgttgaaggcacagcgcattttccgttggataaacgatcatttcccctgggcttcggcccgcgaatattccactattgagaatattccggaatatgtgctcgacaatcgtcacggcgattgcggtcaggtgagcctgctgtttatcaccctctgccgttgcagtggcattcccgcccgtttccagagcggctttatgatgcatccgcgtgcctggaacctgcacgactgggcggaagtctatttcgaaggcgcaggctgggtgccggtagaccaatcgttcggtattcccacatttgctgacaatcccgaagaaaagatgttctttatgggaggtatcgactcctggcgcatgatagtcaacagcgattattccatgccgctggtgccggagaagaaatatccgcgtagtgaaaccgttgatttccagcgtggcgaggtggagtgggaagggggcaacctgtacttctcgcagtggagttatcacatggatatagactatctgaattattaagttcgttttccataaaagacttaagcgttttccggaaagacttaagcgtttctcaaaaagactttagtctttcgagggaaacgtttaagtcttttttctgtcttctaaatccttgtgtgtcatgcaacgaatgctaatttgtcagtctctgccgttaaccgctgttaagctccgcagactcactgttaaaagagaacaaaaaagagtgacaaggagaataacagaatgatttttgtcgttattttaacgtcgtaaatgttaaatgaaagtagaatattaacaattaaatgaataaaaagaatagtatgaaacagacaacaaaaaacattctcgggataggagcagtagttcttctcagtgcaggagttgccggagtgacaacctatacgatgttgaagccggagaacagagacagcctgtcgtttaatgaacagttccgtcagaatcccggtgctcgcttggctgcttatgacgccattaatgcccagcctgtagatctgacgcaggcggcggaaaattcgcttcatgctgtagtacatataaaatcgactcaacaggctaaagaacaaactgtgaccgtacgcgacccgtttgcagagatattcggggatattttcggtaatggtggcagacagcagcgccgtgtacagacccagccgcgtgtcggcttcggttccggtgtcatcatttccaaagacggttacatcgtcaccaataatcacgtgatcgacggtgcggacgaaattatcgttaagctgaatgacaaccgcgagttcaaaggtcgcatgatcggtaccgacccgaattcggatttggctctggtcaagatcgagggagacgatttcccgaccatccccgtgggcgattctgatgccttgaaagtaggagagtgggtattggcggtaggtaacccgttcaatcttacctcgactgtaactgccggtatcgtcagtgccaaggcgcgtacgctcggtgtgtacggcatcgggggagtagaatcgttcatccagacagatgccgccatcaatcagggaaacagcggtggagctttggtgaatgcaaaaggtgaattggtaggtatcaatgccgtgctttcttcgcccacaggcgcttatgccggatacggttttgccattccgaccagtgtgatgaccaaagtggtcagcgacctgaaacaatacggaaccgtacaacgtgcgttgctgggtatcaagggtacttcgcttgcgggtgacggtgatatgatgtccgatcagccgatcgacaaatcgggagccacactgtccgataagcgcaaagagttcggcgtagtggatggcgtttgggtacgcgaaatcgtagatggaggttctgctgccggttccgatatcaaggtagatgatgtcatcatcggtatcgatggcaagaaagtgcagaactttgccgacctgcaggaagccattgcacagcatcgtccgggcgataaagtgaccgtgaaggtgatgcgtgacaagaaagaaaagaatatcaatataacattgaaaaacgaacaaggtacaacaaagattgtgaaggatgcgggtatggagattctgggcgctgccttcaaggagttgccggacgacttgaagaaacaactcaatctcggatacggcttgcaggttaccggagtcacttcgggcaagatggcggatgccggtgtgcggaagggtttcatcatcctgaaagccaacgatcagcctatgcgcaaagtcagcgaccttgaagaagtgatgaaagctgctgtgaagtcaccgaaccaggtactcttcctcacaggagtattcccttcaggaaaacgcggctattacgctgtagacttgactcaggagtgatttagctgaaaagtgctgtgccagaactcaccacagagcagcacagagcagagtatcacagagttttttactacgaatcaacaacttaaaatcgtctctgtgttactctgtgtgctctgtggtgagtatggccataccagcgaatcgcctgccgaaaaagtattcggtagcttaataatagctaaggaaatcgaaaagagggtaccggcaatcaaccagtcggtactctttttgtttatattagtagataataatggtgaaaaagttgtgaaaatttatacgttaacaaataaatagtcgtaactttgcactccaaatctgttttataagaatgagacaactaaagattaccaaaagtatcactaacagagagagcgcttctcttgacaagtatttgcaggaaatcggtcgcgaggacctcattactgtagaggaggaagtagaactcgctcaacgcattcgtaagggtgaccgtgtggcattagagaaactgacacgcgccaatcttcgtttcgtcgtatccgtagctaagcagtaccagaaccaaggcttgagtttgcccgacttgattaatgaaggcaatttaggactgatcaaagctgccgagaagtttgatgaaacacgtggcttcaagtttatcagttatgctgtatggtggattcgccaatctattttgcaggcattggcagagcagtcccgtatcgttcgccttccgttgaaccaggtcggttcgttgaataagatcagcaaagccttctctaagtttgaacaggaaaacgagcgtcgtccgtcgcccgaagagttggcaggtgaactggatattccggtcgacaagatctccgatacgctgaaagtatccggccgccatatctcggtggacgctcctttcgttgaaggagaagacaacagcctgctcgatgtgttggtgaacgatgattcgcccatggcagaccgttctctggttaatgagtctcttgcgagggaaattgatagagctctttctacgttaaccgatagggaaaaagaaatcattcagatgtttttcggtatcggacagcaggaaatgacattagaggaaatcggcgacaaatttggtctcacacgtgagcgtgttcgtcagattaaagaaaaagcaatcagaagattaagacaaagtaatcgtagtaaattgctcaaatcttacttgggataagcaaggtatatcagtttccgaaaaagtatttaaaaaacgcttcatcttttggtgggcgtttttttttgttatctttgcgaagttaaaaatataacagaatatgaaatacgtaaaaatactgtttgctgtggcattggtgtttacattgtgctcggcgttttcgttgaaaaaagggggacataaacccgtttatgcctttggggtatcggcttcatttaccgatacggtgatatactacaccgaaattcagatgcttgacagcgtggcgctggataaaaacggattcctgccgcatagagaactgtacagttatcagttgaagaattatctggaattcgataaaggacttcctaaccgtacttgtatgatctatttctcggaaaataaaaagaaattaggaaaagaggccgccaaggttgtggggaaattcaagaagagtaaaacggtggctgtcgagaaaatagatcctcagaatttccggttcagtaaaccagaagagtaacttatacgttatataaaatatagcaaagagatgccgtttgtttgcatctctttttttctttattataatatctctggataatattaattcatgaaactgaaaataaccttgtattccgtatgtctgcttatgctgcttgctgcctgtcagcaggatgggccgacacctgaaccgagtgtaggttcgcgtaccgtgttagtgtatatgatagcccagaactctttggcaccgttggcctcggccgatattgaagagatgaaagagggaatgcggcaggttgatgccacatccggtaatctgctggtgtatatagacgattattcggctccccggctgattcgtctgggaaaagacaaaaaaggaaaagtggtggaagagaccattgaaaattacccggagcaaaattcagccgatgcaaatgtgatgaaaaaggttatatctactgccttcaatcaatataaagcggagaagtatggcatggtcttctggtcgcacggtgagggatggataccttctccggcaaagacacgttggtttggtcaggacggcaataactatatggatatagctgatttgcacgcagccttacaggtggcacccgacctcgacttcttgtttttcgatgcatgttttatggaagctgtagaggtggcgtatgcgttgcgcgactgcggaagttacctgatcagttcgcctaccgagattccggggccgggcgctccttatcagacagtggttcccgcgatgttttctgccgaaaatgcagctttgaagatcgcttcctgctattatgattactatcaaagcagatataatgacggaatcggtatgtccaatgaagattggaccggtggtgtttctgttggggttgccaagatgagtgaactcgagaatctggctgttgcaacgtccaaagtgctgcccaagtatatcaccgggaaacagaattttgatctttccggagtgatgtgttatgatcgccgcactgataagcaatattattatgatttagaccggttcatctatcagataactgcagggaacggcgattatgatagttggcgggaggcgttcgataaggtaatggtttactggaaatccactccccgcaactattctgcctacgccgggatgttcacgatgaatcaggatgcgaaagggctttctacctatattccccgtatgtccgctccgtcgttgaatacttcttaccagcagactgaatggtataaggtatccggttgggcggataccggttggtataagaattagaaaaagcaaagaggtgtgtcatctgtggtgaatgatgacacacctctttgtttatcagataaactctccttcagcgttcacctttactttcacttccaattctcctttttccagttcaaccagataatattctccttcgtcgggtgtttcaacaaagtctgcgtcatcgatttgatatcccgcatatttctctgaagaagcgatcgcatgggtcactgtttccggtagttcgttgcggcgtacgtcccaagaagtagatatccattcgttagagctgttgaatacaatttctttactgatattaccgtcgatgatgtctacctcagtcatcccgtgctccacttcgatctctaccaggcgtgcgtttggatattgctttttgataaaggtctcaatggctgccggaatctcggcaggcagatagttctctgaatcgttgtccgtatccgcaacgcttttcaccaggataccctcttccgagtaatacaggtcgaattcctgctttccggactctacctcgatgacgtataccttctccatgtccggacgttccaacatgtccacatcgtctactttccacttggcgtattcactgctttcgaatgcactcttcacagctgccggcagagcctgataagggaggtcggtctctgtcatttgccatattccgttcggagtaaaccaggccgaggtttcgtagttctgttgacggaattccgctatgtaatagttgccttttgtttcccacttttcgttgctgacagacggatacttttcggtaaatgcgtttttcagttccgtgggcacggaagacagatgatcgtcatcgtcattacagctttgtaatcccagggcacccagtgctagaagaagaaaatacattttcaatttcatatctactatacttttttagttatcaatatcgattaaattaaatttagagtcaaattttagttcccaaccattggatagtttcacttcataatccgttttatcgcgttctattttcagaactttagcgtccggataattagtggctgtatatttttggataggagaggggatgatgccctgtggcactacactgaatttgcaatttacttcagtccagtttcctttcttgtcgaactctactttgttgccgtcggtgaagatgacatcgtagcttttctgtaagaagtcgctttcaactttggccatggcaatgttgctgccggcaaagtgttgtttgatgaactgctgtgccttctgcggcatctggcttacttgaatcggtttatcatcgtccgctcttgcgatggtttgcagagtgaacaggcatacgaataaaagaagtaactttttcataatcgtcttttttttattggtttttatttttagcaattaatttataatgcaaagatgaaggtcgattctgaaaagaattgggaattctctccattttgatacttttttctaaataaaagtttgattactcttgttcatccggttggacttatactgtatatttacacaatatttaacgctgagcgggaagtccttctcgcaacaggtatgaaaatgatttgtacaggcaggtgtgccggggagtcgtatccaccacagattacacgtgtttgcgcagatgaatgtcgccggttctcagtggattaaattcgttctgtgttaatctgcgtaatctgtggtgaaattgttcttccgcaattcgaaacagtgttcatctttctcaaaataatacctgagtgtgagatgctgtaatttgcagatggagtcggctatggcaagtcccagtccggtcgaaccttcctttttgcttccctgatagaatcgttcaaagatatgggtcgcatccagggggcggcctgcaccgctattcctgaaggtcatgctatgaccggttatttcaatccggatatgcccaccgtctacgttgtgtacaaacgcatttttgagcaggttcgttatcagggctactgccagcgattcattcatctccgcccggaatattccctgttcatccagcgtcagctcaatttcccgatagccgtatacttctttataatcttctatatatcgcttgagcatgctgttgaactctaccgttcgggtatcggagaattgtccgttatctattttggacagtaacagcagcgatttattgagcttggtgatatgctccagggtctggtgcgtttttatcagctcttccaactgtgcttcagacaaggagtcgtcttccatcagcatttccaggcggttccggcagatggccaacggtgtttgcatttcgtgtgaagcattgccgatgaattgcttttgctgttcaaagatgtgctcgcttcgttccgcgttgcggatggctgcctcgttcagcttcctgaactccgtaatttgcgtttcattcttcaaagggcgattgggacgacctatcctgtaggcatccagccagcgcagcaggttgtaaagtggcttcatgctgcgatgaaatatccagatgcagacaatcaggatggtgagcagcaggacgatgtacagaaaaataatccatcccagcatggcgtctttcaggtcgtccttctcgatcgtcggtgtcgatacggtaagctcgtaatattgtccttcgtcatctttgaataaggtggtcagtatgcgtgccggttcagtctcttccttctccacaatatagaccatggagtctttgtagcagatatcttcgcgttcgtcggcatactctttgcttacttttctaagatagtattgattgttcgacccattgtttttcgagggcagttcttctccggccagggcacggataatgatggtttccgagtaatcctccagagagtcgtctacttcgtcgttcacttcatctattacggctatatagaaaaatacagcccatgccccgagaacaactgtcagcatgagtgcgatgcggatgataatgcggtatatcaacttcatggaggtagggtctttttttattcaacagtcattttgtagccgaatccatatacagccttcagttctgccaaggcaccggcatctttgagtttctttctcaggttcttgatttgcgcatagatgaaatcaaaattgtctatctggtcgatatgatctccccacaccgattcggcaagcgtgtttttgtttaccagtcgtccgggacggttggcaaagtagagaaggatatcatactctttgcggtttaattctatttccttgtcatctacgaatatctggaatgtatcgggaacaatacgtatgttggccaggcgtatgtccatttctccgtcgcggcgctggcgtcggatcacacttttgatgcgggcatttaattcggccaggtgaaagggtttgggcagatagtcgtcggcacccagttccagtcccagtactttatcgtccagggagtctttggccgagatgataattacgttttcccgtttacgcatctttttcagttgctccagcaggttcagcccattgccgtcaggcaacataatgtccagcaagacacagtcgtaatcgtagtcctctatcttgcgtaatcccgactggaagtctgcggcagcttccactacatagcgttctttttcgagcgaacgctggatcagttccctcagtgagggttcgtcttcgataattaatattttcatagggctttttatttctacctgcaaagaaaaggcttatttctgaaataaaactgaaaagaaaagccattttatttttctatctcaacagaagtgtctaattttgtttccaataaacaaaaataacacgagtatgaatctctaatactataatttatcatgttgactcaaattatcaatggacgcatatttactccgcaaggttggttgaacgaaggttctgtgttgatgagagatggaaaaattctggaagtaactaattgcgacctggcgctgatcggtgccaatctggtggatgccagaggaatgtatattgttcccggctttgtttgtatgcatgcccatggtgggggaggacacgattttacagaatgtaccgaagaggctttccgtacggcgatagctgcacacatgaagcacggtgccaccagctttttcccgacactttcttcttctccgttctccgaaatacgcaaagctgtagatatatgcgaaaaactgatggccgaacccgatagcccgatactcggcttacatgtggaaggcccttacctgaaccgtaagatggcgggagaacagtttgcaaaccaagtgaaagaagtcgatgtggcagaatacacctctttgcttgaaagcaccgattgcatcaagcgttgggatgcctctcccgaactgcccggagcacttgactttgcacgttatctgaagtcgaagggaattgtaggagctgtttcgcatacggaagccgaatatgatggcataaaggaagcatacgaggcgggatttacacatgctgcgcacttctacaatgcaatgccgggctttcataagcgtcgcgaatataaatacgagggaacggttgagagcgtctacctgaccgatggcatgactatcgagctgattgctgacggcattcatttgccttccactattttgaaactggcttataagctgaagggtgtggagcatacttgtctggtgaccgacgcgctttcatatgcggctgctgaaggtaaggcgatcgacgatccccgtattattatagaagacggtgtgtgcaagcttgccgaccgttcggccttggcaggtagtattgctaccatggatcagttggtacgtacgatggtgaaggctgatattcccctggcagatgccatacgtatggcttctgagactcctgcccgtattatgggagtttatgaccgtaaaggatctctccagaaggataaagatgcggatattctgattctggatcgtgatctgaacgtcaaggcggtatgggctatggggcagttggtgaaagagtcgtaaatagtgcactgcggattatataaatttactgtagtcctcttatgtatgttatttgtaagaagggctttcaatagaaattgttagtgtcgttactattcttattctatactattcttattctattcttataaatggaagggaaggaggggaagaatagtgacgactcactttaatcagatggatagtccttatttaaccaatttattactatatttgaaaacaggattcaagtataaaacctgaatcctgtagttttctatttacacaaaatgatggacagtgccatagttcaattaccgttaattttcaacttcgtctcttttaaaatcggtatatctccttatcctccctttttctctgatcgcctctctatttcctgaaaagcgaccctacagcctccttacacggccacccttttacttttaaaatcaagaccctttacctttaaaaccaacgctttcttggtttaaaatcagcgagcctttggtttaaaaggtaggcttttcccgtttccgtccccaattttgcttgtgaaaatattgtataactaggctttccggatcgcaaatgtattcttccggattgcaccggcacttgctttaattgcacctatacctgctctgattgcatccatacctgctctgatcacaactatacttacttc

SEQ ID NO: 5087 - DNA, 19472 bp, Unknown
  gut microbiota DNA sequence
atatagaaaacataagactagattttcagaaatgtgtctagtttagtttttgtgttgaagggcttctacctcagaggaggatttagaagccctttctattaattgattatcaaccacttataaacataattaaactatatttattttcattagtacctgtattagaaagttaaaaacgtcacttttgacgctattttattgctgttttattgccgttacattgccgtagcaataaaacaaaaacaaaaataatctaattacaaagaaattatggctaatctattcataactatagtgtcgacaaaaaaaatgttgaacggcaaacacaaagtacggattgccgtatcccacaacttagcaaccagatatataccaactaacatcataatagatgctgagaatgaattcaaaaacgggaaagtagtaaaaagacctgataaggacatattaaatgcacgattaaagaaaatatacgatatgtattatgaacgttgcatgaaaatagaatatgctaatacgttgacttgcacacaactgatcaaatactgtatatttgcagaatcaagataatacggacataattcgaattattttggtttgactttagtgagggggtggttcccctcactttttttatgccggtaccgaacttatttctaattagtcagtaatacattatatacagcctctactgtgtagttgagtgtgcgttgttgagcgtggaaggttgtataaggcatcgcttaaaaacggtgcctttattctccgcactaatttgataaaaccgatcaattgcagagtgatacaacgcggccgaatagcgatcataggcacataagaatttgcctcatctccaaagagttagggcaattgatattaaacttaacttcctacttcaaatccataatcagactatttcctaaagcaatagaaaaaggtcttgaggtatcttcccaaatgtaaacttgggctacaaatccagcatcaaaagattctattgattcatcttgaggaaattcgacaatataatagacttggcctgacttggccccataaaacgtactaaattcaggcacttctttttcttctgctggagtcaaatagcgaacccggtgcttcgaaataatcggggcaccattttcaattaaatactcaggcgctttcttcttcaacgtttcctttgcaatccgaatcaatgtactgtctcttttttgaaagggcaaggacctcagagactgagcgcttgaataacatgctacaaaaagaagaaaaataaacatcaatcgttttaaaaataaagttttcatatacatattaacttagttatttcttaggttggtaaatatacatttttttggggtcacttactttatgtccaccaataacataataatcatttgttcgaggatcttttgtaccaatgtaatcataaacaatgattggaatcctatttttatcagcattccctttatcttctttagatggacctacttttcttttcatgccttttatttcagtcattggagtgtgtgtatgaaaagaagcaaccacctttgctgtggcaggcacaccatttacagaaggggatttgtctccaaggcttatattccctcttgcttttccgtcattcttcactgctataccatatcgtttcttacctatataatattgctttttcaccggatcataataaatccagaaaccgacctcttgcctctgatcttttgtggaacgcttaagcatatcactccaggcttcttccaaagccttttttacagttgcatccttaatgacttcttcaggtttaggcaaagagcctgattgctgtggcgaagataacgaagatgaaccgcctccttgaggagaaaaaaagtcatcaagtccgggaagggctttcggagactcagaaggcatatccccaaaaggccatttaaacgggtcttcagaagatgtaggacgtctaccgattactgtcacttcgggtaacgaaaaaccggcaccaaaaagatcgtctttaacaaaggtgttattttcaagaatttccgtattcgtttcgcggtcatgattaaacagagagcctgaagaacgggtacgagtcagtacatcatccggaaaattatgcaaatatccaacagggactctccgggcaccatcaataatccgtaatatttttaaatgttcttccaaaaaggaatcaaagccggagtattcctcaggaagtcttaccatgtacaaataaacatcattcgaagcgcgtgctattattaaataagagcatgtatcagctgttatatccactacagggacgtaatatgaaactgtatcgctccgctcccttataatctgcgcagcatcccagtccggataagcgtaaaggttccgtaaatccggattaatatttaaaaattcatttaactgattaccagcaacctgcattgtccatttttccttatcctgtttctcctgttgaggttcctgttcttcataacatgaacagagaaacagaaagggaagtattgtagcaatagcatacaataacctttttattctcatataaaacaaattattaattaatactacaaatcttaatacaagcgcttgatattaataatacaattcatgttaaaaccatactcaaagcaaagcgcaaaaagaagttaaaaccttatgactcttttaatagacacaaaatagcgttaacatagatttattataaagacagacatattgcatcagttccttattggacgaaagcaacattatctaaacagtaaatgatagcatactctcttaaacggagaaaggggccggataaatattatcagccggacaagtaccagaaaacgtacaaatagacattatctttccctaaaatatccaagtcagcaaatcaaatgccgcaatgctttgttaaggtacaactcaaatgaaataaaatgatgaaaagaaaacttgaaatacataagattgacgtatccagcagtttgccgatcccatacgccgatgaaggtatacgggccggtttcccgtcaccggcacaagactatatggagcaagccatagatctgaataaagagctaatcaaacatccggccagtacattctttggacgtgtagtaggtgattcaatgcgggatgaaggcatagaagaaggagacattctggtcatcgacaaatcactggaattacaggatgacgaccttgccgtgtgttttattgatggagattttactgtaaagcgggtacgaattgaacctaatgccgtctggttaataccggcgaatccgaaatactccttgattaaagtaacaaaggagaatgaatttatcgtctggggaatagtgacctataccatcaaaaagaacaggagaaaaagataatgtttggactaatggactgcaataacttctacgcaagttgcgagagagtgttcaatccggctttgaacggtaagccgatcgttgttttaagtaataacgacggatgtgttattgccagaagtaacgaagcgaaagcattggggattaaaatgggagttccggcttatcagatcaaagatgatattcagaaatatggtatatctgtcttttcatcgaactatacgctatacggcgacatgtccggacgcgtgatgtccatactggcagaacaagtgccggaaatggaagtatacagtatagacgaagcatttcttaacctggaagggattcgggatattcagtcactcggaacagacatcataaacaaagtaatccgcggaaccggcatacctgttagtttgggtatcgccccaacccaaacactcgcaaaggtcgccaataaatttgcaaagaaatatcctgcttacaatcgtttatgtatcatcgatacggaagaaaagcgcaccaaggctctgcagcttactgaaattggagacatctgggggatcggtcaccggcaagttgccaagttagaaaagcagggagtcaaaacagcctatgactttaccgagttgcccgaatcttgggtgcgtaagaacatgactgtagtcggagaaaggacctggaaagaacttcaaggcatttcctgtattgatatggaaaccacaccaccggccaaaaagcagatatgtacaagtcggtcattcggcaagatggtggaggacatcgatacaatgtcggaagcaatcgccactcacgcttctacatgcgcaaagaaactccgacaacagaaaggctatgcaatgtcactaatggtattcatccatacaaataacttccgtaaagattcaccacaatattggaggaatacagttgtacatcttccagtaccgaccaatgacacattagaaattgtacattatgcactggccgggctaaaaacgattttcatgcaaggctatcaatataagaaaaccggagttattatcaccgaaataaccgatagcacccaattgggactgtttgattcagtagatcgcgagaaacgtgaacgtcttcaacaaacaatagataagataaacggtaaacacagccgactcgtcaaattagcgattcaaggtacagggaggaattggaagcttaaacaaaaacagctatcagggcattataccactgacatcaatcagattataagcattaattgtacttacccaactgcatgtcaacgaaaacaatatagctgaactttcgtaagacggaacaagcactttagatagaatccgatacataacctacctggaaaattgtactgttccgcatataatttgagagaaatattgtgaaagaaaaaggctgcttaacgtatcgtctcatccatccaaaaagaagagtcattcatgatatgaaagagtttccctcttttctgaaaatagtccggatgcgacaatatcttctctcttaactcatcagcgctatccaagctttctatctgattatcaaaaagcatattagcagacacataagttttgacacagagataatccaactcttttattacgacaccaaagaaaattccggtcttagtatacccgacaaaaccctcatgtcctttattagagccttctctgaaatcaaaagtaaagagaccgctatttaaaaagaaatattttatttgttcatcaaaagaaatcccttctaagccgttgggtattagctgacgctcccgataccttttccaaaaatgaggtttaaagtcaattatagacagattactatatatatttttaggataaataattcccataccccaattttcatatttaaggtaagggacaataccgggacattttctctcattacgataacgagccaacattatcacattccacatattacccgatgacgatttccatgaaaactgatgtataaccggaaataggacagctttaataaactttcggtagttactagccttattatccaacattttttcataaaaagccggatagtcattctttatttctttacacacctcttcggtggtcatggttgggacaagcatcgcatacaaatttggacaaagataaaaattaaaattcgttcttatacattttttcacatttttcttatcactttttttaatcatagccacccgtatgttttaccttaaaaaaacaccaacaataaaaaagtaataatagtaaagaagatgaattataatcagaaacagacctttaatcattattcatggttattacttatttagacaacggattagctaaaaaatattgggtaactttacttttattataaaactgcagaatcttattatcattcagtttatcagggtcaattccaccatcacgatatttcgcgttttccggcttatgaaaacctaacagattccgatccgtatatggcagccaatcattccctctcaaataagtatgtagttgccacatgaactcggtccatcccactccaccggaagcataagtcatgttactagaatgaccatatcccatacagtgcataaattcatgtgtaattgattcccaaccgctaaaagaagcataatgaccataataattccagtgagttactccccacacgtttcctccgcccaaaccgccaacagagggtttagatcgtccacaaacaaagttatgcggttgtttgaaacgtttttcttctgataaatacttttccggtgtgaacttaacacggttattatcataaagttctccaccaaatatcttactaaaatttctcatgataaaagcatactcgggagtagtcatcatataggcataatttgtaataatgaccacccactcacgtgcatagatggcactcaactcgcgccatgaaccactttcataccccggtttccaatcataatttgaaaaagaaatattccactccgcatctattttagaaagcatttcaaaatgcttatcatcgctaagtaaacgaaatttcattctcttttcgttcaggctcgaaagggacagagtatccacaccgttatcctttttatatatgaaatttccattgatcaacgatggcttaaactcaaattgtgagaatcccggtatggagtccagataagcaataggaacatactgggaaccaccttctacatagacttcaagtgtgagatcataaaccgtcttggcggaatagctggtaattgaaagcaattgatcatttgcttttctaatttgaaaaagctcattcactctgaaagagcgcttgctcttatcagttacaactgaagtaggttcttcaagagacaatattttccgggcatattcagccggaattttatcgtacgtaactgtatcgatcttaaaaccgggatcatctgatgtcatcagattacgcgtaacggaagttggaggaccttggtcaatatccatttcatcgcaagagaagacaacacacaataaacataacgagaaaaaactaagaatacattcagaaaaatttaaaatcattttcatactcaattgtttttaaagataaatatataattaaaggtctgttttttttaaatccgaacattcttacacttttaattcctttatactataaaaacatttgaagcaaggggcatactaacccaaaagaggttaaataaaaaggtaaaaaaataaataattttatcagtagttttaaaataagatacaatcatgaagtggttgtaaatcagcatcatcttactactgataaaaatgaaatctaatatataattagatggaaaccttgtaatctaaagaatattatgaaaagaaaggcggcctgataagccgccatatccgttttacaacggtactagaaacatcgataccgctattatatcctatttagcttctcaggatttacttctgaaaacactgaacaggcccccggtaatccatacggaaaagacaaatggtgccgttaaagtcactatgcccatatgcatacccgttaactgcagaacgatagacagtatgatagaaaatatcgctttgactactcctatgcctgtcttatctcccaaagctatggcacaaagtactccgttatatcctaataatcccaaattccatgcagcaagatcagtatgtggatataaaatcataaataaaggaagtattgcaccggtcagtgtatacagagcatttatacgagaattaatcaggatccctaaaagaaaaaataatcccgaaagtatatttccctgaaacatcacctgaccgatatttaagcagaatgaacggaaaatatccattgttagttcaggcttttccaacgatgaagataacagtaaagaagggtatagataatgacacccaacaagcagaagccatacaacaaaaataaagggtgctgtcagtcccgatactctgttctgataacgaaaacaacgcgcaacccatgtggagaaagcagagcctgagataagcaataatatagatgtaacattgatttccataaagactccaattgcaataccgaccaatgtcccattaaaaccatacaatccgttactaatatcctccttatcatatccggataatgaagctgttaaagtgctaacgactgtaccgagtacagataaaactgcgagttgccatgaattaaaagcaattcctaataacatcaacccaccggagagagcattattctgaaacatcacttgcccaattccacgacctaatattaaaatgtttttatacatatgtaattgtttttatgctgcaaatgtatataatgtcagccgaaaaacaaaacagggatatttatcacggaaataacattttaagaatcaatatcttacaaatagaggcagccttatcggggccgcctctgttcataaatacaaagtacattcgaatcttttattccgtctttaatcctttcttgtccagataggctttaaaccgatgcagatattcgtctgatggtccgtcaaaaaatgaaacaccggatgcaccgttatcaaatgcttcatccaatgctttctcaaaatcgttctttatatcgggaaacatcagtccggcatacactttcgcacgtccgtcaacggtcttaacactctcttgaaccgaacgcccgatccattccggtccttcgtaataaaaaccattatagatcatcgggaaataagcatccagcgaccagttaccccaatcctgacgcaccattttcttggccatagaaggcccggggaatacagcagcagaaattgctttcccatcggctttcaccgcttttgttatttggtcgacaacacgactgatcgcatccaagcggaaattgatccatgactgatcttccatcgggtactttaactccaacggatcacgccctgtttgttctttaaatttagtacggcaaacatcacaatagcaataatcatattcaggatgttcacttgtctgttctattccataatttttccacaagctgacaggcagaactacatccgggaaacgaacatagtccaaatgtactccatctacatagggtaaatgagctatcttcacataatcatctgccaaatattgggccactccttcatgattgggacaaagaaaacgataataatccacataagcaggcttatcatgcgtagactcccccttacgattcaccgcaaaccaatcgggatgtacgttgagcaattcggcacgattcattgtccacttccagaaatgagcttcaagaccggcttccttacacatgcggtataggttttcatcatatccttcaaacatcaccccgctgatgccgcactctttaagcagggcaaaccattggcggtaatccgcttcacttttactcttatttatacgtgtccacacccagttcttcacttgacgcggagcaaccttttctgtccaaaaccgtccctcattattaatgatgtaacgtctgccttcacccggaacagtaatggctatttgatatgtattccgagtggcttcaaccgagatttgcgcaccttgcgggagacccttcaattcggcatctgtcaggaagaaatcctgttccgtacgcagataatttttctctttcgcatacctttcctgttgtacatagaacatagcccaaagcagtttatacacagaagcattatacggtaatgcaaaagtatgttcgggtgttcctactttctcgtcagcaaaaaacaaatatccccaacgatccggcatatgcatatccacttttccggtaggtgtccaaacccaattttcttcaggtcctcctgccttcagccattgtacacgtgaaaaattaattcgccagcaattaccagctttcaatggattattgaaattcatagtcaatgctttatgtggaatagccatctccacactccaatatttatctttgtccttcgacttattcagcgtaccttcgcgatgaatggccaactttaatcccggacaatcccattgtaccataaagtttccaccagaccgataaggcctgtccagcattaggtcgaatatgaccccacgcgcgttggtttctatttcaaaatagttgtgcccgtcccagtcagtatctatgaaaacctcaaaatcattatcataataaataatagtatcccgctgtgtaagacgtgccttgatatcatcctcctgcaacatcgcccctatataaagatattcatcgtcccacagcatcttggccgtagtttcatatttaggtgtaggaaacccctccccgctgatatctacaaacggagctgtcggttttgccttctgccacgaaacttcatccagtttgccatctattttcagtttaccatccgtacgataacacacatatgaacgaggttcagtcaggaaacgcccgtatttctgaaaaatactttgtgcaccgacaggcaaactaaaaaagaagaaaataagaaaagaaaacttcatagctaaaaaaacaggttgtatttgcttcattattgattaattttagttacagtttcaaagatatgaattattctgaaacctataaagaattcaacctataattataattgcaatgaagcgaatcataaaacatagaacacaatgcttttatttcatagccaaaagatttctcaaaagccggaaaattataaagaaatgtccctcgaacacatctccttggcttttgtactgatgaaactaaaacgccccggctctttcgagtcggggcctgacataaattaagttgtgtgctttcttcaaagattgggaaactatctattcagtatattccctctttcattcaagaatacagcctgttcatgaaaatcactcgacaatataatcactttgtagagtttaccctccgaacgactataagcaataaaagcttctttaatcagtgctccttcgcaggataactcatcaatcaccgcttcaggaagattattaacctcaataggtgtaaagtcttcccgcgaatctctttgttccactttcggggactttttctttagaggttcatctgcttttgctactgaaaatcccaatcccattactattaccaatgctactaatacctttttcataattcttgaaaacttaattgttctagatctactaactataactaaacatctgaatattgttatgcaatgcacatgccagacttgtgtagatccggatcaaatcctcattttcaaagaattatattataacagcctttattgaaatagtggaatacgaagaaatattccacattttctgtagaatttttccacagaaatcaagtgggttacgtacttttgcgaagttacttaggcatccccgtacctcatttctcctccagcttctccctgatacgataaagacgagttatagccggattgtagaaagcatcgggataatgggccctgatacacgataaatcagattctatacaaagttttacatcaaaaatacgctccgctttactcagttccagttcctgaggcaactgtgcagtctgtgcccattccattaattctttcacactctgttcgtcaaacttatattccatcttactcttgtttttccgcaaatttacaacttaaagggcataaaacaaagcaccctcctcatttcctcccggttcaatccctacttatagtgattgctttcttcacaatacctaaatcaagtgattgccccgcaacacagaaccagctatctttgccaatacattaattagtcataattattacgtaagtcacatttaagtgagataagccaatccggccgaagtgattctcccggattccattttgttgagttgttattttaattatcatactgtttaattgttgtatgtaaataacgtattcaaatagaacgaaaaacgtccggcctgtgaaggtcggacgttttttttatttcttatccgcgaatgactttttcagcagctgcattatccataaatagttccacgttatcggcatgatgcgctatataggcggccggtccggtatctcccgaatagaagatatcttctacaaccggacttttcacccttcctgttatcaggaagatgatccttcgggcattcaaaatcggaagtcctgtcaaagctattctcttttgaccgttattcggattaaaattcgcctcatatatatgatccgttgagagcaattcctcctgtccgggaaagatagacgacgtatgtccgtcattacccgctcccagcagcactacgtcaaataccgggaactcattctccaccggcacttctttcatcaccagcttcgaatagcgggcagcctccttcttcggattcttctccccctgtattcgaaacacattctcgtacggaataggtacaatactcagcaacaacgaccgcatcatgccataattactgtccgaattttcgggaggcacacaacgttcatctacccaaaacactttcagtcgttcccaaggagtgatatccgtatattcattcgcccataagtcaaacatcagtgccggagtgcttccaccactaaacgcgatacaaaaggtcctgtccggttcatctaacatcagtttcaccaaatgtaatatcagtgcacgtgccgcctctatggacgaaggaaaaatgtagggtttcatagctcgcaatattgatctgtgtttgttaagttcttgcatggattggtccattcggcaccatgctcatgcatcatagcctcactctccaaaggtccccaagttccagcaggataaccatacaacggcgcctcgggatgttcattccaataacgcagaatcggatcgaagaaatgccaggatgcttctactgcatcactccgtgtaaagagggtctggtcgcccaggatacagtcttctatcagacgggcataggcatctccgccggggacgccccccaactgatcataactgaaatccatcgttacctgtttgacctcaaatccgggtcccggcactttcatgccaaatttcaacacaataccttcattgggctgcaaacgcaatatcagcttattggctctcggacaattaccacccgcgcaatggaacatctgatgaggagtttcacggaaatgcaccactatctcagtcacttttgtcggcatctgttttccggtcctgatataaaaaggtactccactccaccgccagttactgatacccagtttcattgcaatataagtctcggtacgtgagtcgggtgaaatatttttctcttcccgatacccccttttatttccccctgccgtatattgcccccggacaatatgttcactcaaatccgtttcggtcaaaggagtcagagactcgtataccttcaccacttcattacggaaattatccgcattaaacacagcgggaggttccatagcagtcaatgccacgagctggatcagatgattctgtaccatatccctcagtgcacccgtagtatcataaaaaccgccgcgttgctcgattccgagattctccacggcggtcacttccacataatctatataattacggttccataaaggctcaaaaataccattggcaaaacgaaaagctaacaggttctgagccgtttctttacctaagaaatgatcgattcggtaaatctgatgttcgtcgaatacagaagcataaattttattcagtttctcagccgattccagatcatacccgaatggcttttcaacgataattcgtgcacggcctttattcagatgcaccgacttcaggtgcaacggaatcacaccatacaatgatggaggcgtagcgagataaaacagcaggtcatccggccggctatctccgctcagttcttcaatgcgtaggcgaagctgtccgtatccgctttccaatgccgggtctattgccagatagtgaagatgtccaacgaaagcgtccatcttctccttattctgctcttccgacttcacaaatttctccatctcattataaatgtaagtccgatagtccgcatcttcataaaccgtacgtcccaccccgagaatttcaaattcttccggaagacgcttggccacatacaacgaatacaatgccggcatcaacttacgcttcgtcaagtcacccgaagcaccaaagatagtcattacaaatttactcatatttctttttttgcttatacattatacgtacccgactttgtatctcctccgtgtcctgtccagttttcatggaaaaagactcctcgtaactcatctttccgttcaaatgtatgagcaccgaaataatcgcgctgtgcctgtaccagattggccggaagatcagccgacactaacgaatagaaataattcaaagccgaagagaaagccggaacaggcagttcctcacgcatggcttgtgccaccaggttcttccagccggacaacagacctttgatctcttcttcaaaataaggggccagcagcagatgtttaggcttttcttttgcctcaaatgccgcagcaatatcattcaggaaaacactgcgaataatacaaccgcctctccacatccgtgcaatcgaagccagatcgaggttccatccaaatgtatcggaagcacgttgcaacaccgcaaacccttgagcatacgaaaccagtttcgaagcatacaatgccgagaaaatctctttttccgtatcttgtttattatatacagccatcgagtgcctgcattgatattgccgggcagcagcttcacgcagttccttccgggccgacaaactgcgttcaaaaacggccgtagcaatcaatcccagtggcatacctaattccatggcattaatcaccgaccatttgcctgtccctttctgtccggcggcatccaggatcttatcaatcagataggctcctgtcttatctttatggcggagtatattacctgtaatttctatcagataactccgtagtttaccttcattccaacgggtgaacacagatgccatctcctcgttagtcatatccagcagctccttcatcacccaataagcttcagcaatcaactgcatatcaccatactctatcccgttgtgtatcattttcacaaaatgtcccgatccggcaggtcccacccactggcagcacggagtaccatccggcgcttgggccgcaatgctctgcaaaatcggtttcacctcttcccatgccttctccgaaccgcccggcatgatagaagctccgttcaaagctccctcttctcctcccgagacaccggcaccgacgaacagaaaacctttcgactctgccagtttcactcttcggttcgtatcttcataattcgagttaccaccgtcaatcaatatatcacctggagaaagatatgggaaaagttgctccatcagctcatccaccggactaccggcacgtaccatcatcattatcttacgaggcaaagcgatcgattctacaaaagcctctatatccgtgaagccctctatatgcttgcctttagcccttccgttgatgaaacgttccaccacgccttcttccacacccggtaccgtacgattatacaccgatacgctccaacctctgctttccatgttcagagctaaattttctcccatcacagctaaaccaatcaggcctatatctgttttattctgagttgccataattgtaatatgtatctaaattggttgattttttgttctttttcttattatctataacacatatcgaaaatatttgttcggatagtttcagaaaaaagtattacttttgtaacaaactgctaaaacctcgtaatgaagaaaatacacataggacttttgccacgtatcatcatagctattatacttggtatcgctatcggaaatttcctgccgacacctttggtacggctgttcgtgaccttcaactccatctttggagaattcctcaatttctccatacctcttatcattctcggactggttaccattgccatagccgatattggtaaaggagccggacgaatgctgcttgtcacggcactcattgcatatggtgccactcttttctccggatttctgtcctacttcaccggagccgccattttcccttcgctcattactccgggagtacctctcgacgaagtgagtgaggcgcaaggaatcctaccctatttctctgttgccattccacccttgatgaatgtcatgacggcactggtccttgcctttaccctcggcctggggttggcaagcctgcatagtgacgccctgaaaaacgtagcacgagactttcaagagatcatcgtacgtatgataagcgcagtcatcctcccgttgctgcccatttacatctttggtattttcctcaatatgacacactccggacaagtattctccatccttatggtgtttattaaaattatcggtgtcattttcatactacatattttcttgctggtttttcaatattgcattgcggcattgtttgtccgtaaaaacccgttccgcttgttgggacggatgctgccggcttatttcaccgctttaggcactcagtcatcagccgccaccatccctgtcacactcgaacagaccaagaagaacggtgtatcagccgatatagccggatttgtcatcccgctttgcgccaccattcatttatccggaagcaccctgaagattgtggcctgtgctttagccttaatgatgatgcagggcatgcctttcgatttttccctgtttgcaggtttcattttcatgctcggcatcacgatgattgccgctcccggcgttcctggaggcgctattatggcttctttaggcatcctccagtccatgctcggtttcgatgaatcggcccaggcattgatgatcgccctctacattgctatggacagtttcggtacagcttgtaacgtaaccggtgatggagccatcgctctgattatagacaagatcatggggaaaagaaaaactcccgaaagcctctaatggctatcgggagttcaccctgtttggttattaattccgttttataatgtcatagcctgcccgcctattacaccggctacagcacttgccacagcaataatcaacttcaatataatattccatcccgttttcttcatactctttaccctcctttcgttgtcaacaattattacatcagcaataaattttatcaggctgtcggatcatccacaatatctccactacccgatccgccattaattgctccccctatcgcactgactttctggaattccactccctgaagcaaagcacgggtagtgccgatagctgcgggacgagtatattccggagtaaacagacaacgaagagccgccacctgattcggactcacctcttcctcttgatccactccatgcccttgtgtacaagctttcatcgtgaaagtgcctaatccctccagacgtaccgaacggctattcaacaattctttacgcatggcagtcatcaagttacgaatcacattatgaacatcacccggtgtcaacgatgatttttcagctattacttcagccaactgttgtgaagttaccatttttccaactttcaccagagtcaggtgccactgtttctttccctctttagttttcaactgcgattgtctcgctctataaaataaaggcataatttttctccttctttactaatgttactactacgtttcattcatgttttgttgatcaacactgcaaagatgaagatttacaaattatcggcaaaggaaaaaacggtccggaaagcagttttctcaggaaaacttacaacgcgcttattatctgcactataaccctaagctcttcgttcaaaacaggtgcatacacatgtacccaatatcagttaagttttagttcatccgacaaatgcatagttccagtacagaaagtctcacaatagtagtaatatatagatattatttttaaattttgcaattaaataataatactccaccatatatgagtaaagcagactatattaccaaccaagagataatgctacttttagcgaaacgcataaaggagtataggcttgccgcacggatgagccaaaaggaaatggcggagaaatccggtgtgagtcttgctactataagccattttgaacaaggtgtcaaccagaacatgcccctgaataatttcatatcattgttgcggataatcggcatggagcaacgtataagtgatttactgcctgagttgcccatgccaccaatggcactgaaacaattaaataaattcattctcaaaagagtaaggagaaacaataatgatacaaaatcttgatgtgtttttatggaatcggaaagtgggtacattggtagcctataaggagaaatacgtagacaaggtaatcagtgttgtcagcaactaccagcgatatgcgcacatagcaggagttgatgcctattggggtcatcaaataaaagaggaaatcaatgaccgtattgggatgttataagctaaatataaaaaatgggaatatcaatgctatattgaatataaatcatcgtaattattagttaccatttgttttgtaactccattatttttcgactgtaacttcttttattttttagactatattagatctatggtaggaagcataatatagacaatatcacttcgcttgatgcaagcaaaagaaacgcttcataaatagaatatagaccaaactcagcgcaataatggtacccgacaaatacccatattcattccccggaaatagaaaatacccgactataactactgcctgcaccaacatatacaccaacgaaaccaccatgtgaggaattttcagctcatttgccataatctggtacaaatgtttccgatgtggcaaaccaatattctcatgcaacatcaaccgatgaattattgtcagcacactatccaccccatagactgccaacaaaacaatccagctgaaattttccgtacggattatcagcataccgatcagaaagaggatcacgaaagcaatgctaaccgaacctacatcccccgcaaaacactttgcctgtttccggaaattgaagaagttaaagaccaacacagcacaaaacatggtataaatcaaagccggctctacaaatggaacatataccccatttataaatgctaatgccgccagcaccaccaacgagtatccacctgtaatgccattaataccatccataaaattataggcattgataatgcctgtacaaacaatcaaagcaaccacaatggtccaccaaggcaggctgaacaacccccattgatagaacatcaaagccatcgccgtaaaatgaaacaccaaacgtaacccctgagaagtagaacgaatgtcgtctacaaaactgataaaagtaatcaatgtcagagccagcataaaccaaggatactcaaactgattcgtcagaaagtaagctaatgcgccaaagaagaaaatgattcctccccctctcaaagtgatccgggtgtgcgaactccgctcgttcggtttatcgatgatattgcatttatcagcaatacggaaataaaaaagttctgccaggaatagcagaactaagattatcagatagtacataaactattcgttctttttaatgaaataaaaccaaagttgaagtcctaaaaaggcaaaaga

SEQ ID NO: 5088 - DNA, 247 bp, Unknown
  gut microbiota DNA sequence
tcggagctttttcacccaggcagtctccaacgacagccatgcttttagccaaccaataaggaatagatattggtctttttttattcaattgtttacatatcaccatctccaactcacgaaaactcggctggtaactgtcacaaacattatatatcccacccttttctattaacataggaagaagatttgcaatatcctgaaccatcagaacacttttccgggcttttcccccggcaatacttaagta

SEQ ID NO: 5089 - DNA, 335 bp, Unknown
  gut microbiota DNA sequence
aatatcaaaggggtttgcgaagttgttccccaggaggattggagctatgttccgaatctggaaaaactcaagcctgactatatcatccacggtgacgactggaaaacgggcccgttgcgcgaggtgcgcgaacaggtttttgaggtgatgaacgctcaggggggcaaggttattgagatcccttatacccagggcatcaactcctcctcgctcgacaaggatatcaaggcgatcgggactacccctgacgtacgtcttaagtccctccgccgcctgatccaggccaagcctgtggtccgtatcctggaggctcacgacggtctttgcggtctgat

SEQ ID NO: 5090 - DNA, 7620 bp, Unknown
  gut microbiota DNA sequence
aacttgtttataataaatgctaaactgctatctcttaggatgtattgcatgaacagatatataactgaacataccaatacttgacatatcaaagtcatccacagagggagttctatgagagacagaagatagccacaagctaacattattatggaagagaaaacgggtttaatcaaatctttagttctctcaatcaaagagtagttatagactttatcactgataacacatagcataaaattgccagcaaactcgactacaacatagcctattgcaatagcgaacactccgtatggaatcatcaagacgagggatagtaagttgattgccaaaagaatcatctcataatacaaccctatctggcttttccataaagagagatatacttgtttatctacagatgttatgatacctggaattctaagcaaacagaacagacttaagaatggggcacacggtagccatttatctgttaggacaattaaaatcaatggctttgatacaagcgccacaagaagcagaacaggtatcatcacaaatgccgacatactgacggaacggcgagccatctccttaatgtgacttttatcgtcttgtgatctggaaaagacaggcaataggactgatgatattgaagtatttactacttgagtaacaagaccagagtaagtatatgcccggtcataatacgcaagtgtagcaggcttgtaaacctttcctatggtcatcgtacggatagtgtcgcctcctgcacttacaagattagttcctaatatcttaaggctgaaagagtacaatgcttttgcgctttgttttgagaatccaagcctcaaacgtatttctggaagcatattcataaatatgactattgccagaatattcgacaagacgtaacaaataagtgcccatactccacaccctaaataggccatagttataccgatgaccgctgatataggagtggcaagcaaactacggacaaacatagtttggaacatcatttttctctgcaataatccgctctgtatggaattgaaggagtataagaacaatgctatacccattactctgattggccacacaagttcttccatattgtaccacgaattaatcacgggtgccataagaaacaagcctacatacagaattaatgccaccaaaagactaagcgtagtcaatgtggatacatctatctctgataggtctttcttctggacgactgcggctgacagaccacattgcacaaagataccaagatagttgactatagcggtaataatcgcaaggctcgcaaaatcttcaggcataagaagacgggcgaggattatctgaaccaacaaacctattccttgcaccattatccgttcacctgatttccacaataatgaacctattattccattagcctttgccatatatcattaatacaaagaaacctcaatatcaaaggggggggtaaagtcttttaaacattcgtgttgtgtgtctttctcggatagaattactttgtccatcggtatacaccaatcaataccaaggctctcgtccttaatggagatgcctccatctgcctgtggtgcatagaagttgtcgcatttatactggaagacagcggtttcactgagaacagcaaagccatgcgcaaagcctcttggtacaaagaactggcgatgattattttccgtcagctccacagcaacgtgatgtccgtaggtgggtgagcctttgcggatgtcaacagctacgtcaagaactttacctctgacacaacggactaatttggattgagtgaacggaggtaactgaaaatgaaggcctctcattaccccatagctggacatactttcgttgtcctgtacgaatagtattggtttaccatattggggtatagcaactttttcatcaaactctcgttgtgagaaggattcgacgaaatatcctcttgaatccttaaacactttgggttcaatgacaactacgccttcaatggtagttttgattacgttcattacttttcagtattaataatacttaatctaacgatgtcttcatacttcccttcggcattgagagcctcatctttaagaatagcttctgcagagaatcctgcgttcttaagcaattctacttcgtcgggatacttatagaatacgtacgaatacaccttatgcataccatattccgtgaaagctttatcaacaagcatacgaatagccatactctggctatctggtgtccactctgtatctgtactggtgaaaatacacagctcacaacgcttgttggcgtagtccatatccttcagatatacagttgcaatagggtatgctacgatagggaaatcctcattcaagcgttccaccatgaactgcttatatttgccagtcttcacaaaattctcatagaactctttatttgattcttcagtaattgttgctcgactgagacaatggttaatcactctttcgtcattacgccactttacaagatgaactccatcttgcaatgtgattggtcttaatactattttcatatttcaattatcatatttcatcttcaaaagaacgatgacacttgtcctcaataggagtactttatcaactgcacaaatgctatgcttccatttttttaagtcttctcgcaaaatttgcgattaccattggagttatttgatagattgattcatccgtgttttgtttttatcatggggcatagagatagacacttgatttatcagtccttatcccaaaatttgcttaacatcttggttttgatgagtcttgaaaggcaacacaaagtggtttgtaatcaatgcctgcacaccgaatgcggaagacctaccttcatctcttttaaagttacaaattatatccatatatagatttatattataattctcgtgacacactaagcgtccatttttcctcaaaatttctctaaactattatgaaacaaaccgtcaagaactaaaaaaataaaaacattttaactttacattcatttgttataatacccattgtaccactccgcaaacttacacagtccttcacgcaaaggggtcgatggtttgaagtcgaaatcttgcaccaagggtgttgtgtctgcgtaagtgacaggaacatcaccgggctgcatggggacgagttctttgtgtgcctcaaagtcgtattcagctggaagcacaccagcgcgaacgagttcttcttgcaggatggtgacaaaatctaacaggttctcgggttgattattgcctatattatatatgatatagggaggaacgggcaaaccgtcctcacctgttcgtctttcaggagcgtgtcgcatcactctgactactccttctactatatcatcaacgtaggtgaagtcacgcttacagttgccgtagttgaatattttaatagtctcgcctttcacgagtttgttcgtgaaaccgaagtatgccatgtctggacgaccggcaggaccatagacagtgaaaaaacgaagacctgtagatgggatattatatagtttgctgtaagcgtgcgccatcagttcgttgcttttcttggtggcggcatagaggctgacaggattgtccaccttatcatcggtggaatagggtatcttcttgttgctaccatagacagaggaactgctggcatagaccaaatgtgctacctcatggtgacggcagacttccaatatgttgtagaaaccgatgaggttgctctcgatatagctgccggggttagtaatactgtaacgtacacctgcctgtgcagcgaggttgactactacatctatcttgttttcggtgaaaacgttctcaatgagtgctttgtcggcgatgctgcctttgaggaacgtccaatccttagacagactgtctatttccgtcagacgttcgtatttgagattgacgtcgtagtaatcagtaatagagtcgatgccgataactttgatattgttaaagtctgttagtaaccgtttcaccagattgctgccgatgaaacctgcggcacctgtgacaagaatagtcttgcctttcaaatctatattgtattccaacatgaaactaatcccttttaaaaatgtcacgcgtatatactttctccctcacgtcgtccaggcacgcatcgtagcggttggcaatgatggcttgcgactgccgcttgaaggcatcaaggtcgttgactaccttactaccgaagaaagattccccgtccaccagggtgggctcgtagataatggttgtggcccctttggctttgatgcgcttcatgatgccctgaatggccgactgacggaagttatcggagttggacttcatcgtcaagcgatacacgccaataaccaccaccttctccttttcagcttcccaattcgcactttcatggtaatagccggccttgttcagcacttggttggcaatgaagtctttacgggttctatttgattccacaatggcagacatcatgttctggggaacatctgcatagttagccaacaactgctttgtgtcttttggtaggcagtagccgccatagccgaagctgggattattgtagtgcgtaccaatacgtggatcaagccccacaccgctgataatggcttgtgaatccaagcccttcatttcagcgtaagtgtccaattcgttgaagtagctgacacgcagggcaaggtaggtgttggcaaatagcttcacagcttctgcctccttcatacccatgaacaaggtatcaatttcttcctttatcgctccctcttgcaaaagttttgcaaatatcttcgcatattcctctgcatcggaattgccgatagatttaatggctgtattctcctcatcgaactcttttccatcgatgatttttggatagcctacgatgatacgactgggatagaggttgtcgtagagtgccttgctttcgcggaggaactcaggcgagaagagcaggttgaaatgcttacctttcaattctggtttcagctgaaacagatgggcatatttcttataaagcgatcgtgtataaccaacaggaatagtgctcttgataaccataatggcatcagggttcacctccaacaccaagtttattacatcctcaatatgatgagtatcgaagaaattcttgacaggatcgtagttagtgggggcagctatgataacaaaatccacatccttataggctgctttcccgtcaagggttgcggtcaatttcaaatccttttccgcaaagtatttttcgatatactcatcctgtatcggtgacacacgacggtttatcttctctaccttttcgggtatcacatccacagccaccacattatgatgttgtgacaatagtaccgccatactgagaccgacatagcctgtaccggcaacggcgattttcaaatctttgtattcttgcatatcatattgatttttttcacaattaattagttggtgttacaacaactgtaagcattcaatttagagcatacccctttgaaagagcacacaagtgtgccctcagagttttgttaattaattggttttaaatttaacattggcatgtagccaaagcgattttgtcaaggaccatgtaaacatgatccctgcacccgttaaagatatttttgaaaataaattcgatgaaattacaaatagaaataccatgaagcttcactattccaatcatactgtgataagttgcagccatttcagctcctgcgtcactatcgtaatgaagcgaactgtttcgttgagtagtcagctttcgaatggttcgctcaacttcgttatccaaactttttgataatctggtggaatgtggaatcagaatcttaaaggtaaaacaaaaaagaagcggtggcttccgtagcgacaaagacgccaaggactttatggcgatacattcagtcacctatacggcaaaaaagaatcaatattcacgttaggatgccgttttagcattggtccgataggccaatcgataaatcgtacccttacttacgtattcgtatagatgagtggttacttgacactcaaaacgagttaagaatcaataaaagtgaggttcaataatcacaacaccctttatgacggcttctattatattcattattggtcagcagctaattcatcaattacttttaaaaggtacttcccatattggtttttcaacataggctgagccaatttcttcattttatcagaattaatccaaccttggcgaagtgcaatcccttccagacaagctattttcaacccttgacgtttctcgagtacttcaatataggtacttgcttctgaaagggaatcatgtgtacctgtgtccaaccaagcaaagccacgccccaaagtctgtactttcaattgttcttttttcagaaaatactgattcacagttgtaatttccaactcaccacgggcagaaggttttatgttcttagcaacttccacaaccttattaggataaaaataaagtccaacaacggcataattgcttttaggcactttcggcttttcttcaatggaaagacaattacctcttttatcaaactccgcaaccccataacgttccggatcattcacccaataaccaaacaccgttgcttcttgcttttcatcagcaattcgaaccgcttcttttaacataaccgaaaagccattgccatgaaaaatattatcacccaaaaccaaacatactgaatcatcaccgataaatttctcaccaataataaaagcttgtgctaaaccatcaggagaaggttgttccgcatattcaaatcgcactccataatcagaaccatcacccagcaaacgttgaaagccgggtaaatcataaggagtggagataattaagatctcacgaatccctgccaacatgagtacagagataggataatagatcatcggtttatcgaatatcggaagcaactgcttactgactcctttggtaatcggatataagcgagtgccggaaccaccggccaaaacaatacctttcataattaaaacttaaagggaattcgattgatttttaactattggcatacagccataacagttggttgttgattggcagcaaagatatatatcatttttgagccctaatttgagtgcttacagataagtatcttacttaaaaatcattatctttcgttcatccaaatttattcttcaacatactcccacggataaggattatccaccacagtctgaaactcgttgatagcctcttgctgttcggtagtaagtgacaccgaatcccaagaagcgataattgcacgggcttcgtcagccaaaggctcgtcgaatacctcaccatagcaggcggtaagcagacgaagcttcaatagtgaagcgggaagagtatcgaggatatcccagcaacgatctaatatcttctggacatgttcgcgcttttctccgtggtcgatgaacgatgcgttgtaacccatcaggagagcgagacagacagaggcctgttcttcaaccgtggaaccttggataccggaattatacaatgttgtggtcaagcggtaaacttcattgttacggcgggacaagtcatcgctgtaaatgggactcccgtccatgcccaaatacatcaggtcgtgcgcggcacgctgaagggaagctacttcttc

SEQ ID NO: 5091 - DNA, 112438 bp, Unknown
  gut microbiota DNA sequence
ggctatgacaccttgtatagcaatgactacgcgacgatcccgggcacctttcactttcaggaaaacaccttcctgaccctcaaagtcaccacctgtaatacggactttggttcctttggacaagttgagttcatcgggttgaaagtataaaagatggtcactgtaagtaccggctacagcgatgaaacgctgcatttcattgtcggggataattatcttcttgccgctacgggtatcggtgatatattgcaaataagcaaccatagacttgacacgcttcacttcggaaggacaagcacgaataaaaattagattgtgaatgataggaaccaaaacacggacttttttccctttctttatacttatcttatattgcataggaacaaaacagcccaagttctctttcgcaagcaaccgcatagcgtcagtctctcgacgataagtggcacgcatagcgaaccatatttcggtctctttttccacttccattatacgattatttcagaaaaggacattctcctggggctttgaacttcttacatacacttgaaattcaattacttgcgagtactttatgtaatatacggcaagctttgtactctcttgccacggtttcttgtagttactcattacctatctggtaagaaactataaacaaacgaattatactaaaaaaacgtgtttttaaacgttcgtctatttgaacactatttttgtattcatttttttattatcgaaacataaaagcagacagataaaaaagagatttttatccatagatatctatctagaaattaatatattaaggtagaaaggcaagagtgcaaatcttttttttaattaaacattttgctattatgaaaataccccttatctttgcgttcaaatagacgaacgttttttgaaacatctctccttaaacaaattatctcactataagccaacagcttacctctaaaaagaaattaaattccacaatttatcttatatttgtaagtttactaaatttttcgtccatacctttgcaacattttatacaaataaaaatcactaaaattaaaaagattatgaactacgaaaacaaacaacaagaagaaaaaaaaagaattcaaaaaaaacaaaacggtcaacaagcaaatctctgacaatagaaaccttaagtcaaacagaggacgaaaaaaggagaaacccatacaagggattgttttgaaacactacgaatgcttaaagctactaatcacactctatcaagatggggcaatgggtataaaaaaggagacatcacaagttgcattagcacgatatatagacgacaaaaaactattaggaaatattcgaaatggaatattcattccattgaagttcagcactattctaaaggaaacaaacaccatctggaacgaaatgctacgagataaatccattggcataaaatagacaagaaaacacaccatgaattattatactccaacctaatcggcaaacactctaccttcgggccgacaaacaatttataaactttaaaatcattataatatgaagaagttgaaaagcccggcatcacaaagtgaagccatgaaactgagatggaaaaaacggatcgtcttcgagaaaggatacaccgagtcgtgcgccgaatggatggtagaacgacttgaagcactcctggaccatatgcaatatggacatgcgacgatagcttaccgaaaacaaaacgggagtttccaactggtgaaagcaacattgatttactacgaagcggagttccgtaagaagtatgatcccacaaaaatagaaggcgcagtagtctactggaatgtggacgaacagcgatggacgacattccaggtggagaacttcatggagtggagaccgatcgtatagggcgtcaccacagattacacggattttcacggatgaattatttatactttgaggaatcaagtgaaaacgtctttggaaatccggagtaatttgtggtaaatgtattattgaaagtacaaacaactaatctaagaaaacaaatatggcaatagcatacgacgggatcaattattttccggtgggcgtaaacttcatggaagagaacgcaatggaagtgatagaagcaaaatatggaataaaagggtcggcaattgtgctgaaactgatgtgtaagatttacaaagagggatactacatacgatgggatgaagaacaatgcctgattttcgcaaacaaggcaggaagagaggtgcaggcagaagaggtgcaggggatcatcgagattctgttcaccaaaggaatactggacagaaacagttatcaggaaaacggaatactgacttcggaaagtatacagaaagtatggatggaagcgacaaagcgaaggaaaagagagttgtcggagctcccttacctgatggtgaaaccggaaaaagaaaatggaaaagccgacactcccccggcactacaagaaattcagcaaccagagctgttcaaaaaggaaaaaacacctgttaacccgaaaaatgtagtacatcatgtagccgttgacgcaaaaaatgcatgcaattccggacaaagtaaagtaaaagaaaagaaagcagaggaaaataaagaatttcccccctcagctccccccaaaggggagggagaagagcggaagggggattctgcttatctcccgatacctggatacgccttcaatacaatgacgcacaattactcgggactgatggacacgctaaagagattgagcattaccgacaccggggaagtaaactccatactcaggctgtcggactatgggaggaagggaacgacggtatggaaactgattgccaacacttgctggagcgacatcggagccaaaggaagatacctgatagcggcgctaaacaagacgaaaagaaggtagcagagagtgtcagtcccctatttgtagttgacaaaaaagcaagtatacaggcttttgaccagaaagggattcagtgaaacaaagaagtaaaaagtgtgcttaacgaactaaaacacagtgtttttaaagcacaagatttctctcgcccaaagctttgttttaacgctacgttaaagcttgttccttaaatgcaaatagcaagtgttttcaatgcaaaaggcttgttatttgcacacaagaataaaataacggagaaatggcgttaacaatgttaattgagaaacactctacaaacaaaaagaaatctctgtcattctaaaatcaaaagtacaaatagccgtaatcaaattcacaatatattgtgaatttcatgatgaaggtacataactcaagccacaaaaagctcaaattcacaatatattgggaatttccttgcttatcaaacaaatacttagtatttttgtttcaaattcacaatatattgggaatatgaaacaaattggaatacagattcgccaacgaagaaaaatgttgggtataaatcagcaaacacttgccgatttagcacaaatcagtatcaatactataacaaaaattgaaaatggagaaataaatattaattttcaaaagctctatgccatattggaggtattaggattagaactttctctgaaaattaaaaataaggagggacatctatgagacaaggagtcgtatacttgaataaagaacgggtaggcattattacggaattatcttctaacgaatataaatttcgctatgatgacgaatatttcaatgatccatcaaagccctccataagcctgacattgacaaaacaacaacaggaatatacttcccattatctatttcctttttttgccaacatgctgtcagaagggcacaaccgcatcgttcaggcaagattattgcagattgatgaaaaagatgattttggtattttattagctacagcacataccgacacggctggggctgtaaccataaaacctctcgactatgattgaattaacttgctgtccttctactttacaaaagggattctcaacctattcgcctgttgcattgaaagagctgttcaatagccaaaaggtaaaccatatactgccatacaatggcatggacaataatgaaacggaacaaaaagaatttcaggataacaacaaacacatgtctatatccggagctcaacaaaataagtccagccaatgaacacttaaccatgcaaatagcctcgcaagtttacaatattcctacagcagccaatgggctctgtttttttcaaaatgatgaacctgcctatatcacacgacgttttgacattgcacccaatggaagaaaattcagaaaagaagattttgcttctttagccggaatatcaaagggtaataaaggtcccaactacaaatatgatgtattaagttatgaagagatggcggatattatcaaacagtacgtctcagcatcatctgtagaggttctaaaattctttcgattagttattttcaacttccttttttcaaatggagatgctcatgctaaaaatttctctttgttagaaactccttctggagattttatacttgctccggcatatgatttgctaaataccagactgcatatttttgatgatcatgtatttgctttacaacgtggcttgtttaaagagaatacgttaaacggaaatgacggtgcggttacaggaaaagaattcatagaatttggtatccgcatcggcattccccccaaaagagttcataaagagctaataagcttttgccaaaaggcagaacaagtacaagatttagtcgaaaaatcatttttaccgaatcaattaaagaaacaatatttactccattaccaaatgagaaaagattcctatctttcggtaggcattctcacataaaattataccagcttctttttcttcctgtagttttcacgaaactctttgggcgaacattctttctttttcttgaagatccgattgaaattagaaagattattaaacccgcattcataacagatttcagcaatagacatagtagaatcaaccagcaggcgggcagcaaaccccaaacgaatgtcaatgatatagtccgaaagattcttaccggtacgcaatttaaagaagcgactgaaagataccggagtcattcctaccatatcagccagctgattcaggcggatctcttcctgataatgggcattaatatattcctgcactttctgcacacggcggctatccgaatgaatgccgattttcgcgaaggaagaacttgacaacgtacgggcctcttcattgaaaagtgacagttcataaagtatggtcaagaacttgatgacagcataaaacccctgtttctcggatgccagcgtatcgagaaggggataaattttcaggatggcggacatcggaaaacaaagacctttctgagctttctcaagcatatcacgaatagaatcgaactgattcttattgataaaacttttgaagaaaagatcggaagagaactgaatcgttatttcacggatctctttcgaatgacaatcatgttgttcccatacatgttccagatcttttccggtaatcagaaccaaatcataatcactgatcacttctgccgaatcaccgacgatccgtcgcacaccggctgctttctccgtaaagttcagctcaaattcggcatgattgtgaatgggataagtaaactccgttttataccgttcggcaatgtagaaacaatccttatcggacaacggagtgatctcccgaataatgttgctttgtagtgcattcatagctaatatagtattattagccacaaatataacacacttttttaatttctgctattccactcccgaaaatcttctcccgtaggattctggaatacgcgcaaaccaaattccggaacaatggcaagcagatgatcgaatacatcggcctgaattccttcgtaaggtacccactctttcacagcagaaaaaaagtaaagttcgaccggaataccttgttcggtgggctgaagataccgtaccatacaagtgaggttcttattgacatcgggaagacttttcaagtagttggtcagataggcacggaatactccgagattggtctgacgtcgcccattgaccaaaatagagttgtctatgtgatgttctttattatactctttcaccacctgctcggtctgctccacataatcggtcaacaattggattttcttatatttagccaacatttcgggggtacagaatcttacactgttcatatcgatattgatagaacgcttcacacgccgtccaccggactcttgcataccccgccaattctgaaaagaatcgctgaccagcagatagggagggatggtagtgatggtattgtcccaattgcgcaccttcaccgtattgagcgtcacttcaatcaccgtaccgtcggctccgtatttgggcatagcaatccagtcacctactttcagcatattatttgcagaaagttgaatgccggacacaaatcccatgatactgtctttaaacaccaacatcaggatggcagccgaagcaccaagcccggtgagcaataccatcggagatttatctatcaatacactgataacaacaattcctccaatgaaaaatagtatcacttgtgccgtttgcaacaaacctttcaatggtcgatcacgaaactgttctcgctcactgtatacatgataaacagccgacagaaatgcactgataaaacgcagaaaaaccgcaatgatataaatcatgcagatacgacggataaaatcgagggcacttacattcggaattgccaaaggaatcaacacataaataatgatgggggggacaaggtgactgaggtaaatcaaaactttacggtcgaacacaatatcatcccaggttgctttggtctttttcactagtttagcaactactcttaaaagaatgttacgacaaataagatcggctaaaaaggcaatgccaataatcagtaccagtgtcataatgggacctacttcactggagtcaaatccccaggaaacgaataagtcatttattttttcggttatctgttccatataaaaactcttttatgtcttctttcaaccattgataaaggtataaatctttgtaagcactatttttgcgaagcattacctccacattgacctgactgttttgataacaagtcagttcattatgaaattgttcgtcatgttccgccaattttttgatttcttgttcccgttcgcgtcgcagggctgtacaaacgggagtcaatactttcatcacgacattgtccatgatgtgatgcccctgaataaacagatatgttgtatcaggaagcactccaagtccttttaattcgaccgataacttatcgacctcttcgataccttgtggaaaacgcgtggataactcagaaagtttagacgttaccgaacgcctcactgcctccaaagaacgttccggatgcctcaagctgacatcgtgcaaacgaacacaggcattgaattcactcatagtaaacgtataagtatcatgacgacgataaaaccagacagaccacaggaaaagcggataagcaatctgagagtatcgtttcataaactcattgaagtcaatcaggtgtctgtcgttcaaagtggcttgcacacagacctcatgcaagctatcggcataacaatgatagttttcaatagcataagcataggtctgaaaaatatatctattacgattaattttacgtgaagtagcagtagctccttgcaacaaaaagtcataatcgctatccacacaggcaatcagacttttgcctaactcggccgtattaagggtattcatcagtaccattttcttgcctttagccaaggatgtagccgaaggaagcatcacctgaaaataatgttcttcgtcctcaaactcctcaagcagtgtacgccagaaagctacatcgtcataactctcaacataagctacaatccggcggcgcgcctttttagagtataacttatgagcagcattgaaataggaagaagtcagattgtctttgagactgattgccataggtcgtgttttagttaaatgctacttatagctggttgcaatatcacttacttcggtcacagcatcgagccatccttccatgatcactgcaggagaatgtgtcgttagtataatctgcacattcggattcagttcacggatcatcgatatcagcttttgctgccattcgatatgcaaagaagcttcgggctcgtccatgaacaatacgcaatgggcattatcctgtacaagtacagtaagcagaataactaacatctgcttttcgccggaagaaagtttataaggaaacagaagttcaccatcctgatagaaagcaatatcattgcgtctacggtctatttttttacgggtatagctgaatagttcgtcaaccatgtcttgaaaacgacgtttagcaatggaaagagtggctgctttgctacgttcttcctcgttattgctgctcaacagctcgatcatcttattgcctatattgacttgataatccagataacggcgctgcaacagatagagttgccagtcgagttcggactttacattcttatctgccatacgggctgtgaaatcccccataataagcggacgatcgtaactacggataacatcataaggaatgtaagtagcttcgggattgtcgaaaaagatatgtactccgtttttttcatcactcttcacttcacccgacagttgctcgagatacccgaccgatcgattcaggatagtggtttttccaactccattgattccggatagtatattgacatccggacgaaggtcccagactatattgaaacggtcccataatccgtctatttcaattcgtttgatataattggctgatagttccataaatggttgcatttaaattaaacaaatatagaaaattcaaacgataaattggttacttttgcatcagttttcaataaaggtaacattttcggtatggagattgataagaatctgaaaggacacgcattggcatttacagccaacatgatgtgggggctgatgtcccccatcggtaaatcggcattggcagagttctcagcgctttcggtaaccaccttccgcatggtaggtgccgcagcagctttctggatactttccgctttctgcaaacaagagcaggtaggacaccgtgacatggtgaagattttttttgcttctctgtttgcccttgttttcaatcaggggatatttatattcggattgtctctcacttctccgatagacgcatctatcgtaacaacaacttcacctatcatcactatgattgtagcggccatctatctgaaagaaccggttaccaacaaaaaggttttgggcatctttatcggagcaatgggagcgttaatcttaattctaagcagtcaggcagtaagtgcaggaggaggaagcatttggggagatttactttgcatgattgcgcaacttagcttctccatctatttaaccgtattcaaagggttatcccaacgctattcggccatcacgattaataagtggatgtttatctatgcatccatctgttatattcctttctcataccaggatatagcaagcattaaatgggacagcatttcgacagccgccatctatcaagtactttatgtggtactatgtggaagtttcattgcttacatctgcatcatgaccgcgcaaaaactgatgcgccctacagtagtaagcatgtataattatgtacagcctattgttgcttctattgctgctattttaatgggaatcggaagcttcggctgggaaaaaggagttgcaatcgcattagtatttcttggagtctactttgtgactcaaagtaaatcgaaagcagatttggaaggtgtgtcataactcaccacagaattttgacacacctttatcattatttcagatcttcaaaataggtatcgagtaggctcttggcagcaacaaaagaggtcagatttcccctgagcacttgttgctccttttcttgtaacatcgattcgatcttggcattatgatagaaactgtcacgtaactgttcattgatgctttcatacatccagtatttactttgttcgttacggcgatattcaaaatagccattacctttcacaaaatcgatatactcatacaccatatcccatatttcctttaccccaagattgtagaatccggaatatgtgagtacacgcggtgtccatccggaatcgggagcgggaaaaagatgcaaagcattacggaactgagcagcggccaatttggctttatcgatattgctaccatcagccttattaatcacaataccatctgccatttccatgataccgcgtttaataccttgaagttcgtctcccgtaccggccaactgaatcaacagaaagaaatcgaccatcgaatgaacagccgtttcactctgtcccactcccactgtctctacaaatatcttatcgaagccggccgcttcacacagaatgattgtttcacgggttttacgggctactccccccaaagaaccggcggaagggctaggacgtataaatgatttaggatgcactgaaagctgctccatacgggttttatcacccaaaatacttcctttgctgcgttcactgctcgggtcgatggctaaaacagctaacttacctcccttttcgagaacgtgcaatccaaagacatcaatcgaggtgcttttaccggctcccggtacaccactgatacctacacggattgaatttccggaataaggcagacatttttcaataacttcctgggcagtagcttgatgttcaggacgcacactttctaccaaagtcacagcctgactcaagatcgtcacatctcccttgacaattccctccacaaactcactaaccgacaattgacgcttctttaccttccgtttcagataaggatttacagatgacggttgttcaatgcctgcattcacaaccaaacctttatacgcttcgttattctcaggatgttccatggcagatattaattatgtgattcgttattcgtagcttttacatcgatctccactttcggttgcaccggatcattggtgatcatcaggatacgtaaatgtctctttttctttccaaggttctttttcagaacagtcaccctcagccgagtactttcacccggttgcagtacagtttttttcaaagcaacccccactgccggattaaacacttgcagtttgctaatttgcagaggagatttacctgtattagtgataacaatgtctcgtctggctttgtttttcttggccagcacctgacttaaatcaatcttagattcggacaggcgaataacaggagcgaccgccttatcctgttcggtcattcctgaaaagtccggaagaaggactgctgacacaggtatttcgttctcttcacccactttatcaccggcaaaacgagccagataaacagaagactgggtcaagcccaaatccattagttgtttggtgtcgagtgtgagagtaatggttcctttcttaccctttaaaaggacggtcggattagtttccattttcagataaggcggaaggtgcatcaatacaggttcgtatggacgatcggaaagattgactactcctaatgtgattaccggtttctctccactgtgtgcatccggaaaatcaatatctgtacgatcaatccggatttgcccgattgcataaggatgtgttttagtaaagtccttgatttcctgaaccacctccccgtcaaaattcagataaaccaaactaggctgtgcattgctgtaaatgccgattgacttattgaaatgccctagcgctttagcatcaaacgtagcactaactgttcctttttctccgggagcaatcggagttttcgtccagttagcaaccgaacaggcacaagaagtggtaacattagtcagtaccaaaggtttatcacctgtattggtaatagtatattctacagaaaccggacgtttccattcgatttgtccgaaatgatgggtctccttattagaagagatacgaggttgagctacagccgataaagtaatagtaagtaaagtaaatatgaagagtaaactacgtttcattcgtctctgttttataattattagttgtttagagtacaaaaataggggttttcagtgagattctgccattgattacatatttttaagcacaggcagaacggctttcgcttatataccctaatcgaaactctttttaccacggagtgacacggagtatcacagagtcttttcatcaagaatcaacaacttaaaattgcctctgtgttactctgtgtcctctgtggtgggttttgacgatcctcccctttcaaaagacagagttctatttactgagaaacttcgtaacgggcagaagctgaatgggcagcatattcgggtgcataggcactttgaatagtagcaattcctgcttcataacttcccgcacggtctacacgataactgtattctaaaacataagtccccttattcaaagtatcgaagaagaaatcggtagaagcatcttttactgcaacataacaaccgacatcaccgacattatgatatccggacaggacctctaccggttcaagacaagcagcacgttgatctttcaattgtacaaagtccattgtacgatcgagacgaacggtcagacgaacaactactttatcaccaacctttaattgagttttaccgataaccggctgtaaccggcgattattattaacaatcgtctctacatacaatttcttatcaacattcaacccacttccctggcggaccactttatcaagattctcttcgaactgtgcataaactgctccccaggcaatacccggatctctcttttcaacgataatctcatcggtattcacggtcttcttatcggtaaaagtctttttgatatagcctaatcccggaacagtcgtcttggcaggacttatcgtttctaaaacttcattgccaaggacaatacgcacgtctccctgattatccaataaattagtaccccggtaaagcaaagcataaacagcattggctgtagctaccggagagtcccactgttgagtttgcttctgttttaaaagccacattttcatttcttcaacaatcgtggcattgctgcctaccatctcaaaagcctccattacatcaacatgggcaggcacttttaagttattccaagcatacggactatcagtcctatcaaagaacatgccttgctcgtctgtttgagtaagatattctttgagagatgccataaactcctgagcttcttttaccttacctgccttctgtaatacaatagccgaccaggccttctcggtgacggattgttgagacaatgatggagcaactttggataggaagtaatcataaccttctttcaccgatgccggaactttttcgccagagacagcaatcaaataaagatacttcaatgcacttcgtgaaattccctctgatttattgccaaccttttctgcctcacggatagaacgatattcctgcaaggcttctttatggagataaccgaaagctgcttgttgcatatccagcgctcctccctccagcggcttccctgtaagcagggctatacgtgcattctgttctacaatgaagtcggtgacaaaaagacttccgtccattcctttataccagctccacgaaccatcaggtaactggagttcctttaatttcaacaaagctgctgtattactgttacggatattattcaaatcgaataaagtggcaatacgctctttttgttcgctttccgaagtcgcttccatcacccaaggagattcagaaagaaggatattcttcacttcctgatttttttgcaaattactcaagaagctttctttagtgcctccctggagtttccaactatcaaatattgcctgaatacgtggctgagcattcatgatataagaagccattgtattggcataccaggaagtagcccacgaaatagcatcatcattccgaggttgtgatagtgccggtaatgcttgcactgcataccaagccggattggaagtaaactctacagttaaacggcggttggtcgcagtcttactatggtgattgaacagatcggccaaagaaaaagtacgtgtttgctcgccacgaacaggcatgggcaaagtctctgtcaagttctccttatcactgagaaccggaagcaaatgctgctctccatcactgaaatttcctccttcggcaatcatccggcatcccaaaagttcatatttatcggttactgtgaacaagaaacttacaccaacactctgtccggctccggcattaaatttcttctgttgggtcgatattacctgatctgtcattggatcgaaaagtaccagtttcacagtaccagacagatttttaccggtcagattactaacagaagcagccatggaagtgtgatctcctacccggacaaaccgaggtagattcggagtaagcataaactctttactggtaacagcagtagcatccatctgccctgtcatcatatcttgtgtatgagcatatcctcggaaattccaggtcgtgagactttgaggcatacggaaagagaaactgacctcaccctgaacgttcgtgtgaagctgcggataaaagaaggcagtttccgcaaagtcggtacgtaactctatatctgttgtcctacccatatcggcattgtccattgacattgccattccgttctcttccgtaacaggaaccatttcagattcgaaaacgacatcggctacggcagcgctcttcatttgtggttttgcagcacccattccgcgcagacgtgcatatcgggtagtcggagcagcatcattggtgaccgacaacatttcggcaaccgcatataaaaccggaggcaagtcaaaatgatcatagctaaacggaggcaccttaaaatcagtccggcggaaaccaaaataaaaatagtttgagccaacataatctctcctccaacgagcaatggggacagaaagttgataatgtaattgcaatgactggttggtcttccaaattttatccaaagaggcatcatacatagtagccagcatttcggccaaaacaggtgatttctgtggattacggatagtcagtttccattcctcttcctgcccgggacgtaatttatcacggaatacatcccaacgcatattcaagttatgatcgggcaaacgttttatcaggcttacctcctgttcgtaaacaacacctttacgaacaaatacaaaggtaatacccaaaccattcccataggcttcccgatacggatattcaaaacgaacaagagaatcggacaaatgaagaagcttactctccagatgcttattaccacagaacacatccattaagacataagtatctttttcggaagtaccaaaatagaacagggcaggatgtgctgcatcaaaccgggtattcacttcataacaccacaaaggcatagataccggaggacgcttatcatcggaagcaaaaagaatcactaccttttccgcatctaccttacggccttgatcatccttcaccgaagctacaagtttgtaagcacctgaaggaagttttttccaatcggagaacaagatctcttcattggacctaaacgaaccggaaagagccggttgatcggaaacgtcctgttctttcaagggttttgatttctgataatcggaaatcaaaaacaaccggtaactgccttcgacactgaccggtttacgatccagattatttacccgaaaagtcgctttcacagaatcatccttgcaaatcagcccggatatatcagcaaacaataacaaagaggtctttcctgcccgcagactggtttctgaggtttgcgtttcacctgcgacattggttactgaaagctgcactttataatcataatataaagaggtattgtcaccgtctcccaaatcgggattcgaagtgtcaggtttcagatccacaggaatttcgaagtttccatctactcccaaacggacagtgtcagaggccaaaataaccggattcatcccccacatccgccaagtatacaatgagcgggtaatggtataagtaacaggaatatcctgtaacggcacaccactgaaagtttttacactccctttcaactcgacacgatctcccaaccgataactttcagtcaccggctcaaaagtaatatcaaatgtaggacgtttgtaatcctctacacgaatggaacgaaatccgttttgagtattcaaactaaaagtaccgttcaaacaaacagacggtaaaacaaattctgcggtgaaagatccaaaatcattggtacgcagcttctttgcactgatttcttgcccattggcatccgaaagagtcagcgtatattcctgtcccgcaatcacatgggcagagtcaggatactgttcataggcaatgccttttacatagacagtctgccccggacgataaacagaacggtcggtaagcaaagttaccacagaaacaggttttgaatggtctgcaaaattataatctcctccccataaatacatctgcggcatagctgtatcattccctttggcagcagtcagatacctatatttttccgacgaagcaaactgtactttcccttcggtattggtagtggctgtcagaagttgtttgttctgtcgatcgaagaatgaaagaacaacaccctgcaaaggcttgccactcatagcatcgagaatagctacctcactcagattagaaggtagagatcgggtaagaactttaaagcaagtagaatagagaaattttgaaacattggaacgaaccttaacacccggaataacacggagggcgtacagtcctgtttcaggtgcctttatgtggtagatggaatctttcactttatagtcatccgacgggaagagaacataatgttccgatgaaagtaaacgtccatgtttttttagaaatgcgtcattgggtgcttccaccgtattcggacgtgccggtaaattaattgcatacaactctaccgtaaagtctttcaaatttttaaagctgacttttaaatcaaactcctcacccggataaactgttgacggggattgcactgtcagatcgggacgcagaatttcttgcttcagttctttcagagcattgatgcggcgatagtccggatagcgagagatagcctcttcgcacaattgtaacgcagaagcgggcactcctgcatccattgccgcctgtgccttgagcaaataaacttctgcacagacatcatgtgacttattttcggcaatcagtttgtccagtgcagccaaataaggatcctgtgtcaagccaagtttcccctccggaacacgataaggccgaaaatcgatatcagtacgcctcttccactgcaaataatccaaagtagtaagcaacagagcatcgtgattatcagtccgacgatatgaattcatcatatgctgataaatttcttcaatgcgtacatttattaaagaatcacggccaaatccggacagattctccaatgaagtaatggcacgggaagccaacaaatgatacatatcatgatgatagtaatcactggttactccaagttccacaaaaggaatgtagcttcgggaggaagtatcgagcagtagcaaagagtcttgaaatgttacggctatttctgtcattactttagttacaaactgattcttactccactcccggatatcaacagagggagcttcttcttccaaatccgtacgttgattcagtttccaacggttttgggaagcataatctgcatacatactaccgataagcgaatgcaggattgcacggtccaatggcttgtccgtagtcaccgcccactgctctaagccattcaacgacacgtaaaagctatccggagtaatctcttccctaaatttcatctgccaaatataagctttcagcatttgaggagaattcttctctgctttagctttttgataaatttcaccggttaatcggacaactgtttggggcaaacttttctgctgggcctgctccacttgcttccataatctatcgtatgattgagcatgtgtccatgacatcatccccatagaaagtaacacgataatacaaatcagtttaattctcatatattaaaagtttaagtatcaatacataattaacaaagtaacaaattaaagtttaaagatttgttctttttagcttaaaaaaagagaacagggcaaacgtgatacgattattaatggttctaattaatctcttttaacacaaaaatcaaaatagcaaaactttttcgggtatctttgtaataagaaccatttatctaatcacaaactaaggcacaacattttatgaaaaaccgacattacttaaggcacatactggccattactgcgttattattcaatggagaaaccatttactcgcaaacttatccaatagaaaactacttaaaagcagcaggagactatgttactatttacaatggtgaaatcgaattaacatacagtcttgcccaatacgacaatcttccctattttcaaggtgatgaatttaccacaggagagattatcttcaaaggaaaccgatacccgggactggatcttcatttggatttacacaaagaccaactttgtgcactgactcctgacagccattacagcatgattatcaataatgaaggaatcgaacaagtcaacctgcacaatactacatttatctatttccgtccgacaaagaagacagatctcaataagggattttacgaattactacaagacggaaagcgactgagactgctggcacgaaaaacatactccgttgctcagatcaacgtagaaaaaatagccaaaacccgcaaacatcaaactgaatatttcatatacggagtaaaatattatctggaatacaatgggatatattatcccgtcagtaacaacaagtcgtttgccaagatctttccggagcaacataaactgataaaacgttacgcacgaaaacataaacttaattttcgccatgacgctgatgcctcattaatcgctcttactaacttttgtgaagaattgatagaccaaaaacaaacacgatgaaaaaaagtacatacttatggatgttgcccctactatttgcatggccgcaacaaatgacggctcaacaccccctctcacttcctgccgacagtataactattgactccttattggagactgtagaaaaaaatacaccctatagggttttcagcactattagtgctcctttcaaggttttggtgaaaggaaaagcttcacccctgcaacaattaaaagaagcacttgagccgactccctataaattgtcagtatccggaaacaatttattcgtgctgaaagagcaggaactcatcacgctattacctgctaaactgaccggagaaccggaaaaaggcgaaagttattatggtgacgtatatacttacctaagcggagaacctgaaaaggcatcttcagaaaacaaagtgtataatgtgggagatgtacgaatcaagcaaccaccacgaaaagcggtactcaaagggcaagttactaactttaaaaccggtgagcccatgataggcatcaatctgattttaaaggacccatggattgcgacgacaacagatgttaagggaaactttactcttgaacttcctaccggacacaaacaaattgatatcaaaggacttaacattaaagatacccgtcgacaaattatgctttacagtgatggtacactggacatcgaacttgaagaaactacacatatgctggacgaagtaaccattacttccggacgtatacaaaatgtgaaaagtacgcaattaggtgcagaaacactgcgtccaacccaattgaagaatatcccgatggccttgggagaagtagacattttaaagatggtacaggctttacccggtgtaaaaacagtaggtgaagcttcaagcggcttcaacgtacgtggtggagctaccgaccagaatctaattctgctaaatgacggaaccatctataacccgaaccatttattcggcttttttgcagccttcaattcagatatggtaaaagaagccgagatatataaaagcagcatcccggcacaatatggtggacgtatttcatccattctggatatcaccggtaaagaagccaataaagaaaaattcaccggttcggccggtatcggtctggtaacgagtaaactgaatctggagattccgattatcaaagacagaacgtctgtattactaagtgggcgtactacgtattctgactggatcatgaagcagcttccggagaaaagcggatacaaaaacggtaccgccggcttttatgatttggctgctattgtggcacataaattcaatgacaaacatagtcttaatgtctacggatactatagtcatgaccgtttcgctttcaattcaaacgaaaaatacggctacaataatctcaatgcttccgcacgatggagagctgtatttaacgaaaaactgataggatacttctccgccggatacgatcattacgattacaataaccgcgagaccgtcaatgcatcaactgcttataaactttcatttgatattaatcagtattttgtcaaagcagacttcacaaacatactggccgataagcacacgctcaactttggtttcaagtccatgctctatcatatcaattcgggcacttatgaacctgaaggaagtgaatcatttgtaaaaaaggacgttttacaaaaggataaagccttggaaacggcattttatttaggtgatgaatgggaaatcactcccaaactatcggtcaacgcaggtatccgttactcactgctcagtgcactcggtccacgttcgtactatcaatatgcatcaggcatgctcccacacgaatcgaccataacggacaccatcactgcaggagcaggaaaattcatgaagacttatcatgggccggaattccggttatccgcccggtatgctttcacagataatttctcggtcaaagccggatttaactcgatgcggcaatatatccataagttgtcgaacactgtcattatgtcgccaacggatacatggaagttgagcgatgtgaacatcaaaccccaaagaggctggcaagccgcagccggactttatctaaattctccgagtggcatctgggaatattctgtggaaggatattacaaacgaatgtccgattacctggattatcgtggaggagcaaagctacttatgaaccaccatattgaaactgacgtcatcaacacgcagggacatgcttatggcgtagaattgcaggtaaaaaaacaagtcggtaagctcaacggatggatgagttacacgtattcacgtaccttcttgagacagaatgataaacgaattgagaaaccggtgaataacggtgactggtatcctacagaatacgataagcctcacgactttaagtttgtaggtaattacaaatttacgcatcgatacagtatgtcaatcaacgtggattatagcacaggacgccccactaccatacctgccggacagtattatgatgaatcaacgcaatcgatgcgagtttactatacggaaagaaactcataccgcataccggattactttcgtacagatatctcttttaatatagaacccagccatcatctgaccctgttgacacatagttctatttcgattggggtatacaatgtaaccggaagaaagaatgtgtattctatttattatatgccggaagaaggacaaataaaaggataccagatgtctattttcggagttccgattcctttcattacgtataacataaaattctaacatcatgctgaaatcaaaatataaaatctatctgttactactctgcctgacaggttgtgtttcagaatacaacgcacaactaccttcttccgatgaagaattgctggtagtaaccggcgacattatcgctaatacagaagccatattctcattaagcaaaagtattccactatccgaagacatgccggaagattatcgaaacatttatgccagaattgctgtagtaggcagcgacggctatcgaagtgatttcggaacggctcttggtgatggtaaataccaggtcagtatcggtgaattgcaggatgatgtatcctacggaatagagatagaatacgacggagagatttatacctcgtctccttccataccgatggtatcttctgaaatagacagtgtttcgtggatacaaccagaacctgaacaagcactttctatacgggtatcgacccatggtgatcccggaaaaactcaatactacatgtggaactatcgggaagactgggagataagagccagctacattacaacttgctactttgatccggatatgaaccgcatctatgaagacagcaattatccaactttctattgttggaaaaaggaaatatcaagaaatatattgattggctctacggaaaagttgaaagaacatctgatcataaataataagctactcgatgtgccggtcaatgaagacagattcactgtactatacagcatacaggtacagcaacgggcattgagtaaagagggatatgaatattacttgaatgtacagcaacagaatgaagaaatgggaggaatctttactccacagccctctgaaatccaaggaaacattagttgtatcagtcagcctggacgaaggacgatcggttatgtaggcgtctataaaaacatctctgaaaagagaatatacattcatcccaacgaaattaaacgtcctcctctatacagtggctgtgaagaagtgtcggatagcgaaatggatgaacagggctatagcacatatctgataagataccttgtcggttatcgtccagtcggtacaggcactcacattgaccactgggccctacggagatgtacagaatgtgaagccaacggaggaagtaaaaacaagccttcattctggcccaacgatcatcaataacttaaacaaaaggaggcaattatgaaacggattttcacactatatctctttatcttattctgtctgattttgcaagcacaagaagaattatatgaacgggtatacgtacatacggataaaacgtgttatttggccggtgaagaagtatggctcaaattttatactattgacacacattttcgcccatcttctttcagcaaagtgggatacatagaaatatcgaatactgaacggcctaaagcacaacttaaactggcacttgacaatgggagcggttcgggcaaagtcaagattcctacagacgctccttcgggaatttatgaattgaccggatacacacgatatatgaggaatgaaggagaaaaagtgttcttcagaaaatccattgctgtaattaacactttccgagtatcagactccgatcctattgaactagcggattctgccgagatatatccgaaagggaaaccagctaccaccgaaaatattcatataaaaacttcccggtcgaactacaacacacgccaactcgtagaattgaccattaatagactaccggatgaagtatccgatcttactgtctcggtaagccgtaatgattcactggtaaccctcccgcctcttgaagaatccacctggagaaaacaagtgaccgctactcctggaacattttccggaaaatggataccggaatatgaagggcatatcatctgcggacagatagaaagccctacaggagaaacattgaagcaaggacaaaatgaacctatatcagccgacatcgctttcgtaggaaaagatatacgatatgtgcaaggacaagtggaatcgggaggaaatacactgttctacacaagccatgtatatggaacgaacgatgtagtagccgctgcatggaacattaacggggaaccgttcagaatgaacatcttatcacccttcagtgaaaagttaccccaaaacctgccatcattaaaactctatcggaataaaaaacgactgttggaaaggagcataggtatacagctgcagcaagtcacagtgctcgattcattggatcatgccattcctctgcaatcttgttatggacttcaaccttatctgaattacaatttggatgaatacacacgattcaatacaatgacagaaactttcgtggaattcgtacgcagtgtgataatacgtaaagttaatggaaaacgtagattaagagtactcaaagaaggagaaaaaagattcaatatcggaaatacattggtactgctggacggcgttcccattcatgaccatgaggatattttaaaatataatcccagattggtgaagaaaatcgaaatatataacggccgttatggatttggtggtgaagtattcgaatgcatgatttcacttactacccaaagaggagacttaccttccatacagcttagtgacgattcacgactaacggtttacgagtgtccgcaactgcctgttacatttaagatgcctgaatataaagacgctactgacaaaaaatcacgtagaccggatttccgccatacgctatactggaatccctctgtagagacagaagcaggaatagataccacactttcattctatacttctgaccttgaaggagaatttaaggtggtagtggaaggcttcacattaaaaggagagctgatcagaggcgaggtaaacttccatgtgaaaaaatgacccggcctcaaaactcaacgacacgaaacaaacttgagtcaaaataaaaaaagtggggaacacttttatttagtgtatccccacttcatcatttcatttctgccggcttctctcaaacatctttccagcagatgcattactacttttttcattgctttaaatactaataataattaccttaattaatacacactgaaaacctgaagggaaaaacgcttagagcgtcacatatccccaaatgttaggattggcattagccaaattctttaataaacttcttacaatcttcataatctttttaccttaaaaactgttacctaaaaactttgttatcctaatttttatgttttacaacacaaaagtaaagccaaaacagatacgttgtactcaaaagcaagataaaaacatgttttaaaacacatttcttgatgtatatcaagaaaaagagtcccggatggtaatcaaaagacaaaacaggacaataagggagtcaaaaagacaggctgcaactgacaatatctcacatccgaatgacaggccgtcataaagtagacaggaagaaagatagttttcaaaagtagaaaagacactaaaaagaaaagaggaaagcgtttacaccacgcttacctcttttcactatcaatggaatttatttatttcattggagtctgctccaaagtagcaattaaaaagtcatagaatttttgaactgtcggaatcaaagctctttcatcgggagaatgcggagagcgtaatgttggcccaaatgaaatcatatccaacccaggaataatagctccgatgatgccacattccaatccggcatgaattactttcactgccggttctgtaccaaactgcttcttgtaagattccttcatagcatgtaaaatcggagaattaatatcgggttgccatccggaatagcctccggtcatctctaccttcatacctgccatagaaaaacaacattccaaactggtagtcagacattccttcatactgtcactggaactgcgcgcaaggattttgaaagaggctttaccttcaccaatattgatgatagctaaatttgaagaggtttccacggtatcgggaatagtaggaatcatacgcatcacaccattctggcaagcaaaaatagcatcgatcagattatcctggatttcttcaggaacttctccagcaggtaattctacccgttctgcagtaaagctgataggagtttcgatcgctttgaactcttcattgaaaaggtcttcacaatatttcaccaaagccaacaattcttcttcattttcagcaggaatagtcactacagcatgtgcctcgcgaggtatggcattccgcatatttccgccttcccagcttgccaggcgggcttcataagttgctactgcctcacgtataaaacgtaccaacaatttgttggcattggcacgtccctgattaatctccaatccggaatgtcctccacgaagacctttcagattcactctaatagcgatatcaccttcttccggagcaacttccttatattcaagagaagcagttacatccataccaccggcacagccaatataaagttcaccttcatcttcagaatcaagattaagcaatatttcgccattcaccgtacccggttttaagccaaaagcaccatacatacccgtttcttcatctttcgtaatcaaagcctccaatggcccgtgttttagattctgatcttcaagaacagccatgatagcagctacacccaaaccattatcggcccccaatgtagtacctttcgcttttacccattcaccatctatataagtttcgatcggatctttctcaaaatcgtgaactgtatcgttatttttctgcggaaccatatccatatgtgcctgaaggataactcctttacgattctccatccccggagtggcgggtttacggataatcacattaccggcatcatccacaaaagttttcaatccaagactattaccgaagtttaccagaaattcggtaattttttccatatgtcccgatgggcggggaatctgtgtcaaagaataaaagtgcttccatacattttgtggagctaaatcaagaattgtgctcataaatgaattatttataggttttaaatcaatttctacaggtcaaagctactaaaaagaatggaaaagaaagaattaccggaagaaattcaaataaaaaaagttcaaaaagcggattcagagattaaatatatatctttcggtacatacaatatttaatccgcccccgtcacttccggtgtaaaaaagaaatagtcaccaatccataaacacccaataaaataaccagcagagtctggatgccatgaacaattagtgcaaaaatccctgcatccgtcgcatttaccccgtaaagcatcatcatggtaataacggcaaaatgccatggaccggctccattcggagtaggcacaattacagcaaaggtacctccaacaaacataaccaatgcagcaagtaagcccaaatgtgccgtaaaagcaaaacaataaaaagtgaaataaaaatgcaggaaatagctaagccatatcaaaaaactatagagtagaaaaagcggaagattcttcacattacgcagtgacataattccttcacaaacattaagcacaactcctttcactttctcaaagaaagaaagcgtacgaatcagatagtagagaagtacaataactccgattgtacaaaataaaataatgtaaaaccagacagaagtaagtaaatgcatgaatgaggggattttcgttccggtttgctcaaggaaggtaacaaacacaggcatttgcaatagaaccgtgacgccggtaatcaaaagaatagtcacagtatctaccagacgttcggtaaccacagttcctaaagatttagcaaaagaaacgttgtcatacttagcaagtaccccgcaacgactcacctcacctaccctcggtacaaccaaactagctgcatacgaaatgaaaatggcatcaacacaatcccttcttcggggaaatgctcccaaaggctccagcgtctggcgccaacgccaaccacgaaatacctgtgcaaatatgccgaaaagaagcgagaaagccatccaccaccagtttgtgccatgttgcaaaacttccgtagccttcacaaaatcgaagtcacgatagacccaatataagataaagcctcccaaaaccaatggtaagataagtttcagtgccttttttattagtttcttcatccctaattctttattcttcatttaaaagaattacctttgtctgctgcaaaagtagttatttagttgataaatgaaattagtaaagcctaaaaagtttctcggacaacatttcctgaaagacctgaaagtggcacaggacattgccgatacagtagatacattccccgatttgccaattttggaagtcgggccgggaatgggtgtgctcactcagtttcttgttaagaaagaacggttggtaaaagttgtagaggtagactacgaatcagtagcctatttgcgagaagcctatccgtcattggaagataatatcatcgaggatgacttcctgaaaatgaacttacaacgtttgttcgacggacatcctttcgtcttaactggaaactacccttacaacatatccagccaaattttcttcaaaatgctggataacaaggatctgatcccctgctgtactggaatgattcaaaaagaagtagccgaacgcatcgccgccggaccgggtagtaaaacgtatggtatactcagcgttctgatacaggcctggtatcgggtagaatatctgtttacagtaaatgaacaggtgttcaatccacctcccaaagtgaaaagcgcagtcatacgaatgacacgcaacgagacacaagagctcggttgtgaccccaagctatttaaacaaattgtaaaaacaactttcaaccagcgtcgaaagacattacgaaattcaatcaaaccgattttaggtaaagattgcccgttgacagaagacgccctgtttaataaacgaccggaacaactatcggtacaagagtttatccacctgacaaatcaggtggaacaagcactaaaagttccgatagaaccagtttctcagatagaaaatccataaagaaccaaccggattatcggactgaactaacaaagtaggaaatgtaatatacaaaacttgtcttccttattattataggaagttaagtaaggctgtaattatgaacgaagaatacattgacaacgtaaaagaacttatcgaagaaaaagatgccgataaggtaaaagagcttcttatcgacctacaccctgctgacatagcggaattgtgtaacgagttgaacccggaagaagcccgcttcgtctaccgattacttgataatgaaacagctgcggatgtacttgtcgaaatggatgaagacgttcgtaaagagtttctcgacatcctgccatcagaaactattgccaaacgcttcgttgactatatggatacggacgacgcagtagacctgatgcgtgaactggatgaagataaacaggaagaaatactttcgcacattgaagacatcgagcaggcaggagacattgtcgacctgctgaagtatgatgaaaatactgccggtggtttgatgggtacggaaatggtaaccgtcaacgaaaactggagtatgcccgaatgtctgaaagagatgcgccaacaagccgaagaactcgacgatatctactatgtatatgtaatagatgatgatgaacgccttcgcggaatatttccactgaaaaagatgatcacatctccctctgtatctaaagtaaaacatgtaatgcagaaggatcctatctcagtacacgtagacacccctatcgatgaagtggcacaaattattgagaaatatgacttggttgccattcctgttcttgacagtataggccgactagtaggacaaatcaccgtagatgacgtcatggacgaagttcgtgaacaatcagaacgtgactaccagttagcatccggtctttctcaagatgtagaaacagacgataatgtactccgccagactactgcccgcttaccttggttgttaatcggtatgattggaggtattggcaactctatgatattggggaactttgattccacttttgccgcgcatcccgaaatggccctttacattccattgattggtggtacaggcggaaacgtaggaactcaatcgtcagctctcgtcgtacaaggcttggccaacagttcccttgacgccaaaaatactttcaagcaagtcagcaaagaagccgtagttgccttgatcaatgctacgatcatctctttactggtatatacctataattttatccgtttcggagcaaccgccacagtcacttattcggtatccatcagtctgttctcagtagtgatgtttgcctccatcttcggtactttggttccaatgacactcgaaaagatgaaaatagatccggccatagctacaggaccgtttattgccattacgaacgatatcatcggcatgatgatgtatatggggattacggtgttattatcgtaaaaaatggctcaattaaaaaaaaataaaggaaaatagtatgaagtaatcattttatttcattaatttgtgatctaatggatttaaagacaaatcctgttttcctaaaaacgaatatacaatgatggactctcatgacactaaccaacctttgaaacaaggggaattagaagaagaaaaaaaagcagttgaggtttctgaagaaattacagaaactccggctgaagaaactattgtggaaaaaccgacagaaaatgcttcgaaactaagcactaaagaagaggtgctgctccggttaaaagaagttgcccaagatgctgaaaatgcaaacaagcaggaactggatggtttaaagcaaactttctataaaattcataatgccgaaatcgaggctgcgaaaaaaacgttcgtagagaatggtggtgccgaagaagaatttattgctcagcccagtggcgtggaagaagaattcaaaagtttgatggcagctattaaagaaaaaagaagtgccttggcagctgagattgaaaagcaaaaggaagaaaatctacaagttaaactatcgattatcgaagagttgaaagagttagtggaatcacccgatgacgccaacaaatcctacaacgaatttaaaaagctacagcagcagtggaacgaagtgaaattggtgccacaagctaaagtgaacgagttatggaagaactaccagttgtatgttgaaaaattctatgatatattaaaactgaataatgaattcagagaatacgacttcaaaaaaaacctggagattaaaacacatctctgtgaagctgccgaaaagttggccgatgaacaagatgtagtctccgctttccatcaattacagaaactacatcaggagttccgtgacaccggtcctgtcgccaaagaattacgtgacgaaatatggaatcgctttaaagccgcttctacagccgtcaaccgtcgccatcagcagcatttcgaagctctaaaagagagcgaacaacataatttggatcagaaaacagttatctgtgaaatagtagaagctattgagtttgaccaattgaaaacatttgcggcatgggaaaccaagacacaagaggtgatcgccctgcaaaacaaatggaaaacaattggttttgctccgcagaaaatgaacgtgaaaatctttgagcgtttccgtaaagcttgtgacgaattctttaaaaagaaaggagaattcttcaagttgctgaaagagggtatgaatgctaatctggaaaagaaaaaggcattgtgcgaaaaagcagaatctctgaaagatagtacagaatggaaagaaacggctgaaatcttaaccaagctccaaaaggaatggaaaacaattggccctgtttctaaaaaatactcggacgctgtttggaaacgtttcattactgcatgtgattacttctttgagcaaaaaggcaaggccacttcttctcaacgttctgtagaacaagagaatctagaaaagaaaaaggcaatcattgcccgcttaactgctattgacgaaacgacggatgccgatgaagcaagcaaagaggttcgtgaattgatgaaagaatggaatggtatcggacatgtaccgtttaaagagaaagacaggctttataaacaatatcacggtttgattgaccaacttttcgatcgatttaatatcagtgcatcgaacaagaaactgagtaatttcaagtcttctatcggcaatattcaaagtggaggctcccagtcactctaccgtgaacgtgagaaattagtccgtacatacgaaaacatgaaaaatgaactccaaacttatgaaaataatttgggcttcctgactacctcttctaagaaaggaaatagtcttttgacagaaatcaaccgcaaggtggaaaaattaaaatccgacttagaattagtattgcagaaaataaaagtaatcgatgaatcaatcaaagaagaataaaggaaaataattttagttctatgtaaaaggcgtatcaaagggattttgaatctctttgatacgccttttctaaattcaagtgttacacattaaaaacaggcataaacattccccatttacctacataatatcaacagattatattatttcgtttgcaatcctaccaccggatcggacagaaaaaaaatctaaaactacagtttgaaagaacgataagaaacagttctctgccaccggggatatcaccgaacaactgttttatcgaaaagacttgaaaggataaaaaatccctctaaaaccgtagttttagagggattttacttatttataatgtgaatttgttgggctatctggactcgaaccagaaatgacaggaccagaatctgtagtgttaccattacaccatagcccaatgtgacttacgatcaacatctcttgtttctcgtttgcggttgcaaaggtacaaagttttttttaatcacaaatacttttcgctctttttttctaaaaaaatatctaatatgccggattccaaagagatgcatccctaaaaaaaaacaaaaaatgaaatagatttagcacattactttcattgatacaataaatcagcgtatatttgtaaaaaatatcacgtttatgacaagaaaacaaagaatcccctttccttgttataaacagaaactgaacattgattatttaatttcaacctataaatgaacgaaacgaaagtattaatagaaaagataaccgaaggtatacaagaaaaaaaaggtaaaaacattgtcatagcagacctgacaaacatagacgacacgatatgcaaatactttgtaatctgtcaggggaactctcccagccaggtcattgccattgtagattccataaaagaatttacccgcaaaggtgccggtaccaaaccctctgccatcgacggacagcgaaatgcagaatgggtagctatggacttttcagatgtattagtacatgtattcctaccggaagccagaaacttttataatttggagcacctgtgggcagatgccaaattaactacaattcccgacattgattaatctatcagtatggacaataacagcaagaaacccaacaataaagtaaatatgcccaagttcaatctgaactggatgtatatgattatcgccctaatgcttttagggctgtatttcgctaacggaagcagttctgtcagtaagaacatctcttatgatgagttccagcagtacgtacgtgacggctatgtaagtaaagtgatcggttatgatgataattcggtcgagatttatatcaaaccccagtacgtaggaaccgtattcaaacaagattccacccgtgtaggccggaatccgatgatcactacggaagccccttcacgcgagaacctggataactttctacaaaaagaaaaagaggagacgcactttgacggttctgtcagctatgataagaaaaaagactatttcagtgcaatactttggaatgtactgccgattgtcttcctgattgctttatggatattcttcatgcgacgcatgggcagtggtgccagcggaggtgcaggcggagtattcaatgtaggaaagtcgaaagcccagctttttgaaaaaggcggttccatcaaagtaactttcaaagatgtagccggactggcagaagccaaacaagaagtagaagaaattgtggaattcctgaaagagccccagaaatatactgacctgggaggtaaaattcctaaaggcgctctattggtgggccctccgggaacaggtaaaacgttgcttgcgaaagctgtggccggtgaagccaatgtacctttcttctctttggccggttccgatttcgttgaaatgtttgtcggtgtaggtgcatcccgtgtacgcgacctcttcaaacaagctaaagagaaagctccttgtatcgttttcatcgacgagattgatgctgtaggacgtgctcgcggtaagaatcctgcaatgggcggaaatgatgaacgtgaaaatacgttgaaccagttgctgacggaaatggatggtttcggctcaaatagcggtgttattatcctggcagccaccaaccgtgtggatgtactagacaaggcattgctccgtgccggacgtttcgaccgacaaatccatgtagatttacctgatctgaacgaacgtaaagaagtatttggcgtacacttgcgccccatcaaaatagacgatacggtagatgtagacttactggcacgccagacacccggattttcgggtgcagacattgccaatgtatgtaatgaagctgctctgatcgccgcgcgtcacggaaagaaattcgtaggcaagcaagactttctggacgcagtagaccgtattatcggcggacttgaaaagaaaacaaagattactacggaagccgaacgtcggtctattgccctgcacgaggccggacacgccagcatttcctggttattggaatatgccaatccattgattaaggtaactatcgtcccccgcgggcgggccttgggcgctgcctggtatctgccggaagaaagacagatcacgactaaagagcaaatgctcgacgagatgtgtgctactttgggcgggcgtgctgccgaagaccttttcatcggccgtgtatcaagcggagctgctaacgatcttgagcgcgtaaccaaacaggcgtatggcatgatcgcatatttgggtatgagtgaaaagctacccaatttatgctattataataatgatgagtattcattccagcgtccatatagtgaaaaaactgccgaactgattgacgaagaggtcaaaagaatggtaaacgaacagtatgaacgtgccaaacagattctctcggaacacaaagagcaacacaacgaattggcacagctactgatcgataaagaagtcatctttgctgaggatgtagaacgtatctttggaaaacgtccttgggcttctcgttcggaggaaatcatggcagccaataacaaacaagaaaacgccgttcatcctgcagatggagaagatgtagacacaactactccgcaagcaacagggtctcaagagggcaatacgcaacaagagtcagcggcatcacaaaactaaaaacgtaacaacaccttgaagaacaactttttacaacgtgccataacaggaatattattcgtagccatcatagtgggttgtatactatatgatccactggctttcggcactctttttgtcattgtcagcgctctgactatacgcgaattcggacatctcgtcaaccaatcgggagaggtaagcatcaaccggactatcaccatgttgggaggagcttatctgtttctggccattatgggtttctgtatcgacgctgccggttctaaaatatttattccttacctgatattaatcatttatctgatggtaagcgagttatatctcaaaaagaagaatccggttttaaactgggcttactccatgctgagccagatgtacatcgcgcttccctttgccatgctgaatgtgcttgctttccagaatgatccggaagcaagcagcgtatcatacaatccgatattgcctctatccatctttgtctttttatggctgaatgatacgggggcatattgtttcggatcacttttcggcaaacaccgcctgtttgaacgcatatcacctaaaaaatcatgggaaggttccattggcggaggtattgtagccattgcctcttcatttgtttttgcctgctacttccccatcatgacatgggcagaatgggcgggactggcattggtagttgtcattttcgggacttggggtgacctgacagagtctctgctgaaacgccaattgcagattaaagattcaggaagtattctacccggacatggaggtatgctcgatcgcttcgacagttcactaatggctataccggcaggcgttatttacctatatgcactgacattggtctaaagcagacaaaaaaataagtcacaaaaaataacgggctacaaacaccaagtaccctgcaaaagatagcagaaacttattgtttgtagcccgttattcttttaactaaccttcttctattttatttgcacttcatccgaaagcgtcacctgctttgcttcctccggcattgactggccctttaagttaaagaccacttccgtttccccgtcctttacggaattcaatttcaccttaatgcctttcttaccggtcagatccaatgaattcaagttgaaagatacggcaccattcgcctggcgagcggtcacatcatcgtatgttttatagcgaaattccaaatggatgtattcatcatcctctccctcagcagctgtagcccgcatatcacgaaccagactgacaagatgcttctccttaaccggtaaattctgacggaaaatgacattcaagtatcccccgccgatccacatcatatccttgttaacccaaaccggatcattcccaaattccgattcattctcagccgtcaaatcttctacctgtttggtcaggacattataattatgctctaccttcacagcatgatcatatccttcataattatcgtaaagtgggttgaagtaagtaatcacccgttgcccgtctatcggcttataaaatggaatagcagttgcagccggccaaagagttccccaacggtcagcattcagcgaataagtgtcgccaccgaccacacgtaccgtagcccaatctaccgctatatctcccaatgaatagccatcattatcgtcacacgattgcaatgccggcagcatcagtgtcaacattgccatccaaagtagttttatttttttcatctctttttttagttaatccttatatcctataaataaaaaaaccgggcatttactgcaccggtctcctgtttattattgaataaaaaactattttttaagcaatttcaccatttcacgagctgcatgccggggggctccggccggtccgagtaaccgtgccatctcttcgtaaccgtccaacattttgcgacgataatcctcccgaaacagcaaacgctccaattcggcccgcatattctctaccgtcatcgtatcggccaccaactccctgacaacttcacgtccggcaatcagattgaccaacgagataaacttcaccttcaaaatatgccttcggagaaaagacaccaatttgcccaccggagtgtaataacaaaccacctgaggaacacggaaaagagctgtctcgagagtagccgtaccggaagtaactaaggcaacatccgcctgttggagcaaacgataagtccggtcaaaaatcaccgccagttccgttccttttacaaatttggcatagtattccggagaaatgcccggagcagctgccagcacaagctgataaccaggaaaagctgaagcagcccggatcatatcgggcagattatccttaatctcctgttttctgctacctgcaagcaaagctatgataggtttatctgccaattcactatcggcaataaaatcggcaaaggactcctgatgcgacgccttgaaggcggtcacctcatctaccgtcggatttcccacataatgaatgggatatcgatgtcccttgaaaaatcctacctcaaaaggaagtatggaaaaaagctcgtccacatctctttttatattcttgatccgatactctttccatgcccaaatcttgggagagatataataataaaccggtatctttgttttcgcatgcacaaacttagcaatatcgagattaaagcccggataatccaccagaatgaccacatcgggcgaccacgccacgatgtcctccttgcatctcttcatgttggcaaaaatggtcggcaaatgtagcagcacagggataaaccccatgtaggccaactctttataatgcttcaccattgttcctcccacggcagccatcaaatcaccgccaaagaagcgaaattcagcttccgggtcttcctctttcagtgcagccatcaagtgggaagcatgcaaatcgcccgaagcctcgccaacaatcagataatatttcataactcccaggatttcagttcatccataaaatgataagcggtcatatccactacagtaggtgtaatcgctacgtatccattagccagtgcccagtgatcattcttttcgttttccggttcatgatcgataaattctccggttaaccaatagaaattcgcatcgtctctccgggggcaagcctgccattctccgctccaatgtcctttggcctgttcgcagattctcaccccttttatctcctgagtattaggaaaattcacattgaggcaagtcagtggcggaagtcctttctcaagcaccatcgcagctattctccggacataaggtcctgctgcatcaaaatcagctccgggggcgtggtcacaaatagagaaaccgatagaaggaatcccattgagacaaccttcgatcacgatccccatcgtaccggaatagtgcacattggtagcggaattgtcaccatggttgattccaccaacaaccaggtccggcttccggtcgagtatctgattccgtgccagttttatgcagtcggtcggtgtaccggaacatttataaacagtcagtcccacatctttctttaataactgatagtgcaccggctgtgtcaccgtcaatgcacatccactgccggaacgaggggcatccggggccattaccactatctcgcccagcgggcggaggaattttatcagttcactaataccttttgccatgatgccatcgtcattggagacgaggatcagaggtcttttattttccatacaatctaccttatctgttattttatgttttcgaaatgcacaaaagtaacaaaaagaacttgtatcgacaacagaaccaaataggaaagcgaaagtctattcattttccatagatgataactataaaagagaggaataaaaacatccgggtgttttacacaacaacatccggatgttttaagatagaacatggggatgttattatccaaaacatggggatgttttgccacttctcttttcatgtaaacccagaaagggtctgatgtttagccatgcagactacccgtttacaaatcttaatcttctgcaagtgagtaaaaaaaggaatcgatattcaattttaatacgtatatttgcaagctaaaaagagaaaaaatgcccgtatctcacctggcagttattaacaaaacaggtgacttatcaacagattaagcaaagtttctattttttagtaggcgctctgaagatttatcacttatttcgctgccaataaatttagataatatgggaaaaataattgctttggccaatcaaaaaggtggtgtaggaaaaacaacgactacgattaacctcgcagcttcgctggctacgctcgaaaagaaagtactggttgttgatgcagacccacaggcaaatgcctcttccggattgggagtcgacatcaagcaatctgaatgtactatctacgaatgcattatcgacagagccaacgtacaggacgctattcatgacaccgaaattgattcgttgaaagtcatttcatcgcacattaatctcgtaggcgccgaaatagaaatgctaaatctcaaaaaccgcgaaaagatactgaaagaagtgctgactccgttaaaggaagagtatgattatattttgatagactgctctccttcgctgggactgatcacaatcaacgccctcacggcagccgattcggtgattatccccgtacaagcggaatattttgcccttgagggaatcagcaaactgctgaataccatcaagatcatcaaatcgaaactgaacccggcactcgaaatagaaggttttctgctgaccatgtacgactcacgtctgcgtcaagccaaccaaatctatgatgaagtgaaacgccacttccaggaactggtgttcaaaaccgtcatccagcgtaacgtaaaactgagtgaagcccccagctacggtctccccaccatcttatatgatgcagagtccaccggagcgaaaaatcatttggcgctggctaaagaactaataagcagaaacagtaaataaacgaagatatggcaacacagagaagaaatgcattaggccgcgggctggacgccctactctccatggaagaggtgaaaaccgaaggttcttcgtctattaacgaaatagaactgtcgaaaatctccgtcaaccccaaccaaccacgccgtgagtttgatgaaacggcactggaggagttggccgattcgatcagagaaataggaattatccaacccatcaccttacgtaaagtctcggacgacgagtaccagattattgccggagaacgccgctaccgcgcctctcagaaagccggactggatactattcccgcatatatccggacagccgatgatgaaaacgtgatggaaatggcgctgatagagaatatccagcgtgaggatcttaattcagtggaaatcgcactggcctaccagcacctgatagagcaatatgacctgacacaggaacggctgagtgaacgtgtcggcaagaagcgtacgaccattgccaactatctgcgcctgctgaaactgccggcaccgatacaaatggccctgcaaaacaagcagatagacatgggacacgcccgggcactgatcacattaggcgatccgaaactacaagttaaaatattcgaagagattctggaacacggatactccgttcgcaaagtagaagagatcgtgaaatcgctgagcgagggagaagccgtaaagagcggaaccaaaaagataaccccgaaacgggccaaactgcccgaagaattcaatatgctgaaacagcacctttcgggattctttaacaccaaggtacaactgacctgttctgaaaagggaaaaggaaaaataagcatccccttcagcaatgaagaagagttggaacgtatcatggaaatcttcgattcactgaagaaataaatggcaaaaaaaactaaaacatacccgttatacattgccctgcttctctgtttctttcaggtagcagggattgatgtgtatgcacaggagcctgtcaaagtatcccaagactccatttctccggtacgcgaagcccccaaagcacgggcacgccgccatcgcgagccggtcgtttctactccggccaccgacagcgtaaaagtggagaaagcagtcgtcctcccaccgatagacagtttggagaacctgaaacccgccatcgttacggcagacagcctggaggaagtcaaccgacagaacctggaaaggatagaaacacccgtcatgccatcggtcgtaaaggcagatagcctgccacccgtcatgcccaagaagcttttcgtacctaacccgacgaaagccacttggtatgccatcgtatttccaggcggaggacaaatttataaccgcaaatactggaagttacctattatatatggtggatttgccggatgtgcttacgcattgagctggaacgggaaaatgtataaagactatgctcaggcgtatatggatattatggataacaatcctaataccaacagttttcaggatttgcttcctccgaatcataactataccgatacgcaactgaaagacctgctccgcaaacgaaaggacacataccggcgctatcgggatctcagtatattcgccgtcatcggtgtatatctgatttccatcatcgacgcctatgtggatgcggaactatcgaatttcgacatatcacccgacctgagtatgagggtggaacctactattataaataacaacccgttgcaacccggcagcaagtcggtaggcgtgcaatgcagcctcagattttaacccatgaagattgaacaaataagaatgaagaaattagcaaactattgccccctgattttattatttttgtttgccacacccaaggtaaacgcacagagtgtagacgtagtgattcgcgacaacggcaaagaacgccaagagagcatcgagcttcccaaaagtatgacttatcctctcgatagcctgctcaacgactggaaagccaagaattatatcgacttaggaaaagactgcagtacagcggagatcaacccgctgttcagcgactccgtatacatcgaccgcctatcacgcatgccgaccgttatggaaatgccatacaacgaaattgtacgtaaatttattgatatgtatgccggacgcctgcggaatcaagtctcttttatgttgagtgcctgcaacttctatatgcctatctttgaggaggccctcgatgcgtataatttaccattggaattgaaatatctgcctattatcgaatcggccttgaacccgtcggcagtatcgcgcgccggtgcaggaggcttgtggcagttcatgatcggaaccggcaaaatgtacggtctggagtcaaacagcctggtggacgaccgtcgtgacccgataaaagcaacctgggcagcagcacgctacctgaaggatctatatgacatttatcatgactggaaccttgtgattgcggcttacaattgcggaccgggcactatcaacaaagccatccgccgctcgggaggagaaaccgactattggagtatttataattatctgcccaaagaaacaagaggttacgtaccggcatttatcgccgcgaactatgtaatgacctattactgtgatcacaatatctgcccgatggaaaccaatattcccgaaagcactgatacgattcaagttaacaaaaacctccatttccagcagatcgccgacttatgcaacgtcccaatggaccaaatcagaagtctcaatccacaatataaaaaagaaatcataccgggcgaaagcaagtcgtacacactgcgccttccacaaaacgcggtcagttcgttcatcgaccgtcaggatacgatttatgcccaccgtgccggcgaactgttcaagaatcggcgtacagtggccatcagggacgacagttcagcctccaagaggagaggtagctctgccaaagccggcagtggtacacccacttactataaaatcaaaaacggggataccctgggagccattgcggcaaaatatggtgtacgcgtaaaagatcttcagaactggaacggattgcggggaactaacatttccgcaggaaaacgtttgaaaatatacaaataaatcgcctttcgcttgcctgatgtttaaatttgattatttttgcagaaaaggaacgaaaggactaaattatggacactgagaaccagaaagaaatagctgaagagcagatgattgaacaagcgtttcaggaattgctgaacgattatcttgctaccaagcaccgcaaacgtattgagattataaccaaggccttcaatttcgccaatcaggcacataaaggcatcaaacgacgctcgggggaaccgtatatcatgcaccccattgccgtcgcgaagatcgtatgcaatgaaataggccttggctcgacttccatttgtgccgctttgctgcacgatgttgtcgaggacaccgattatacagtagaagatatcgaaaatatcttcggggccaagattgcacagattgtcgacggactgaccaaaatctccggaggtatttttggtgaccgggcttcggcacaagcagaaaacttcaagaaactcctgctcaccatgtctgatgatatccgggtgatcctgatcaagattgccgaccgcctgcacaacatgcgtacactcggttccatgttgcccaacaagcaatataagattgcaggcgaaaccctttatatttacgccccccttgccaatcgcctgggactgtataagatcaagacggaactggaaaacctcagtttcaaatatgaacatcctgaagaatatcaggagattgaagaaaagctgaacgcaacagccgccgaacgcgataaggtattcaacgaattcaccgctcccatacgcgagcagttggataaaatgggattaaaatatcgaatcctggcacgtgtgaagtccatctactctatctggaacaagatgcagaccaagcatgttcctttcgaagagatttatgatcttctggctgtacggatcattttcgaaccacgcaacatagacgaggaactgaacgactgtttcgatatttatgtttctatctccaaaatctataaaccgcatcccgaccgtctgcgcgactgggtgagccaccccaaagctaacggataccaggcactgcacgtcactttgatgggcaataatggccagtggatcgaagtccagatacgcagtgagcggatgaacgatgtagccgaacagggatttgccgctcactggaaatataaagaaggaggaggcagcgaagacgaaggcgaactggagaaatggttgcgtaccattaaagagatactcgacgatccgcagccggatgccatcgactttctcgatacaatcaaattaaacttattcgcctcggaaatctttgtcttcaccccgaaaggagagctcaaaaccatgccgcagaactccactgccctggatttcgccttctcactgcacacggatataggaagccactgtataggtgccaaagtgaatcataaactggtgccgctaagccataagctgcaaagtggtgaccaagtggaaatcctgacatccaagtcacagcgtgtacagccgcaatgggaagtgtttgccactactgcgcgtgcaagggctaagattgcggctattctgcgtaaggaacgaaaaaccttccagaaagaaggagaagaattgttgaatgaattctttaagaaagaagagatccgcccggaggcagccgtcatcgagaagttgtgcaaactgcataacatgaagaacgaagaagagtttcttgtagccatcggtaacaaaaccatcgttctgggagatgccgacaaaaatgaactgaaagagaaacaaagcagcaactggatgaagtatctgactttctcttttggcaataataaggataaacagcaggaggaaaaagaaccgcaggaaaaggaaaaaatcaacaccaaacaaattctcaaactgacggaagatgccctgcaaaagaaatatatcatggccgaatgttgtcatcccatccccggtgacgacgtactgggatacatggacgagaatgaccgcatcatcatccacaagcgtcaatgtccggtagcggccaaactgaaaagcagctacggcaaccgcatcattgccactgaatgggatacacacaagaagctttcgttcctggtatacatttatattaaaggaatagataatgtagggctgctgaatgaaatcacacaagttatctcacgccagcttaatgtgaatatccggaaactggatatggaaacggacgatggcattttcgaaggaaaggtccaattgtatgtgcacgatgtggaagatgtaaaagctatttgcaacaacctgcgcaagattccgaatataaagtcggtgacacgtgtagaaaactaacaaaacaataaattaaataacgggaagaggaacaatgagtgcttgaacaatcactcattgctcctcttcccgtcttgttgaaaacccatccaaagcatccctcattccgatcaactcttgacgaatctgcttcaaacggtcgataatttcaaaattccggatcgtcgcttccctgttatctttcagtttctggcgagctccgggcagagtcattcctctttctttcaccaaatgatagatcaggcgaatggtttccacatcctctttcctatactggcgcacgccacgactccctttctttggggatatctgcgggaactccttttcccagaaacgaagcaacgattcgttgacatcaaacatttgggcaacttcactgatagagtaatataatttcaggtctctctccgtattttgcatgattttcttctcttttagtcaaatactttaccgtggttggcggcaatctgaatcatccgttcataatcttccgcactcaaatccataaagtaatagttcaccggattgaccacctgtcctttgacgtgcacttcgtaatgcaaatgcgggccggtactctttcccgtacttcctaccccggctataacttcaccacgcacgacctttttacccagtttagtacgaaactcctgtaaatgggcgtagcgggtacgatatccgaaaccatggtcaatctcgacagtattgccataaccggtctcccatcccattttcacaaccgtaccatcacccgtggcatacacgtccgtacccggatgcgccgagaagtccatgccggcatgaaatttcgttgttccgtagatggggtcaatccgtgtcccataaccggatgctgtcttccgaaggtccttattggatataggctggatggcgggaatacatttcagcatctgatcatgatttttacacattgccactacatcgtcaaatgacttggactggatataaagctgtttgctcagtacatccatcttttgggtagtgttgatcaccaactttgagttagccatatccatcaattgttcgtaacggttcgtaccaccataaccggcctgacgaatagccggtgaaacaggatcggccataaaaatcactctatagaggttatcatcacgctgctggatatcctgaagcacccccatcgcctcgtcaagacgacgagagagtacgttatattgcgccaagagttggctattttctttccgcaactccttctctgagggagaaccgaaaatcagtaacagaatgatgaaactgccggctcccagtcccattcctataaaaagacggcggagaatgctcagcgcccgttgtcggacagtcggataaatccggtcataagtctgcgtttgcggattatagatgtagtaaactttgcgcatcttataaatatttcgcttgttaatacggcaaaaataataaaaacaagctatctttgcactgcttttttcagaatattaacctcaacaatagatatatagaagtatgttgactgcaaaagaaaccagagattcgtttaagaatttcttcgagtcaaaaggacatcagattgttccttcggctccaatggtgattaaagatgaccccaccctgatgtttaccaatgcagggatgaaccagtttaaagatattattttgggtaaccacccggcgaaataccacagagtcgcggactcacaaaagtgccttcgtgtaagcggcaagcacaatgaccttgaagaagtaggacacgatacctaccatcacaccatgttcgaaatgctgggtaactggtcgttcggtgattacttcaagaaagaagccatcagttgggcatgggaatatctggtagacgtcctgaaactgaatccggaacacctgtatgcaacagtattcgaaggtagcccggaagagggcctggagcgtgataacgaggccgcctcttactgggagcaatacttgcctaaagaccatatcatcaacggaaacaaacatgataacttttgggaaatgggtgatacaggcccttgcggtccgtgctcggagatccacatcgacctccgtcctgcagaagagcgtgccaagatttcaggacgcgacttggtgaaccacgatcatccccaggttatcgaaatctggaatcttgtattcatgcaatacaactgcaaagccgacagcactcttgagccgcttccggcgaaagtgatcgataccggtatgggattcgaacgcctgtgcatggctttgcagggtaaaacatccaattacgacacggacgtattccagccgttgattaaagcaattgcccaaatggccggaacggaatatggcaaaaatgaacagaacgacattgccatgcgtgttattgccgaccacatccgtaccattgcgttctcaattactgacggacaattgccttcgaatgccaaggccggttacgtgattcgtcgtatcctgcgtcgtgccgttcgttacggatatacattccttggacagaaacaggcatttatgtacaaattgcttccggttctgattgacagcatgggagatgcctatccggaactgattgctcaaaaagagttgatcgaaaaggttatcaaagaagaagaagaatcattcctccgtactttggaaaccggtatccgcctgctcgataaaacaatggctgacaccaaagctaacggaaagactgaaatcagcggtaaagacgctttcacattatacgatacattcggtttcccactcgacctgacagagttgattctgcgtgaaaatggtatgacagtcaatgtcgaagagttcgatgccgaaatgcaacagcagaaacaacgtgcccgcaatgcagctgccatagagacaggtgactggatcatactgaaagaaggaactactgagtttgtaggttacgattacacggaatacgaaacttccatcctgcgttatcgccaggtgaaacagaaaaaccagactctgtatcagatcgtactggactacactccgttctatgcagagagcggtggccaggtaggcgacaccggtgtattggtaaacgaattcgagactatcgaagtaatcgacaccaagaaagaaaataatcttccgatacatattacaaagaaactgcccgaacatccggaagctccgatgatggcatgtgtagacacagacaaacgtgccgcttgtgcagccaatcactcggctacccacttgctggacgaagcgctccgtgaagttttaggcgaacatgtagagcagaaaggatcattggttacaccggactctctgcgttttgacttctctcacttccagaaagtgacagacgaagaactccgcaaagtagagcatctggtaaacgccaagatacgtgccaatgttccattacaggaacaccgcaacatccctatcgaagaagcgaaagaactgggcgcaatcgccctgttcggcgagaaatatggtgaccacgtacgtgttatccagtttggctcatccattgaattctgtggaggtacccacgttgccgctaccggaaatatcggtatggtaaaaattatctctgaaagttcggtagctgccggtgtacgccgtatcgaagcatataccggagctcgcgtagaagaaatgctggatacgatccaggatactttgagcgacttgaaagctcttttcaacaatgctcccgaccttggtgtggccattcgcaagtatatcgacgaaaacgcaggactgaaaaaacaggtggaagacttcatgaaagaaaaagaagctgccgtcaaagaacgcctgctgaagaatgtacaagagattaacggcattaaagtcattaagttctgcttgccgatgcccgccgaagtagtgaagaacatcgctttccaacttcgtggtgaaattacagaaaatctcttctttgtagccggaacagtagatgccaataaaccaatgctgactgttatgatcagtgacaacctggttgccggcggactgaaagcaggtaatctggtgaaagaagctgccaaactgattcagggtggcggtggcggtcaacctcacttcgcaacagccggtggcaagaatccggacggactgaacgctgctgttgagaaggtactggaactggcaggaatctaaaggggccgactcttacgagtgggtaccacgctatccgaaagttcccatataaagttagaagtcagattaaacatcatagactctccgagtaaagagtccggtactgcaccggactctttctattttattccccttcatcgaatgtccatatcacaaactcactttatcccccggaaagagcaagaatgatcttgtttattctactccttctactacagtaacggagaagagtggacagactcagcctcatccgagattcttgatcgcccgaaactcttttggagagatacccgtattctttttaaagaaatgcgtcaaataggattggtccggaaaatgcagttgctcagctatttctgttacagataaacgaggctcattcaacagcacttttatttcggccaccaactgttcatcaataagctgtttaggcttctttccatctaaatgccgaactgtaattttatgcaggtaacgagacgatatacaaagtttttcggcataaaaagctacctgatgttcatgcatactatattcacggatcaattgcataaaccgatggcaaagtaattgcgtacgactatattgcttactgacagccaatttttccggaatcgtattaaacagccacataagcagactttgcaaaaagttgtgctcttgttgtcccctgaactggggcatcggttcggtaaacaacatttgtgccatatccatccacaaattgatctgccgccaggtcttctgactccgttcgtcagcagtatgatggtaacagggatgttcgtgagtataattaaagtaaggtgtatcgataggtaacatggcatttaaaaatgcttctttaggaaacatcaacattttcacctgtaaatctccggaagtttcgagcacttgcagcaaaccgccggtcaggaagatcaattctgtctgttcattgaatatatatttctgcacaccggtagagacaacggcttctccctgcgtacaaatcagatagataccacaccggaaatggtatggggccgatatcaaagaggccaggtcggtctcttcatatcggatcgtttttgtatcggcaagcaatcggtctgttttcataaaagtctgttttaggcaacaaatgtaggcttatttttgatattcgggctattttgttctgaaaacaacatgttttgtacagattagcctatattcgattcctaacagatggagtaattttgcaaccgtattgatcaaagagaatagcaatgactgacagacagaattccagacggttcttattattatttttaggtgtattaagtgctttcggcccttttataatggacatgtatttgcctaccttaccggctatggcagattttttccacacttcatcttctatggtacaattgggactcaccaccagcatgattggcttggctgccggacaattaattttcggtcccttgagtgacaagtgcgggcgacgtcctccattacttctggccatgattctgttcctgctcgctacggtgggatgcatcttttcacataccatttcacaatttgtgacatcccgattcttacaaggcattgccggagcaggtggtgtagtgatttcccgctccatagctaccgacgagtattcgggacagcaactggccggcatgcttgccgttatcggcggaataaatggaatagctacagtcatcgcccctatcggaggaggtatactggctcagataacaagctggcaaggcatctttatctgcttattctttatgggagtggttctcctatccggaagcttacatttgaacgaatcacttccggcaaaacacagacagactgtgagttggcaagacttataccatagtttcggagaagtcctccgcaaccgccgctatgtaggctacgtcctgcaatatggtttcactatgggaatactgtttgtcaatatctcttctgcaccattcatcatgcagcaacactacggactctctcctctatccttcagcctctgtttcggaatcaatgcgatagcaatggttatcttttcagccatatcgataaaattacctaccatggaacgggctttatatataggaagccggggcatgctgtcagtatctgcactattgatggtattcttgtccttgggatgtgatttttggatctacgagttattgatcttcgctctactctcgatgattggcatgacttttacagcatccaacaccttggccatggagtgtgagcgacggaatgcaggcattgcttcggcacttttgggagccaccgggtttgcattcggaggtattgtatcgccattggtaagtttaggagatatgatgacctctaccggaatattgtttttagcaggttctgcctgtgcctatgcatgcacccgatatgtactgtcacaatccgttcaaccctccggagtgctatatcattgaaagttactatggcgttctttcctgacaaaacgctaaaaggagatttaaaatccaatgcaaccgactaaagataaagtcaaagcataccataagccatgattcactaacaaacagatacttaagattcaagatgttaattgaaaaccaaaggatcctgcctttaaaaccaacaatcctttggcttttaaagcaacggttctcctcttttcaacctataagaactccatccaaatcatctcatacgttcgattgtacgccgaggaacagatgtattttatctatacatcccgtttttcaaaacattaagaagggatcactgaaacggaaagcatattatctcccccggctgtttataatgccccctccgccctcatgataacgagtcgaaatacaaaaagacgaatcaatcagcacacaagctctttcgttttacatttatattctctacctttgcacactaaatcaatcaattacttaaaaaactctaacccaagccgcatgaaagtactttttcattcactatttattcttttatttgttttcactgcctgtacgtctacccctaaacaggcaactattgactatacccaatatgtaaacccatttatcggaaccgatttcaccggtaatacctatcccggagcacaagtccctttcggcatggtacaacttagtccggacaacggacttcccggctgggaccgtatctccggatatttttatcccgatagcactattgccggattcagccatacccacctttctggtacgggagcaggcgacttatatgacatctcttttatgcccgtcaccctgccttataaagaagcagaagctccgttaggtatttactccaaattttcccatcaggacgaaagtgccacggcaggatattaccaggtactgctgaaagattacggcatcaacgtcgaattgacggcaaccgaacgatgcggtattcagcgttacacttttcctgaagccaaagccgctatcttcctcaacctgaaaaaagctatgaattgggactttaccaatgattcgcacatcgaagttatcgactcggtaaccattcaaggataccgcttctccgacggatgggcacgcgaccagcatgtctatttccgtacacgcttctctaaaccttttacagccgttcaaatggatacaactgccatcctgaaagacggaaaacgaatgggtacggctaccatagcccgattcgatttcgacacacaaaaaggagagcaaatacttgtcaacacagccctttccggtgtcagcatggaaggagcagctcaaaatctggcagccgaagttccggaggataatttcgataaatatcgtgaggctgcacgggacaactggaaccggcaactctctaaaatcgcagtcaaaggcgaccataaggacgattgggtaaacttctacaccgcactctatcacaccatgcttgctcctaccatttatagcgatgtcgacggttcgtattacggtccggacaaaaaggttcatcgcacagacggatgggtaaactacagtactttctctttatgggatacataccgcgccgcacatcctctatttacctataccgaacccgaacgtaccaacgatatggttcaatcatttctggctttctacgaacagaacggacgcctgccggtttggaatttctacggtagtgaaacagatatgatgattggctatcatgccgttccggtcatcgtggatgcttatctgaaaggtattggaaactttgatccggaaaaggcattggaagcttgtgtagccactgccaacctggacaattaccgcggaattggtgcttataaagaactgggatatgttcctttcaatgaaaaagatagttataatgccgaaaactggtcgttatccaaaacacttgaatacgcttatgatgattactgcattgcccgcatggcagaaaaactgggaaagaaagagattgcggacgaattctataagcggtcgcaaaactatcgtaacgtatacaatccggcaacctcgttcatgcaacctcgtgatgacaagggagaatttcagaaagactttaaagcagatgcttatacaccgcatatctgcgaaagcaacggttggcaatatttctggtcggtacagcatgacatagacggactgatcggtctgacaggcggaaaagaacgttttgcacaaaagctggacagcatgttcaccttccatccttcggccgacgacgaacttccgctcttcagtaccggaatgataggccaatatgctcacggaaacgaaccgagccatcacgtcatctacctttataatgcggtagaccaaccctggaaaacccaggagtatgtggcaaaagtaatgaacgaactctacctgaacagccctgccggactctgcggaaacgaagactgcggccagatgtcggcttggtatgtattcagcgccatgggattctatccggtaaatccgataagcggtcaatatgaaataggtactccccttttcccggaagtgcaactgcaccttgacaacgggaaaacattcactgtcaaagctccggctgtcagcaaagagaatatctatatccgatcaaccaaactgaatggaaaaccctatgataaaagttacattactcatgaacagattatgagtggtgcaacccttgagtttgaaatgggaaaggagaaagttacgagtgatcaataacttgtagcccgcacccccaaaaccagcagctaaaaaagatggacgacacatttgatataacctacaaagccctgttccggaggtactatccgaacctgatgttctacgccacccgcctggtgggcgatgaagaagcagaggatgtagtacaggatgtattcgtggaactgtggaaacgaagagattccatggtaataggcgaccagatccaagccttcctctatcgggcggtatatacccgggccttgaatgtgctgaaacaccgcagcatagaggacggatattgcgctgctgtggaagaaatcaaccaaaaacgagcggaattctatcagccggacaacaacgaagtaatccggcggatagaagaccgcgaattgcgaaacgaaatctaccaagccattaacgagctaccggacaaatgcaaggaagtgtttaagttgagctatctgcacgaaatgaagaataaagaaatagccgacgtgatgggagtctctttacgtacggtagaagcccacatgtacaaggcactgaagttcctacgaaaccgtctcggccatttatggtttttatttctactattttttatcaaatagataagtgtttttaaagatttagttgtttctattatataatgaaaaagaaaagatgaataatctgagcgaagacatattgatgagatatctgacaggcgaatgttctgacgaagattttgccagagtgaacgcttggatcaaagaatcagacgataatgcccgccgacttttccgaatggaagaggtatatcatttgggcagacacgacagctttccggatcagaaaaaagttgcccgggcagaagcacgactatacaagaaactggctcaggaagatgcacatagccgcaaagtgatcagaatgcaccaatggatgcgatatgccgctatcatcgtgctcgcactgatgataggcaccggaggcggatacctgtactatcaggccgatccgacccggaatatgataacggcctcgtccacggatggcaaagtgaaagaagtgatgttgcccgatggcacaaaagtatggctcaatcaatcggccaccctgagatatcccaaggaattctcagaatccgaaagagatgtatatctcgatggagaagcttatttcgaagtcactaaaaaccgtcggtgtcctttcgttgtagagagtgaggctatgcgtatcaaagtgttgggaaccactttcaatttcaagtgcgacaagagtcacaaactggcagaagcaaccttgatcgaaggagaaatagaagtgagaggaaaccacgatgaaggaatgattattctttcgcccggacaaaaggccgaactgaataaaacaacccgcagactggtggtgaagcaagtagatgccaaattggatgccgtatggcacaatgacctgatcccgtttgaacaggcggacatttttgccatcacccggacgttagaacgcttttatgatgtgaaaatcattctttcacccgacattaagtccgacaaaacttactcgggtgtattgaagaaaaaagataatatagagtctgtactccaatcgttggacaactctatacctatcaattataagattgtgggagacaatatctttatttcttcacgtaacaaatgagcaactaattaaaataaacatacagtaccatgaaatttaaaacattcctggcgggatgtttaggaggcttattgtctctgaactcctgcacaaactcgccggacatgactgattacacagcttatgtcaacccatttatcggtacaggcggacacggtcatacttttccgggcgccattgtcccccatggcatgatttctcccagcccagacacccgcatagatgggtgggatgcctgctcgggatattattacgcagattccaccatcaacggattctcacacacccatttgagcggaactggttgttgcgactatggagatgtactactgatgcctacggtgggcgaacaaaagtacctccccacaggttcacagagccagcagatggcttatgcttctgccttttcacatcaaaatgagactgccgaaccgggctattactcagtcttcctggatacttatcaagtaaaagccgaactgactgcaagcaaacgggcagctatccacaggtatacttttcctgaaagtaaagaagcaggattcatcctcgacttggactacagtctgcaacggcagaccaacaaagagatggaaatagaggtcatcagccccactgaaatctgcggccgtaaaaagaccatgtactgggctttcgaccaatatatcaacttttatgcaaaattctcgaaacctttcacctacacgttggtgactgattcgatggcactcgacgatggaggcagactgctgcctacctgtaaagcattacttcactttgacacgaccaaagacgaacaagtgtttgtcaaagtcggaatctctgctgtggacatagagggtgcacgcaaaaatgtagaaactgaaataccagactgggattttgacggagtacgtaaagacgcacgcaaagcgtggaatgaaacgttatcgaagattgatattactaccaatgataaaaatgacaaaaccatcttctataccgcactctaccacactgccattagcccgaatctgtttacggacgtagacggacgttatctgggtatggatctgcaagtacatcaaggagatacactgaatccgatgtataccattttttctttatgggataccttccgtgcactgcatccgctaatgaccattatagatccggatctgaacaatgctttcatccgttcactgatcaaaaagcatcaggaggggggcattttcccaatgtgggacatggcttccaactataccggtacaatgattggttaccatgccgttcccgtcattgtagatgcatatatgaaaggcgatcgtaatttcgacatccaagaagcttaccgagcctgcgtgcgtgcggcagaatatgatacaacaggaatcaaatgccccgatctggtgttaccccatctgatgccgaaagccaaatattataaaaactcaatcggctacgtaccgtgtgaccgcgaaaacgaatcggttgccaaggccttggagtacgcttatgacgactggtgtatttcagtatttgccgatgcattgaacgattacgacacccgggacaaatacgcacgtttcgcaaaagcctacgagttttacttcgatccgggaacccgctttatgcgcggattggacagtaagggcgaatggcgcactccattcaatccacgctcttcaactcaccgcaacgatgattattgtgaagggactgcctggcaatggacctggttcgttccacacgacatcgaaggattggtaaaactaatgggcggcgaagatgccttcgtcggtaaactggattctctgtttaccgccgactcttcactggaaggcgaaacaacctcctcggacatcagcggactgatcggacaatatgcccacggcaacgaacccagccaccacgtgattcatatgtacaactatgtgaaccgtccgtggaggacgcaagaattggtagacagcatataccgtagccaatatgccaatgccgtagacggactctcgggaaatgaagattgcggacaaatgtcggcttggtatgtactcaattctatgggattctatcaggtatgtccggggaaaccggtttattctatcggacgccccgcattcgataaagccgtagtaaacctgcccgatggcaaaaagtttacagtgatagctaagaataactcgaaaaagaataagtatatcaaaagcatgacactgaacggaaaaccattggataaaccattctttacgcatgacgatatcatagcaggcagtacgttggaaatagaaatgacagaccggcggacccaaccctaagaaagtactctgtttcatcacagattatacgaatatgtagcctacacggcaccgatgatagaaaatatataatatccatatagcaatacacttatccacaccatgagaaaaattcttttgaccgcttgccttatagcttgctcactaatggctgaggccaaagactggacccaatacgtaaacccactgatgggaacgcagtcttctttcgaattatcaaccgggaacacctatcccgctattgcacgtccgtggggaatgaacttctggacaccgcaaacgggcaagatgggggacggatggcaatacacgtatacagccaacaaaatcaggggattcaagcaaacccaccaacccagcccatggatcaatgattacggacaattctccatcatgcccgtcacaggcaaacttgagtttgatgaagaaaaacgtgccagttggttcagtcataaaggtgaaatagcaactccttcctactataaagtatatttggccgagcacgatgtagtgaccgaaatgactccgacagaacgtgcggttctgttccgtttcacctttcccgaaaacgaacactcgtacattgtagtagacgcatttgacaagggttcctacgtaaaagtaattccggaagagaacaagataatcggctacaccacccgtaacagtggtggagtgcccgagaatttcaagaactacttcgttatcgagttcgacaaacctttcacttacaaaggcacttttgcagacaaaaagctggaagaaggcaacttggagcagaaagccgaccatacgggagccatcattggtttcagtacccgtaaaggtgaaatcgtgcatgcccgtatagcttcttcgttcattagttttgaacaagcggctcagaaccttaaagaattgggtaacgactcttttgagcaacttgcacaaaaagggaatgatgcctggaacaatgtattaggtaaaatagaagtagaaggcggcaatctggaccagtaccgtacattctactcctgcctctaccgttctctgctattcccccgcaaattctatgagtttacggcagacgggcaaccggttcattatagtccttacaacggtcaggtactccccggatatatgtacaccgatacaggattttgggatacattccgttgtttgtttccattcctgaacctgatgtacccatcggtaaacaaagaaatacaagaaggccttatcaatacttataaggaaagcggtttctttccggaatgggcgagtcccggacacagaggttgtatgataggcaataactctgcttcagtattggtagacgcctatatgaaaggagtaaaggtagacgatgtgaaaactctgtatgaagggctgattcacggtacagagaatgtacatccggaagtctcttctaccggacgcttagggtatcagtattacaataagctgggctacgtaccctatgacgtgaaaatcaatgaaaatacagcccgcacattagaatacgcttacgatgactggtgcatctaccaactggctaaagccctgaaccgaccgaaaaaagaaattgaactatttgccaaacgtgccatgaactaccggaatgtattcgacaaagaaagcaaactgatgcgtggccgtaatgaaaacggccagttccagtcaccattctctccgttgaagtggggagatgcattcacagaaggtaacagctggcattactcctggtcggtatttcacgacccgcaaggattaatcgatctgatgggaggcaaaaagatgtttatcacgatgctggactccgtatttgcagttcctcctgtattcgacgacagttattatggacaggtgatccatgaaatccgcgaaatgaccgtgatgaacatgggtaactatgcacacggcaaccaaccgatacagcacatgatttacttgtacaattatgccggacagccctggaaagcgcaatactggcttcgtcaagtaatggaccgcatgtatactccgggtcctgacggttactgtggcgacgaggacaacggacagacctctgcctggtatgtattctcagccctcggattctatccggtatgtccgggaacagatgagtatgtcattggagcccctctattcaaaaaggcaacgctacactttgaaaatggcaataatcttgtgatcgatgcacagaataacagtaaggagaatctttatatcgaatccctccgggtcaacgggcaagaatcaacccggaactatctgaaacatgccgatctgctgcgaggcggaaccattgaattcaaaatgggttcacaccccaacctcaacagaggtatcaacgatgatgatgccccctattcattctccaagatgaaatagtcctctctctttagacaactcatatcccctgagggtgcatacccataatccaatacggatacacgtacgcatcctcagggacatataaataattctcaaaaaagttagtaactgaagtaagtgtttctttcgggacacttgttttattaacatcaagggcacaaaagccgttgacttatattataaatacaatgcttaaaccttgtatgtttttaaagttaactaattaatttaattatagtcaatgaaaaacaaaatcctatttcaaagacccaggctgctcaaagcatcgctggttcttcttttagctgccgctcctatccagtggtcatttgcacaattcacattttcaacttcccgcactacattggggcaagtcatcaaaacggtgcaatctcagtctaagtatcaattcttttatgatgaccaatcgtcaaacatgccgattgagaatctgaacgtaaagaatgtaagcctggaacaactgttgaatactgcgctcaaaggcaaaaacctgacatacaaaatcgaggataacattgtttatctgtcccaggcttccaaacaacaggatccggttcaggcatcagccaaacgtcagatcagcggtacggttgtagatgctaacggcgaggcgctgatcggcgtcaatgtatctgttaagggtaccagcacaggagccattaccgacctggagggtaaatacaccctgactgtcaatgatccgaaagctgaaatcgtattctcctatatcggatacaaacaacaagtgttgcccgctaaagaaagcattctgaatgtaacgatgagtgaagatacccagatgatcagtgaagtggttgtaaccgctttgggcatcaaacgtgagaagaaaatgttaggatatgccgtacaggaaatcaaaggcgaccaactgaaccagacaggggatccttcagtgaccagtgcattgcaaggtaaagtagccggtctgcaaatgaatacagccggaactggcctgggtggttctaccaagattacaatccgcggtaactcttctctcgcagataacaaccagccgctctagattgtagacggtgtaccgttcagtgacaataataactcggatgctacctattacggtggtgtcgaccgtggtggttcatccgtcgatatcaacccggaagatattgaatcgatctctgtactgaaaggtccgaatgccgccgctctctacggttcgcgtgccggtaacggtgtgatcttggtcacaaccaaaaaaggtagcaagaaagatggattcggagtacgctatagcggcaacttcacttggagccaggtagccgaaactcttgaaatgcaagatcgttacggacagggccacattgtgactcaggatgaaaacaagaatcctctgtctcaatattatgccaaatatgatccgacagactcttccagttggggaccggtattggacggaagcatgcagaaagcctggaacggcgatacctatgcattctctaaatacggcaacaaactgaaagattacttcgataccggtttcgcgcaaaaccacaatgtatcggtgagcaacgtaacagataaatcgcactttcgtgcttctttcggcagctcgaacaataagggcgtattcccgaacgagaagctcaaccgaatcaacctcgacctgaatgccggaatggaaatgaacaaatatctctctatggacggaaagatttcactttcacgtaccaaagcagaagatcgtccttacttcggtacttacggagcaatcgctcaattgatgagtattcctaacaatattcgcctgaacgacctgaaacaatattcgacagatggcaatgcacacgtaaactggacaggtcctactgccggtatccgtaacccttattacgtcctgaaccagcgccacaactctgacgaacgttggagagcattcggatattatggaatgaaaatcaactttactgactggttgcacttgtctgccaaatatgcattcgattattatcgtacccgaatcgaagaaacgaacgcaggtgacggtatcaacggtgagagcagtatcaaagatatcaccgatgacgaaatgaaccgcgaggaacagaacttcttcgaatcgaacgcagaaatcgtattgatgggtgacaaacagctgactgacaatttccgtttgggattcacggtaggtggtaacttcatgtaccagaattatgaatcactgaatgccggcgtacgcaatatgctggataagggacaatggattttcaatgcagccaatatgctgaacactgccggagaaaccggacatgaacgcgcaacaaattcagtattcggatctttgcaactctcttggaaagaatatctgtcactagacttgactgcccgtaacgactggtcgtctacactgccgaagaagaacaactctttcttctacccgtctgccaacttaagttttgtcgtttctgattttgtccgttcactggacaaaacactgcccaactggctgactttcgccaaggtacgtttgtctgccgcacaagtaggtaaagatacggacccgtatcagttatacaatacgtacggatttaaatttgaaaaaggtgagctgattccaagcaaatcgaacgtgaaaatgaacgaccagctgaaaccggaaatctcttcttcttacgaagcaggtttggatatgaagttcctcaacaaccgtttgggatttgactttacctattattatagccgcacgaagaaccagatcatgaaagtgcccgccgctgctccctggagtggaggcaaatgggtcaatgccggtctgatcaccaacaaaggtttcgaaatgatgatctactctacaccggtacaattgaaagacttctctttcgatctgaatgtcaatctggccaagaacgtatcgaacgtagagaaactggccgacggtgtagactacatctacttcaatggcgactctaacttcccgatcaacgtaggtgcacgcccgggtcacaaattgggtgaaatctatgccaagactctctacaaacgtgacgaacagggcaacatcattataaataaagagaacggcttacctatgacgaccacagatgctgacgaacgcctggctaaacctatcggcaacatccagcctaacttgctgatgtctgtatctccgtcgttcacctacaaaggctttacactgtcggccatgttcgatatgaaattcggtggcgatatcatctctatctccgaaatgaacgcaacaggctcgggtatggctaaacgtactatgaatcgtggagaaagcgataactttatgatgatcttcccgggtgtatacgaagacggaacacccaatactcagaagatctcagcatccaactattacggagcacagaacgcagaagactttatctatgatgcttctttcatcaagctgaaggaactggccatcggctatacattccccaaaagcatgctgaagaaaacgccgatcaactcgctgaatgtttcgttcgtagcacgtaacctggcttatctgttgaaacatactccgggaacaagtccggaaggtggttacgacacaaccatgttctctcaagccatcgactttatggctgtaccttatacccgtacattcggattctcagttaaccttggtttctaattttataaattaaagatatagtatgaaaatcaaaatatacaaatcgcttgtcatgtgcactctcctgttaggactggctgcatgtaatgatttcgaagaaatgaataccgatccctacgcaccggtatacgatccggaaataatcggtgccacacctgacggaatcgatatcgactacgaactgacacccagtgcactgaaaagccttcaaggcacggaaagcgccatcggttcggtgttcgccaacctgacttacgaaggactgtataatgattatcaggttacgaccaacctgactcatgacatctacgctgcttactttgccaacaacgttagcggattcgtgaccaactcgcctacctacggttataacgacggatggtccaaaagacgctgggagcacttctacgataaccgcactgtagaagaatacagtcagttgatcaaaacattctggttctgcggaaaagaacgctatcacaatgcgttctatatgacccgtatctactacgcattcctgatctctatgcaaacagacacttatggagccattccattggaatactacgtaaaaggtgcaatgcccacagacgagaaagtgaaatacatggatcagaaagatgtatacgacgttatctttaaaatgctcgatcaggccatcactgcactgcacaacactccttctactgcacaatacagcctgggtgaaaacgacaagtgctttggaggcgacaaagacaaatggcttcgttttgccaatacccttcgtttacgattggcactacgtgtatcgaatgtagatccccaacttgctaaagaacagggtgagaaagccatggccgaccctgccggattgatgcaaaacgatgatgataatatgaagcagactcccaaatactcgtacatcacgggtggtaacgaaaacatctacacacttctgtacaactggagtgctaacgtagtgttatccaaagaaatggaacgagcttataaagaacaatcgaccattctcgacccacgttgcgaaatattgtggtggagaccgaccgctcttgaggacctgaaccaaactgaacccaaagaagacatgacaaaagacttcaatggttgcgaaaacggtgagacttcattgggaggaagctacacaacgacttattctccgagccgtgtattcatcaagcaagatcagaaaaaactcgaccgcaaacattggtggtgttatgcacgcgaaatagtatggctgggttactccgaaagcctgttcctccgagcagaagccgctctccgaggatgggccggtgctaaaggtaccgctgaagatctctataaggaaggcattgaagcttccttcaactactatcagattggtgctgacgaggaaggacaagaaaagatcagcaaatacatggaaggattgaaaggcttacaagccttcaagagtggtgacagagaagcacagttggaacaaatcatcacccagaaatggattgccgtatatcccaacggtaacgaaggatgggcagagttccgccgtacagactatccccgctatatgaaaacacctaaaggaggcaacaactcagggggtgaagttgcaaacgggaagttcatcaaacgcctgagatacccggacagtgaagtatctaacccgaaccgtccgaaagatgtagatacacagggaactcgtttatggtgggacgtagccgacaccaatgatgatggaggcaattacgttaccccaaacaacttccgctaaacaacgagattcatattcatgcactgacaataaattaagttacacaaaagaaacagggagcccgagatgggttccctgtcttatttatagtccggtcactctatttgctcttccggataattcaccagatagagagttttcgatgcacgcgtaaaagctgtatacagccaacggaaataatcaggtgtcagatactcatccgacatatacccctggtcaagaaaaacattttgccattgcccgccctgcgccttatgacaggtcaccgcataagcgtacttcacctgtagagcattgtagtgtgggtcagctttcatttttttcattcgctcccgcttgacggtgatgtccacatagtcttcaagtacagaataaaaaagccggtcgttttctgttttgggtaaagcaggtgcatccgaatgaagcgtatcaagcaacaaattagcttccaactcaaagtcattttgatcgggaaacgcaagaagtacttcagcaaacctgaaaccatacagttcacgagtacgcctcacccgacgaaccacagcaatctctccgttcgctataaaatccatttctttatacttctctgtccagaagtaattattcttcgctaccatgagtaagtcacccgtattcagttcatcttccctgtaaagaatctgagcacgtatacctttattatatatattagcccgtttattggaacggcataccacaatcgtctcgtccattccgtctttttcgtagcagccggtcagggtatcgatcaattcgtcgccacgtaccacctgtatatccggaaatccgcttacttttatcttaggcagcgaaaaacactcatcttcagcaatcaactgccgaatctgagtggcattccataaaataccggacgactgaacctgacgtaccacctgtgtgagatcaacctctatgacattcagtccatatcctttcaatgcctcggtagcaagtgccggactttgctcttctcctaccggaggcaactgagccgtatctcccatcaacaataaacgacaccctgcaccggaatagacaaactccaccaaatcatccaacagacgtccggtaccgaacatcgaaccggacaaaccttcattcgaaatcatggaagcctcatctacaatatataatgtatgagtagtcagattatcattaattgaaaaattacttacttcattcgaaaaagactgctgcctgtatatctttttatgaatggtaaaagccgggtgtcctgcgtaagcagaaaatactttagccgctcttcccgtaggagccagtaaaaccgatttctgttgtaacttatccatcgctttcactaaggccccgacaagagaagtctttcctgttcccgcatatccacgaagcacaaaaaccgtatcattagccgtagaaagtagaaactccgaaagagattttacagctatttcttgctcaaaagttggctgataagaaaaattttccttaatttgccgctctaaatagttatttatcatttttgtacgagaaaaaagttacaagaactatcgttaattagatttatttattttatttttgcgctacgaatataaactaaaaaaaacatatttatcatgaaaacagtatttaatatcgtactaggtgtatgcgccattgctttggtttacatttgctatgctagtatcatgggtcctatcaacttcgaaaaagctaaaaagcacagagacaaagcagttgttgcccgcttgattgatattcgtaaagctcaggcagaatatcgtaacatttacaagcagtatactgcaagctttgacacactgatcgatttcgttaagacacaaaagattcctttcgtatctaaagaaggcgtattgagcgacaagcagctggaagacggtatgactgaaaagaaagccatggctctgatcaacaaggctaaaaagactaacaactggaaagaagttgaagctgccggcctgatgggcttcaaacgtgatacaatatgggttgccgtaacagatacgatctacgataagtcattcaatgcagactctttgagatatgttccgttcggtaatggtgcacagttcgaaatgtacactaaaaacgatacaactaaatcaggagctcctatcttcttgttccaggccaacactccatatgatgtatacttgaacggacttgacaagcaagaaattgcaaacttgaaagaccttcaggttaaattgggtaaatatgccggtttgatggtaggttctatcgatactcctaacaacggcgcaggtaactgggaataatccgaatatgcccgatagagcaattgcagaaacgattgactttggtaaatcggaacaatatacattgtccatccgtcttagtacggatggattttctttttctatctacaatccgattcacgatagttcgctctctttctttgagaaggaggtcgaggcttcattatctcttacagccaatctcaaacaggctttccgtgaattggactttctgaatcatacttacaaacgggtaaacattctgatggcagacaagcgtttcaccctaatcccccttgaactgtttgaggatgatcagtccgaaatgatattctaccataaccacactcccaaagaaaatgaaacggtaaaatataatattttaaaaaagaataatgccgtagtcatcttcggcatggacaaaagtacttgccagttcttatccgatcagtatcctgaagcaagattttattcacaagcagctccattagtagaatatttttcggcgaaaagcagattaggtaacagtaaaaagatatatgcttctattcgccgtgatgccatcgactttttctgttatgaacgtgggcatctgcttcttgccaattcatttgaatgtcgcaaaacaggtgaccgaatctactacctactctatctctggaagcagttgaattttgatcaggaacgggacgaacttcacctgacaggtgcattttataataaagagaaactaatgcaggagttacgtaaatacatacagcaggtattcataatgaaccctgcaagcaatattgacatgcaagccttattaacatgcgagtaatcagtggaatatataaaagaagaagatttgatgtgcccagaaccttcaaggcacgtccgacaacagattttgccaaagagaatctgtttaatgtattatccaattacatggattttgaagagggcattgttgctctcgatctgtttgccggtacaggcagtatcagtatagagctggtttcacgtgggtgtgaccgcgtcatcagtgtggagaaagacggagcccatcatgctttcatcagcaaaatcatgaaagaggtgcaaacagacaaatgcctgcctatccgtggagatgtatttaaattcataaatggcagtcatgaacggtttgatttcatttttgccgatcctccctatgaactaaaagagttggaaacaattccggatttaattttcaagaacaacctgctgaaagaggatggcctgttcgttctggaacatggcaaaaagaataactttgaagatcatccccactttatagaaagaagggtatacggaagtgtcaatttttccttcttcagatagattgaagaaggttttccttatagcaacggagccaataatcgaactacagactccattgccttctgacgcgaagaacgtttttcccagctcttcaggaaaatctgagtactttcccgctgatcctgcaagaaaatctcccgcatctgcaatgctgtctccatatcgtacataaaggcatttacttcaaaattatgttcaaaactacggaaatcgagattggtagaccccactgtcgaaagcatatcatccgaaaccattaatttagaatgcaggaaaccctttttataaaaatagaccttgactcctgcacgcaatacatctgccagataagaacaggagcccaaatgtgtaacacgattatccgcatgctcaggcaacattaaccggatatctactcccgccaatgcagcagtctgcattgcacccaaaatttgttcggtaggtaagaagtaaggcgtctgcatatagaaatatttcttagcaccggatatggctactgtcaacccttgcataatctctttccagggaccgatcggttcacttgtcacaatctgtaccaaagaattgccataagcttctatcttaggaaagtagcgcgaagcagtgatcagagtgcgatccacgaaataccaatcgagcaaaaaagcagtctgaagaccatgtaccgcttttccttcaagcaatatatgcgtatctctccagattccccacgaaaagccacgcatataacgttcggcaagattcattccaccgataaatccaatacgtccgtcaatcaccacaatcttccggtgattgcgataattcactttactcgtaaacaagggaaaacggaccttcaaaaaactgcgtacctcaattcctgcatctctcatctcttcgaaaaagcgatgaggaacatgccaacatcctacatcgtcatagatcacacgcacctcgactccctcccgcgctttctcgatcagtacatcacgtaccaatcgtcccacaggatcatcctcaaagatgtaatattccatatgaatatgaagcctcgccttttgcagctctctcaacagagcttgtagtttagaatatccgccagtgtaaatatcgacccgatttccctcaaacggaaaagcctggttcgtattctggaacagctgtatcagccgtgcatattccttcggcgtttcacagcagttctgcgccaaatactctgccatcggttttttgagcaaacggtcataacttttcttaccgataatcttctcacgcctttggctacgcccaaaaaagaaatagaaaaccaaccctacaaccggaagaaacatcaggatcagaatccatgccattgtcttcaccggattacgattgtcgagaatcacgatgacaatcgtaccgataatagccccgaaataaataatatcaaaggcaacggtagctattacacttgctatgtagttccaatctatcatattcgccctccgcggattatacaaagaacaaatgtatggaaaatatcggatacgaacaacaactatcccgattcaaaacgataatccctccggaccgatacaaaattaaagagattttgcatctgtccggagggaagttgcctgtgttaacaagatatcttattaaaagcggggatgtccgccaccaaagccaccgccgggacctctaccgggtccaccaaaacctcttctaccactattcatcatcttttctcgagcagctttgctgccgaagatattcagacggtagataaagtgtaccatacagtaactattaataccgttatattcggataccgaacgcatatcggctgacaatgaacggctgatgttactctgttgtctcaaaatatcataaacctcaaaactaacagtagcagcacctttcagcaatgactgggcaagttgtgcattccagataagttcgtcacggttcatgcttgagtcacgatagccgcgacgactttgattggcgatgtttgtagccaaagtcattttccaaggcatcgtaatattggtacttgctccataagaatatgtataaggttcctgattgttctccggacgaagtttattgcgttcggctgtgtaattgatcgaaccgttcaaagaaaattcaaaccaatcattgcgataggaacctgttactctctcacctaatgtcaggcctgtacttgtatttctatcattgtttttcgtatcctgattataaaggaacgccacattattctggtagttcacattagtgaaagtattaatcgtatacttcttattctttaaagctgtattgaaaccgaacataccaaacgcattccaattaccattgatattctccggtcgtgtaatcaatccaccggtttcttcattatagcgagtactgttactgatgctgttctgtgtagctgtaaagctaaagtgagtcatgattccacgctgtttctctgcattatatgtattatagaacaaacgcatcgtatgtgcaaaagaaggcttcaatccgggattacccatacgtatattcaacggattggagttatcggttataggcaataagttctccatagtaggctgattgctacgtccccgataggtgaaacgcaactgactaacttttgagaaacggaaacgcaagtccatattcggtgcgaagttgaatacagtacgtgttgtatcaatcatatagtctccttttttataagacaaggtagaattctgtggttggaaagacatacccacattcaactgatacttcggacgaatgaaacgcaaccccactgaagcgtcatggttataataacgatattcagcattcttgctcaagctgtccactgcatgagactcatacccggaagggagagctccgccgatagcccagtccggataatcgagcaaatcgaacgtggtcttgtcactcttgctatatttatactgaaactgataactgaactgcaagaaagtggccttggcaatgggttcgctataagtcacttgggccgtatagttatagttgcgtgtaggagttgtaatatattgattacgatataggatagagtcacctcccaaatgattcagcaattggtaataacgtgtttcagactgtgtatactgatcgttatcattatcaccatatccaaagactccacggaaagtcaggttacgtcctctattattcaattttcggttaacctgtaaagtggcgtttcccgaaagacttttgcctttagacaacgaagcactattggtggcattcacacgaatgtctttcaacggatcgtcagacaaattatcaaaattcagataatcatttggatttacgatcagattgaaaggatcttcattgaaagtgcccgattcagagcgagaagcattatttgtcctcccataggagaaattagggcgaaagataatatttgtcaaagtatccggtttccattccatacggaagtcagcattcaggtttgttcctttattccggttcttattattcgaattagaatatgaattgccattctgaaggaaacgttcggaagaattgatacttgagatatcagcatcctggaagttatatcgtacactacctcccagttctagcttgttggtctgggtcgcaaagttggcacccaacattttagtagcattcaagccattgttactacgccagcgcggaccgcccccccctccggagaatccctgatcatttacattattcgccgagcctataatagagaactgggttttatcgacaaagcggttcagcatcattcgtccggtatagcgatctttagtaccggctcccaaatctgcattaccaaaccatccctgattcatcccttttttcactgtcaagtcgagtaccgtttcttcttcaccgtcatcaatccccgtcacacgtgccagatccgactttttatcataagttttcagtttatcgaccatgtctaccggaagattcttcaaaccggttttcacgtctccaccgaaaaactccttaccatcaaccataattttcttcagatccttaccattgattttcacattaccgtcatcatcaatttcagcgcccggaagtttcttgaccaattcttccagcatagccccctcaggtgtacggtaagcactggaattgtacattaacgtatcttctacaaccgtcacttgcggagcttctgctaccacaaccgcttcttgcagcatgacagcatcagttgccagttcaatattccccattttttttgcaggaacattagctgttagctgcacaggaataattttggtgacatacccgatgaaagatactttaagcagatattttcccggtttctgcttggataaagaaaagtagccttgtgtcgaagtggtcatacccgctacctgagcactgtcagggagagataataactgcacagcagcgagttcgaccggttccttcgtaccggcctctattacacggcccgatacggttacaattttgttttgcgcataagtggatagggtagctgtcagcagcaacaccgtccagatcaatagtttcttcatttgcctgtaggttgaataataacaatcgtttgtttgacaaccttcaaagcaaaaggtttaatttaaacacaattatcttttaaagattttatcgattcgcgctttttgcataccaaattcaaggcagagtacattgataataagaaaaataagaaaagaagaggtatctacggtcatgatatctcctgttgctacccgataaagcatcccgccaaacaaaaaaagcacagtcagaaaaatagcattacgagtagctttgttccgtataatctctgtttcacgaccttcattacgtgataaagcaaaaataatcatcattgctcccaatatcatcagcagtttaatacactctttataaaataataagttactgtccgttaccattccctgcatcaataacaggaatggaataaacatagaaataacaagaatcacatatcctaaaggacggcagaatacaggtaataatgctttcattttatctaaatttaatgtcacaaagatagctttttctcacaaacagaaccccatgttttacatttttaagtgctaagtttcactatttatctccgaactcctatctttgcagtacataaaaaaacatagaaccattatgagtaaacaagaagtcatcctttgtgaagatctggaaagtagtcttaaacgtgccatcgacaactgcccacacgaccgcctgttcattctcactgacgatcatactcaccgtctctgcctttctcaactggcaggcttatcaatcctgaaagatgctgtcgaaatcaccatcggagccgaagacgtacataaaacactcgaaaccctggcctctgtctggcaggtattaagtgaaaaaggcgctacccgtcactcgctcctcatcaatctcgggggcggaatggtcactgatttaggtggatttgcagccgcaaccttcaaacgcggcattgcctatatcaatattcccaccaccctgctggcaatggtagatgcttctgttggcgggaaaaccggcattaatttcaacggattgaaaaacgagataggtgcctttgcaccggcagccagtgtattaatcgaaacagagtttctccgtacactcgatgcacataatttcttttcgggatacgccgagatgctaaaacacggactgatcagcaacacctctcactgggctgaactgcttgcattcgatacggagaagatggattacggatatctgaaaaaattggtaggccactccgtacaagtgaaagaagatatagtggaacaagatccattcgaacacggcatccgcaaagcattaaacctgggacataccgtaggacacgctttcgaaagtctggcgcttgctgagaatcgtccggttcttcacggatatgccgtagcttggggcattgtttgtgaactctatctgtcacatctcaaagccggcttcccaaaggagaaaatgcgtcagaccatccaatttataaaagataattatggagctttccacttcgactgtaagcaatacgaccgtttatacgaattcatgcaacatgataagaaaaacagtgcaggtgtcataaatttcacactcctaaaggaaatcggcgatatcagtatcaaccggacagcagataaagataccattttcgaaatgttcgacttctatcgggaatgtatgggaatgtagaaaataagataaatgaaacaaagagttacctccaatcacatcgaacgattgcaacccaatgaaatattcgttttcggcagcaatctgtccgggcatcatggcggtggcgccgcccttttggcaatgaacaaatggggtgccatctggggacaaggtgtaggtttgcaaggacaaacttacggaataccgaccatgcagggtggagtagaaacaatccgcccttatgtagacgaatttattcaatttgcaaataaacatccggaaatgacttttctggttacggaaataggatgtggcatagccggatttactcctcaagaaatagctccactatttgctaaagccacaactacagagaatatccatctcccacaacggttctgggatttattagaaagaatcccataacacattatttatcaaaatattatattgttaattatttgtttctaaaagattagttttaacgctctgttaaaactaatcttttagaaacagatcacttgttctttgttgataaagaacaagtgatttgcaaaaaagacgttcaacctaaaactttcaaattaacaatgttaattagatttctacttccccgagcgcttccttagcaagaaaaaacaaattaaaagaaataaaccatccgaatattttgcttattcaaaataaaattctacttttgcatccgcaattcggggtgtagctcagcccggttagagtacgcgtctggggggcgtgtggtcgctggttcgaatccagtcaccccgactaaccacaaagcattgataattgtaagattatcgatgcttttttcttttagaatacttcagaactatcatacggtgcagacgtaggtgctcccccaaacaggatatttaaccgggatttatgttttatcaaacagtaccggatatcggatattaaaagaaatgttgaatattcaatgcagttgcacggattctttccgtttgttgctcagtatctcaagtttttttctatctttgcgtcaaataaagcagcgccctgaaaatcaatgaaatatttctattatgaataatgctgcacataaaaaagacaacacaaagaacatcttattaataaaaaactcaaacagaaaatgaaacgcattgtttttttagattatgtacgcgtatttgcgtgctttctcgttatgattgtacactccagtgaaaacttttacggtgccgccggatccacggacatggccggaccgcaatcttatttagccagtgaagcagaccgcttatgggtagctgtatacgatggcttttcacgcatggcagtaccattattcatgattgtctccgcctttctccttgctccgatgaaagaagaacaaactacatggcaattttatcgccagcgattccttcgtatcataccaccatttttcatattcatgatactatacagcaccttaccaatgttgtggggacagataaacggagagacatcattaacggatctatcacgaattttcttgaacttcccgacacttgcaggacatctgtggtttatgtatcctctaatcagtctttatctattcatacctataatatctccatggctgagaaaagcttcggcaaaagaagaacgcttcttcatagggttgtttctgttatcaacatgtatcccatatctcaaccgttggtgtggtgaagtatggggacaatgtttctggaacgaatatcacatgctatggtacttctcaggctatctgggttacctcgtgctggcacattatatacatactcaccttacgtggagtcgttcaaaacgtttcatcataggaaccattttaatggttatcggagccgtattaaccatctattcattctatagccaggctatacccggtgagactctttccactccggtaatagaaataggatgggccttctgtacaatcaactgtgtactgctcacagcgggtacattcctcatgtttacgtgtatcaatagctcaaaagctccacgaatcataacagaaatgtcaaagctcagctacggtatgtatctaatgcatatcttctggctaggattatgggcaacagtatttaagtataccctggcactgcctactgttgccgctataccatgcattgcagtcagtacatttatctgttgcttcataacttcaaaactcatttcattcataccgggcagcaaatggatcataggatgaacatttgagtatggctacttccataaaatcggatacgccccatatgtaatagtcccatgtagacgatttatattcagacatgtacaaatctgaacctgacagaattctctttaaatagataaatagcaattgagcccctgatcggaatataccggccaggggctcaactttaaatataaaagaaaggagagctaagcacacagcttaactccctctatcttattgagttactttcttatttcttataaaccttcagatttgtaatcttactatcaaactttccggctttctctagcgggaagactaaagtgcgaacataattcatagaatctttcccggcattatagtaaagtttttgagtattcatttcctctactacctgtccattgataagtagacgggtcgacttattgtcaccactgataccgatggttgctttctcacctttgtggatacggtgactaaatgtattcaaataaccgtcacgggcaaaacccaacatgccacggatcggatcggaaagataaaatacggcatccggcgaacggaacagttccgtaccctttgcttcattggctccgtcaatatcaaatgttaccagataatcgtaaccgatttcacggtgaggagtctcgctattgggagcaacggaagcctgttcatacaccaatcccggtgtagtaccgatacggccgagttgattaacacccggagcctcactgatgccattgcgttgtttatcaaagtcagcatacggaacagatacatcttttccggtccacatcttcacagccaaagtctgcaaagccggataaacgcggtgatgaatatcttttgtcgagatgccattgcctacatgatcgttccatacggcaaacataccgccgaggatagacggatctttctccgggaaaacagcctttccaatctgtacaggagtccaattttcgtacaaatacttcgtgttcagataatcataatagtatccggcagccggaacaatgtataccagcccgtcaggaatactaatcaatttatagccttgctctatcatgtctttcgggttggcatagccattgtaccaagcactcatgatcacattctccgatttcaccggtgtatcacctttggcatgcgtcagtgctccccatacacaagcctgtttgccaaagctctctacatagcggatataatggtcagtgaaagcacggaatttctctactacatcttttttcttatttgagtattcgtcagtaccgatatgcactttctttccacggaatacaggttcgtccccttccagatactccttaaagagtccatccataaacttatacgtttcaggattaaacagatcgagatggtccatgccgtactctttactgccgatctccggtttataatgtgtaaaggcaagagtatgcgccggagcatcaatctcgggaatgatttctacgtaaaggttctcagccaacttttgtaaatcgataaattcacgcttggtgtaatagccgtcttcggcagccaaacccggataagtatccgactccaaacggaaggctgcataagttttcgaccaatcgtgcccgaagaactgtttaaagccattatcattcaagtgaatctgcaaagtattcatcttgtaataagccataatcttcacataatcctgaaggaaagaaagaggaataaactttcgaccgcaatctatcataaagccacgcatagcgtagtccggaaagtcacgtaaagtacctttcgggaactgatgattttcgctctgttctgcaatctgaagcagcgtacgggttccccaatatacccctatgctttcgggagcagtcagcaagatacgatcggtaactttcacagtatagccttctttgcccaacttcttatctgcacgaatggcaagaataacatcaccggctccgcctttgccttgtactacctccggtttgtgaccgaacatcgtttcacagtcatcggccagcatacgggcaatgcgcaatagttccggctgattggcaggacagactatttttgttgtttcagtcggtacaaatgccccttcggcacctttccactctttcagttcgggaatcacaaaaggtttgggattaacaactgcactaacgccggggcaaaccaggcatagtgccacaagaatcataaagaatcggttaacaaatttcatatcgtgtcgttataaaagggttaattcaaccggacatccgattgtggtaccaaaagtagtgtaaatctaccgattctccaacattctgtctaaaataaaagaatgttggcaccccgacagacaaaaagatctatctgccgaagtgccaacgtgggatcattgtttccgctgaaacggtgacctcatcacaaacaaaacaaacatcaagctgatgggaatcatcaacttgctacagaagtccttctcagggaacctcacggtcactcatccgtagattttaaatatgattgtcggataaattggggatagtaaaccagaaagtcgatccttctccaacttccgattccactccaatcgttccgtgcatacgctcaataataattttacaaagggacaatcccaatccaagcccttgggtaaagctatcaagtttcacaaatcgttcaaatatcacttcctttttatcgttaggaataccacatccggtatccgtcacataaaacctaatttgaccattctctttctcttgatacccccaacgaacggtcccctttgttgtaaatttaatagcattatccaataagtgctccaatatctgtatcagcctgtcccgatctgtatagatgtgagcattcgactgctcccgatcccaagccaaaaccaggttgtccgtttctgctttgggaacatacgtcaattccatctctttcatcaatgaatcgaggactacatccgaaccgactatgtccataacgcccgactcaatattggagagatcgataacatcgttcatcaatcgcaaaagatgctccgtattactctgtatcaatccgatatactcctgctgctctttttcgtcatctatgatagagagcaaagatgcaaaacctacaatcgcattcaacggtgtacgtatctcatggttcatattagcaatcaatgccgatttcaaccgattggcttcttctgctttctctttagctgcggtcagttcttcttccataacctttcgcctggtaatggacatcagcgatccctctacagtcaacagtctgccattttcatcaactttcccgggaatggcatgcatttccaaccactccaatacgaatccctctctctttttagcccagaaacgaagttcgaccaccactttcttcattttgcctttcagtatcccccgacaagcttcaatcacccgaaggcggtcttccttatagataccttgataaacacgcgctatagaaaccggaaacgaatcattatgaaaaatctcccatcctgcaggatcgtccgacggacgggcatcaaaccataccatatgctctgccagttcccacttccatggaaaaacttccgcgaccccaagcgtcattaacaacttgcggttcacttcattcagcatctgctgagtccgtaacagttcggtttgtttttcttgtttcatttaagccactatttatcgatgcatacgatattctgtaagcgtcattcctgtgtgctttctaaaaaaacgccccagcgacgactggttcgcaaagttcgttttaatagatatctcctgtatattcatggtagagttcttcaacatggctttgatctccaatatggcatactctacaatccaatcttttgctgtctttccgctcgcctcttttatcaccattgacagatacttggaagtgatgcataacttatcggcatagaaagcgacatccttgtgttcccggtaatgctgcataattaaacagaaaaaatcatgcgccagcttactcttacccatatccgatccccctttcatcaaatgagacttgctgtaatattcgttatagatatccagataaaagattctcagtaacaacaacacagactccctcctgaaaaaatgggtagggtcttttgcccgctgtgcgagtgatccataaaaaagtttgaaccgctcaatctcttctcctgtcaattcataccaataatggcttctcatgtaaacaaagaaaagaggagaaaaacgactgaacccactcaacgtatcatcaaaaagtgcacgcgacagcacaactatattacaaagaaaatcatgacttagttcggttatcgaaaccaactgacccggcagaataaccgccagttcattcttagcaagaatatgaatattatcaaagatacagatcttggcagtacctctcaaacacaaaatgatcatcccaacttcggtgtaggacggaacagacgtcacacgaatgtgcttcatgttctcacaaaccataagttcatcccccaataaagtcgtagtataaccatccgttatcaatttctcactatccctgtttggcatcagaatcctttctttgttgatacaaaagtaaaataactacattaaccccgtaactacacaagtcttttggtatcatattacagaaatatggagctacttcttgacatttttttataaacaaaatgtccttaggaccttaaacaacctattttttagctgtttgttcgcttcgttaatgtatattggattccgttcatatctttaatattttaggaagaggatagaggcaaaaaagaatagatttcctatttttgcaaccgaatataactatagaaataaagaccatgcgttatctactctcagcgccttcgcagataaaggccactatccagcttccggcgtccaaaagtatcagcaatcgtgcccttatcatccatgctctgtcaaaaggagacgatgtgctttcgaacttgtccgactgcgatgatacgcaggtgatgataaaagctctgaccgaaggtaatgaagtgattgatattcttgcggccggaacggccatgcgctttctgacggcttatctgagcagtactccgggtatccataccatcaccggaacggaacggatgcagcaacgccccatacagatattagtaaacgccttgcgcgaactaggagcccatatagaatatgttcggaatgagggttttccccccttacggattgagggtacagagctcacgggcagcgaaatcaccctaaagggcaatgtgagttcacaatacatatcagccctgttgatgatcggtccggtactgaaaaacggtttgcaactccggttgaccggagaaatcgtttcacgaccttacatcaacctgactttgcaattgatgaaagatttcggcgcctcggcttcgtggacatccgaccagaatatccaggttgatccacaaccttaccactgccttccgtttaccgtcgaaagcgactggagtgcagcttcttactggtatcagatagctgccctgtctccccaagcagatatagaactgaccggactgttccgccacagttatcagggcgacagccgcggagcagaagtatttgcccgcctgggagtggcaaccgaatatacggaaacaggtatacgactgaagaagaatggcacatgtgtcgaacggctggatgaagattttgttgatattcccgacctggcacagacctttgttgtgacttgtgcactgctcaatgtgcctttccgcttcaccgggctgcaaagcctcaaaataaaagagacagaccggatcgaagcccttaaaacagagatgaaaaagctcgggtatatattgcatgacaaaaacgacagtatcctttcttgggacggtgaacgcgtggaacaacagacatgtcccgttatcaagacttacgaggatcatcgcatggctatggcttttgctccggcagcaattcattatccgacaatacaaatagacgaacctcaagtagtctccaaatcataccccggatattgggacgatttgcgcaaagccggtttcggcatcaaggtcggagaggaataagatagacaagacctttgcgagacacacttcgaaagatattgcgccctgctctctcaaagttccgactttgaggagcagggcgcaaaacttcaaacagattcaacatccggaacaaccataggtctccttgtccggataacaatccttatctcaatggttccattcggaaagaataactataaaccgtatccttccggatttcataatggggacgcggtcccggtccgcaactggcattgcccaatccacgctgaatgcaatctaaattgagaacaacctccgcacggcggatatcagacaaatcatgtccatattttacctgccataaatctttatctgtataatgttgggcactgaaatccaacgtatccgttgcggtgatcctgagtcctttcccttgtccgtctgtcaacgccagccagtgtgtatctgtgcgtccgcccattgtttgcgcccgcgcataatgctcggccatatccataacagtcgttttgtagcatcccatgtaggctgcgttcttccggtcacgatagttctccatcggaccgcggccataccattcgacttgttccagtgaaggattgaggaacatttgcaagcccagacgaggtagatcgaaattactttctgtcgtaaagtcggctgccacatcgaccctgccgttactgtaaacccggtatctgactgtatacggtatattgacttgcccaactttgatctctatctgagactgaacagacgccgactttccgtcttccgccagtttccagtcaaaaccacgcaatgcaaccacaggctgaatccattcgcgaggatcattactgatggaacgataccagttcaacgccggtccttgctgaccatgtatcatgttttgtccgtcatatcggagaccgatcatcatgcctgtctttgaatcaaatgagatctcggtacccggagcacggaaacggatgtactgacgttcttctaccacctgcagggaagcagagagttccggaacctccgttttctgttttctctctcttagtaagaactgctccgttgccactacatgtccggctttagcccagacgcagtcatgcttcaacttcacttccaagttgatgtggtaatcggcatcttccgtcaagtgacggagataagggatatggatcgtacggtgttcacccggcttgccgtcaggcagcccgaactcctcttccgcaacaggcaccccgtctttgaggatgacataacgcaggttgaaatgacgcatattcaggaatgaataatgattgcgtaaccccacattgttctctcccacttcttcaaaagtcatatattggtatacctttttcacttcccataacttaggagtaactctacggtcgggtgtcaccagtccgttacaacaaaaatcattgtcgttgggacgatcaccgaagctgcccccgaaataataacggtccggcgcttctccgggtttattgatgccttgatccacccagtcccagatacaacctccgatcatgcgtttagactgattggcaatatagtcccaatattcttccaggttaccgacagcatttcccatggcatgtgcatactcacatagaaagaaaggtttattgcgcggctcgttgtcctgagctatcatactttcgatggatggatacatccgtgagtccatatcggcaacatcattcattccttcataatggatgaaccgtgcgtcaatctctctggcagcctgataagcggcctcgaaattgggtcctccgcccgattcattccccatcgaccagaagattacggaaggatggttcttgtcccgttccaccatacgtaccacccggtcgacaaaggcttctttccaactttcccgcttggtcagcatcatgttgccatgacattccagatccgcttcgtccattacgtaaagtccatagtagtcaaacagagcatacatcttcggatcattcggataatgactggtacgaatggtgttcaggttgaaacgcttaaagagaagaatatcctctatcatgctttctacaggtaccgctttaccgaaacggggatgaatatcgtgacgattggcacccttgaacaacaccaatgcatcattgatatacactttattgtcacgtatttcaattttacggaaaccatattgctgggtagttgcctcgagcaccttgccggaagcatccagcaattccagattcacagtatacagataaggtgtttcggcgctccagagttggggatcacgaatacttgcttttgcaggcagacagatctcttttccggcagccaggttaccggccgcagttgtaaacgtacgcaaagttctgccaccggcatccagcagagctatgcgcacggaggcattcacagcagacttgccatagttcttcacgtctgctttgacacataagtcggccttgtcgaaacggtcactgatgacagaagtaagatgcacgtcgcgcaggcgaagtttcggagtcgccaccagatagacatcccggtggataccgctcaggcggaacatatcctggtcttccagatagctgccgtcactccagcgatacacttcgactgccaatatgtttttacccggcttcacatactgtgtaatgttgaactcggcatcgttgttggcaccctggctatacccgactttcttaccattgatccacagatacatagcgctgtacactccgtcgaagtggataaacacttctttattcttccagtcggccggcagagagaattccctccgataggaacctaccgcattaggctctttctctaccgtatatcctctctgtccctgtataaagggcggattgttgcgtatcggataggtgatattggtatagatgggggttccgtatcccagcatctcccaattggaaggaaccggaatctctttccaggcagacacgtcataacccggtttatagaaatccaccggacgttcggaaggttgcttcacccaatgaaacttccagtcaccattcagcaacagataacgggaagactgattgcgtatccaaggacgggtgtacgaaggatcgcccttcatctcttccgtatcggcaaaggggacaaacgtagaacgcccctcttctttgttaacggcaaatatccgttcattctcccagtcattatcactccgggttttaaaagcctcagccaccactttcagattcgatttcacgattttccattgctggcttattttctgcgcatccggtttgagctggtaaaccggctcggccacaagaccggcatccgggaaacccaggttataaccactcgctacactggtgaacaaataattcccattgggtaaagccgtgatacgccattgctgattgggattttctttattggggtcccattggatgaccggacactccttgcttccattgccgctattgtcgattcccagttcggtgagcggactgacaatggagtagcagccgtcaccgcaaggtatcagattccagacctgcgactctttatggggttcctttttagaaataaatatcttactacctaaatccagactctcctgattgtccaggacaagtccgttctgggtatggatctcgtagctttgcttcggatcgaactcctgggcacgaaccattcctactgccgaccacagagcaacacttaccagaaacagatgtttaaaatttagcatactattgatattaagaaaaggcagggaagaaaaccaagggctgtatccgccaacaaaacgtatgtctgcctgtgtgatacagcccaaacctatattcaacccaactacctattgtttttactgaaataaagccgattgtttgtacactccgaatgtatggatagcaggacaggcaaatccgtcgaggatacgaagacgtacctgtttggcttttaccggtgcgaaacgtacgatccatttataccccaccgtctgcttatcggttgcctccggtatcggggtccagttacggccatcattagagtattccacactccacttcgtcgtgcggtgtcccaattcgatcacttcctgaatcatcaggcagtcgaactctgtctggcgggaaagagtgaaaacgatgtccgaggttttggctccgtctcggccggcaaaataagtttccttattgttgtccgtcaggaactccggacggaatttacctccgcgtccgttcgttgctttcaccttggccttagccaacagattgtttccgaaggtttcatccaatccctgcttcagcaaggcagcatgaagtgaatcggtaggatgaatcagtccgcgacgatcaggtgggaagttgagcagcaacacgctgttgtgaccgacagaagtgcaataaatatcccaaagttcctttacgcttttcacgcggctgtcttcctcagcatgataaaaccaactgggacggatcgatacatcggtttcggcagggatatatgcatcaccgccttttactccttcgttcagcccttcatagttcttccattcatctctgacgcatacagagtcggtagtcgaccaacaaggatcaccggctttgccggactcatttcccatccaacgcacatcggcaaaaggatacgagttcttggtcccgaaaatgacacagtccggttgcttctctcgcacaatcttataccaatgagtatagacgggagtagtcagttcgtctgctccggcaccgtcccaccaagtttcccagacttttccatagtcacccatcaattcttccaactggtgaccataatactgcttgtacttctccgtagtataaaggggagaaagatgctcgtgccggtcgtgcggacccagatagatgcccgccttaatgccatactcctcgcaagcatccacaaactcgcgcacaacgtctccctttccattcttccaggcagagttcttcaccccataatccgtatatttactgggccaaaggcagaacccatcggcatgtttggctgtaatgatggcactggggataccggccgactgaagggtacgcatccactgtccgcaatcgagggccgtaggattgaatatagctgccggagcacgtccgtccccttcgtttacatactcctcaaaggtattgatcccgaagtgaaagaaagcgatcatctcccggttataccactctacctgtctcgcactgggagtcagcccgtagggttcgggggccttttgcccccatacaggtaccgctacagcagcgattcccgccgctaaaaagaaatttcttagattcatgtgttcgtctattttacagttttgtatatcagaataaattaagttcgcttatcgtcacatgcggtccgccgttcacggccgtgatggttaccttcaggtagcgtccatctacagcagcgggcaggaaggatcggaactcaccctgtgccggaatatccgtaaacttagcggctaccgtccaggtggcattatcatcgctcacttccacagtcacctctttcggcccgtcatacccctcttcacgtgcctggcaagcgaatccctggatatgggttgttttcttcaggtcaataacaatccagtgaggtggttgcggatgctgagtactccagtcggtaccccagaaagtattcagatcgccatccagacaagcttctttcagtccgctgtgtccccaatcgccctctttcggctcttcggacgaagcactcaatgcttcccatccggtgcggtcgagcaactccatgttgctggcatccatcgaacctctgaagatgaagtagatggtctgacagcaatgatcggctaccgctccctccaccgaagtaatgcttacgggcagcagatactccttgaacgcctcgatgttaccttttgcatgaaccgtaattacggcttcctcagacttcggtgtcccggcttttaccaatacctcttcagtcaggtcgtaagcggcttccggcagcagttcatattcggttccgttcttcgcgttatactcgcctaccttgcccggatcggcttgcagatgtaccacagcatcattaggcagtccgtattccgtcagttgcggataggtttcggaagtaacggccacattaaaagtctgcacatacggctcgtcttcaatgtagaaattggctttcacggcagttcccgcatcgggtatgtagatggtcaggtcgctgtcattgtcactgcatcccactgtgcagcagaatccggcagccagaatggctgccttcagtatgttctgtttcatgattcttctcattttaaatgtttattcccatccgggattattgggtaacaagttcggattcatcgttgtctcgtcgataggcaacggatgcagatagagtttatcgtcccatttgcgggttgtcctgtccggataaacaatcagcagattgtcttgcgtcaattcacgggagaaggagtcgtactgctctttcagcttatccgatactttcattccaagcatactcttcggtgcttccagcaacttgccggctttccagcgtacaatgtcatcccaacggaagccttcgcctaccaactcgactgcacgctcgcggcggatttcgtaaagtagcggagagagttcataaccataatccggccagttcggatcggtgaaaccgacatttactttcagatgcggcatttctacacgatctctcagttcattgacagtctggtccaatacctcctgggtacattcacccagttcggctttcgcctcggcatagttcaacagcacctcagcataacggaagataaacacatccagtgtagactgcccgatgttccactgttcgggatcggtagagtgatacttcatcacgtaatatccggtagtacaatatttggtatctattatgggaagagcattgaactgcttcgtaccgtcgctcagcaccttaaaaggaagttccggattatcgatcgtctggcgcaggcgcggatcacgctgcatcaactcatccatcggcatgtcggcctcctcgtatcccggactgactgcggtaggcagaccatcggcacataggtattgttcgaacatggcacggctcaaacctgtatacgactcttccatctggcgggtgttgttgtgcatcaatagcttggtgatataaaccctgggcatgatacactcgctattggaggctaaatcttcctgtacaaacaggttgtaataatcctgtaaaggcttatcggtcttatagatggagtaacctccctcttcgatcacctgtgcggctgcatcagctgcttcacgatacaactcttcgtagtcgcccagtccgtgatacttacggaaagacgcttcgtagaggcaagctctcgacttgaaagccagcgcagcatacttatgcatattgccggttttggtttcattaggcttcggaaggtgttcgatggcaaaatcgagatcttccaggatgtgtgtgaacacgacttttctggaatcacgtcccttgtacagttcttcggagtccatctgcaactcggtttcataccagggcacatcgccaaagcgtttcactttgtacacatactcccaggcacggaagaagcggaccacggctaccgaacggttaatctggctttcatcccctttcacctgtttgtaacgagccataaaatagttgcaggaacggatgtttccccagtctccatttccccatccgccaccggaagtaggaatcgtttcaagattgaagatccaggtcttcggtttctcgttcacgtaacagtccgattcatcatcggcaccgggtccctgcgcccccggtaaaataccgtaaaagccgttggcataaagttcaaggtcttgtacacttgtccagaatttcggatccgagagagaatcttcgggatacaagtccagtaaatcggagcaggaagagaacatggaagtacatgccactgccgctatcagtaatatcttattctttttcataatcgttatcgtattagagggtaatgtttaatccgaatgaaacagacttagtcagcggataagtgctgagactcactgtttcggggtcgtatatgtcaaacaggtgatcgaacgtcagcaggttttgtccgcttacgtagaaacgcacatgatctatcttccacttggccaggagcgctttcggcaaagaatatcccaatgtgatagacttcaggcgcagataagcggcattctggagataacgggtctgcgtttcacggttaccggtcacgttgtcgtaggtagaccgggggaagtaagcattgcggttatcttcggtccatgagtcgagtgcatgtttgaaaggcacatgccattcgttgccgaagccccagaactggttgcctcccaacactacatccttcttgccgatgccctggaagaatacatcaaagtcaaagtcgcgccactgcaatccgcctttaataccataactgtaacgcggttcgctgttaccgataatcttttggtcacccggatcgtcaagcgtattctttcccttgtttatcttgccgtcaccgttcaggtctttgtacttcacatcacccggataccagccaccgccatagatctccgactgatcggcatgggcacttacctcttctgccgactggaaaagtccttcggttaccaatccccagatctcaccccactttttgcctacataatgggtagagagcaaattctgcggattattgaacttcgtgatttctgcctgatagtcggacaaaacgaaacttacgtcatacgaaaagtctttgttcacccggtctctccatcccattgaaagttcccaaccggttgttttcaggtcggcagtattggcttgcggagctcctgttcccagtacggcaggaagcggtgtaccattggtcaccatatcgagtgtcttccgcatgtaccagtcgaaggttccatacaggcggctgttcagcaatgcccagtcgagacccaagtcaatctggcgtacagtctcccaagtcaggtaaggactgacgataccgccgggactcacgctggctattttctttccgtccaccaggtatcccatctcgccattggtgcccatggtagcgatataaggatagtcgccgccaaccgactgattgcccaacgaaccataagaggccctgatcttgagttcatctacaatcttcttggcaggttcgaagaaagcctcgctcgagattctccaggcagccgatacggaggggaagaatacgaaacgcttgtccttggggaacttggaagaaccgtcataacgtccgtttaactccagaagatagcgttcatcgtagttataattgatacgggcaaaatatcccatagtggcccaggagtgctggccgctcccgttgtacttctctccataagcctgtcccagaccggcaaggtcattactgatcaggttctcgcgttcggcattgaaccagcggtagctcttggtttcgtaattatatcccagcaacagtttaatgttgtgtttacccaaagacttggagtagtcggtataggcattgaacgtctggtaatagttgtcgtcggtggtaaacttcacgcggctcggagtggtatgcgggaatacggttacaatgtccggattggccgtatgctccaatatctctttaccgtgctgcttcttcgagaggatatacatattataggtatagtccacattgatggtccagtccttcagcggagtgatttttaaaccgccggtcagccaaaggtcgttctccttattcttgcgctcgccggaaatggactgggtagccaccatattcgtccaactgccctggccggaaaagtttccgtccggatggtataccggcatcatcgggcgaaggtcggcaccgtagaatgcactgttgatctgtgctgtctcgtcactgttgttacttccgtaaggagcatcccggtaagtgttgttgtagacggtcttcaaccgcacctgcaaccaattggtgacgtccgaagtcaggttcaggttgacattgaaacggcggtacttatcgtcataatgtttcagtgttcccccttggtcgaggaaacctatcgaaccgtaataggcggtcttgcccgaacctccgttgagagacagggtgtactgctgcatcagggtgttgtctttgatggtttcatctatccagtcggtgttgccgcaatacagatacttgttgggattggacggatcgatgaataccggcagattgtgtttcgggtcggtataataggcatagatatgatccatatagttcttatcgtagtaatcgcctccacccgagttgcggttggtcagattatggaaattggcaaatgtccacgaatccatatactccggtttgcgtgtaggcgaattgatagaccagttggacgagaacgagatcttggctttctcgtctttacctttcttggtggtaatcagcacgacaccataggctgcctgtgttccgtaaatagaagccgaagccgcatccttcaataccgatacgctttccacatcggccggattgatcatgttgggatccatctgcacaccatcgaccagtaccaagggtccggaagagtttatagatgtagtaccacgaacgttgaacccgtatcctttgcccggtgcaccgttgtcggcggaaatgttcaggttaccgatcataccctgtagtccctggctaagattggtgatcgggcgactctccaatgtctctgccgaaacactggctacggctccggtgaggttggctttcttttgtgtaccataacccaccaccacgacttcgtccaaggttttgctgtcctctttcagggtgatctgcagacgggtctttgcggaaacggtcacgacttgtgtttccattccaataaaggagatctcaagttgctctccctgttccgcttcaaccgagaagttaccatccatatcggtgattgctccacgtccgggagcaccctttaccaatacagaagccccgggaagcggagaacccgtgacgtcaagaacacaaccggttattttctgtttctgctgttctacctgcaccactccggcagatgctgcattgtagctgtgagaagcaaggcaaggttgaagtcccatacccgaaagaaggacaaacatccctgaaatccttacggctctttctactaattttcgttctctcataataataataaattaaaattaacattaggaatcaagcaaggcgttgctgactctttttaactaaagacgaaagcaaaggtatctccatggtcttaagagagggattaaataagggttaacgaagcgattaacctctcatatttcttgttaacccggccctacagcagtccagacattgacttccactcattaaaaaatacacaaagatagcacaaagaagaaccaaggtttcagaaagacagcaaaaagccttttccgttgacgaggtcttcttccaaaagagctcaaccggaagagaaatacggcaagaaccgggttgttgaacacgaaaaaccggagtaaccgaccttcaaagcctcgatctgagatgaaaagtaccttacttttcggaaaaagaaggaagcatttggtcagaaagaagtaagcattttcggaaaatgcttacttcttttctaaatatctctatatgttttggcagttatcatatattgttccggaacaaaagccctgagaagcccgttctacttccggttggtctgttgaagaagtcctgtttgatgtatcaaaaggacaggcattcttctctaaagcgaacacaaggtatgcgaggaggctcgtcaccgtctttaattagcaagaacaggtatctataccatcagaaagataaaccgataaacgaaatggcggcgtttttccggtcatgccccgcccgacggccgaaaaaaccaaaagcagagaggttgctttatcattttgacaaactgacaatcgggagggagactcagaccttgatgtcagcgaaagctatgccgtactcctcgttcatcacccgtctataatctttcgtaaacgcggcataacgcctgatggcttcctcttggttgttctgcttccgaagggcacaaacggtataagcaagtgccagttccgacaaaggatcggctataaagagaatgttacaaagacggatgacgatactgaaccgggcatcccggtaagccagttccaactggccgggcagaagagaatggatcagcgtttccactttctgtttgtagtaatcgaaaaggtcggactcggcggcgggtatgaacttaccccgcaaaagtatttccaaccattccgcacgtatggcaccgggagtctctttcttctttttctccggagaggtaaggttcatcagacgaatgtaatcgcaataaaactcttcgccaaacaccatgcagaagtatccgttgcggtatacgagttcgatgccgtccacatcctgcaatatcttcctcacatgattcatggaaactcctttgaggttcttcacattgctgccggacttatcgggccagaatatctgattcatgtcagacgaaagcactcccctcttgcctacactgttcagcagaatatacaaaaagatagtacgcagcttgggactgagcatataggtaatgtcacgtccggcattatcgagaatggtaaacatgccgaaaaggaaaatagcattcttgtcgggcggcaataccgccggcaattcttcccactcggaaggctctttctcaacttcttcttctttcacttccggtgactccacagccggaacttccgatatatcggacacttcttccggacgtactccggcagatgcggtctcggcagacatcctgtcccgcttccgcttatggtgcatgatgccccatacacaggccgccaacaataatactccacccacgactgctcccagcagaccggcattcagggcattccgcctccggctatagtattccacatcgtccaatgtaaccggcggagcagacagggagtatagacgggtagtcacttgcccgtgcttctcgaactcttggacggaacaatagaactcatttaattcttcattgaagtatagattggcgttggtagcaatctcttccgaaacaataggaatactgtctcccaccgcttcacactcaccgtcacgcacagacaaccggtacaactgcaaagtggaattgggcagatattcgggatatcccaggaggaacaggtgtttttcatcggcagagagtatcatattacggggtaccacccgattgaccgccggtgctttcgtttcccagagtttctgcaccgaacgggtctgcatatctatccggtataaatcgtacagatagttgcgccctatattctgatcaccggcttcgttgcccatgcctccgtagaggtatacccgcttgtaatcattgctcacagccatgcccgaaaagtaacggggaatcacccggtcgccggagaaggccagtgtatcccaacgacaggtattcaaatcgtacgccaggaacgtattgctgtatctacggcttccgtaaccgccaaacaggaaaaactttctttcgcccggatgaaagaatccgcaatgatgatggagctgttggcaaagatagtcggaactggccggacgccactctttggtagtaagatccagcgccgccaccatggcatcgccatgcgaatcggccacttcataagtatacaactcacgggatgcctcatccagaaagttcatacccaggcgaagctgaaccggaagaggggtcttataaggtgtcttcgataattcgtgcgtgtaaaggtcgaacgcggacagagagtcctgattaaagaagaggatgttctggtgtgtcttgtcaaagttaagaccggaaggcgtggaagaatagtccgtaaaaagttctttccagtagtaggactgatttatcagccacacaggattggtgacctgtcccacaacatgtccccggctgtcgtgcacatcttctccgctgctctcgttcaaaggaaatatcatgatctcttcaccgtcggtaagagacaagttacggatggcatatgaagccacatccaggatgtattcgcatttaccaaaataaatatgcggtgagaatcctgtcggctccagtcccaggttggagatctccttgctccgcttgccaatcgtaattcgggcacagtctgcgggtatatccaaagctatggaaacaggcaaccagcggtgatcatagtcttccttatccagttcgaaagtacaaaagatacgtttgccgtcttcgttgaaggagaaagaacaacggtcgccgggtttgtgcagatacgtaaaactataaattttcccggcatcccggtcttccagataaaggatgtaaccgggactctccacattccggaccagataatcaaaggagatacggaaagcgttggtgaaagtgcgctcgtgcccttcacgcaaaacagaataggtggcacgctcactaatccgcttttcgttcccatagaaaagaagtccctgcgagaagcaatcgactatgcaaagccacatcattccgatagcaaacaaacatcccaaccttctcatatactgttcttcgataaatgcgtcatccgtttcatagtgcaacaaaaatacgaaaaattatagaattggcaaacgtatgcgccgattagtgcccgttggagtaagagtaaggcaagtcttccttctgagtgccgcgccgggaatcgggcacgctatccatccataacaccagctctcctccggaagtaagctcacggtgcgtcaggtagttacgggtaaattcactttcattgagcagggctttcccgatataccggttcgccgggctattgccttccgccttcacagtgaagttctttccgccgggcaaatgcaatgtcagtttcgggaagagcggagatcccatggcatactccggaacaccgggacaaaccggatagaatcccatggcggaaaagacataccaggcggaagtctgcccattatcttcgtcaccgcagtagcctttgctgccggagtgataaagcttatccatcacttcgcggacgtgcttctgggtcttccagggccggccgatatagtcgtatagatagatggcatgttgcacaggttggttgccatgtgcatattgccccatgtcaagagccaccatctcggctatctcgtggataacaaaaccgtaagtaccgtaattataggtattgggagctgtaaacatagagtcgagacgggcttccatcgctgtatgtcctcccatcaatcgagacaagccttcgggatcatgaaggacactccacgtccagtgccaggaactgccctccgtgaaagggcctccccattccgtcgcgtcaaaagcgtctctccatttcccattggcatcttttgcccacatgaatccatagtcgggatagtaaaggttgcggtagttgagggctttccggtaataggtatcggcaatctctttccggccaatggagtcggcaaaacgtgcgacacaccagtcggcgtaagcatattcaagggtcttggccgtagcctcgtgcacttcgggatagggaacatagcctaaacggtcatagtacccgaatccgtcacgtcccaccgagctgattccgggatgccgggcctcggtctgatgaatcattgcctcaagagctttctccggacagatggtacgaatgcctttcatccatgcgtctgtcaacaaggagatggaattattaccaatcatacattcccggtggcctggactcgcccactcgggcatgaacccactttcatcgtaagcattgaggatggattgggtaacccgctcggaaacttccggatataataaggtaaacaagggatggacggcacggaacgtatcccagaatccattatcggtatacatatagccatcctgtatcttcccattgtaaggactgtaatagacaggtttcccctgagcatcgaactcataaaattcgcgggggaagagcagggtccggtagaggcaagagtaaaaggtacgcaattgctcctcgctgcctccctccgcttcaattcgtcccagataactgttccattgttttcgggcttcttctctcacctgggcaaggctcttgcctcccacttcgcgactgaaattgacaagcgcctgtgcaggacttatgaacgaggaggcggtacggacggttaatttctctcccgccggcacattaaacctgaggtaggcacaagtataatcactctccaacgtcggccgatggcgcatcagtgtatctccgtcatatacgccttcttctgcaatgggatgactgaactctattcggaaatagttggcaaagttatccggtaccccgccattgtgattacgcgccacaccggtcacgcaccgattctcccggtcaatcgtcaacgcacttccaccgttgtaggcatccacaacgatatactgggcagagtcctgcggaaaggtgacttcgaataccgctccgcgtgaagtggcggaaagttctgtccggagtccgttggcaaacgtaacgctgtaactgtagggagccgcctcctcttggatatgtgagaaaggtactccccgttctttatgatccatcttcagcacaccggacagcggcataatagagaaagtaccgtaatcgttaatccacggactgggctgatgggtctggcggaacccccgtatcaggctgtcggtatacgtgtacatccagccgctaccgttctctccggtctgcggactccagaaattcattccccagggaaccgccaccgcaggataagtattcccatgtgaaaaagcataagtagactccgtccccatcagaggattcacatagtctacagggctgaaagactctttttgttgtacacacgaagccagtaaaagggctgcaccgacaattaggatagttgaaaaattcttcctcatagcttaattttattttctaacagaggctgtggtgaaaagagtttcaacacatcccccttgcattttatttaggacgcaaaactaatgaggaagggttaggaggagggttaattcccggttaaccttcttgcgaaaagtcattaaccgggactattttcttcttgcgacctgcaaattggattgccgtgcatagccaatcctgaaattaagaggtttcggatcacccagttgataggcatcgcgcaattccggctgaagatactgagagaaagtggagatcggcttgtagaaggtaccatataaagtaaccgaccacacctccggatcaaaacaggacaacggaatggaagagtcatcttgtacaatagcagacgatttctgaagaatcgtctcgcgtatgcgcgaaaaagcaggttcgtgcatcagataggaagccgacttgacaaatgttgctgtggtctccgcatcaaaacggtccataaacgcctgtaacggtcggttggcttgcaacccctcgttactgatatctgtacagaaataatagagggtctgcaatcgggaagcgcccggacggaaaaaccggacttccatccctgcactgcatgtgttccggatggtatccccctcttttctttcgaaaagatctccggtttccgataaccacacttcctgaatgctgactatcttacggttcccccgggccatcaataacgaatagatggggacaaccccgtcgatggtatcattggccagttccttatccatatcgttaaagaaactcagattgagtacgttcgatacggcattctgatacaaccggtaagtttcggcagaaggatgcttcactttcggagcagtgccggcaggttccaacccgatcagtacataagtgtccatctcggggaagaacgcattggcaaacagaaagtcaggaccgccgaaaggataaaacagagtatggcaacgagtattgatgtcttccagttccgtctgtgagaaagctaccagccggggagccgtctgccggaaaacattccatatctgatccatgtaacgggcatggttcttccattccttggtccgagtcagtgcgtaaagctttccgcttgctttatcaaccggcaaacctgcaagtacgcaagacgcatcattcagggctttatcaggaaccagcttcgcagagtcattggaagcaatcctcacccgggaagcattttttcctgcattgccggaagaggccgccccctgacaacaagcaaacagcactcccagcataaaagaaagtaatacggtttttacacaattagttagtttagttttcatttcgttcttaataatccttttcgttagccagattccagacgttaaggaaagaggccttagatatttcaaccactttatcccaattcagacggtctgcatggtcagaaggctgatggtaatcgggatgaccgtcggtatgataccaaatgatgggaataccggctttggcaaacgagccgttatcacttccacccaccggcttgtcccaagggcggtaattgggttctaactgcaagccgtactttttaatgtcttctttcagccaacgcccgaaagccggattggcttctgtatagaaataaaccacatgcttgggattttgcggctgattgttgcggccaatcatatcaaagttcaaatatcctttgacctgattaatgaacggacactcctgcacaaagtatttcgatccgagaagccctttctcctctccgtcccaaaaagcaaaaattacattccgctccggttgctgtccgcttaccacaaaggccttggctatttgcaacaccgccgatactccggaagcattatcatcggcaccattgtagatctggtcgccatccaaagcgggatcaatgcccagatggtcgaaatgtgcacctactatcacgtattcattcgtcttctttccgggaatcatacccaatacgttgttcatagacaacttctgatgcaccacttgtttcagtttggcaatggagtcagggtgcacttccagtcgtcctttctgctggcgttctttccggtaagcatcaaacggctgataatagctctcgcctaacggaaggatacccatttccttcaatagcgaagcgatataccgggcagctacacgtgaaccgtgaaatccggcttcacgtccttgaagttcatcatcggccaaaaatccgatataagcctcagcagcctggcggttaatacttttaagccccttttcgaccggggtctgagcacataaggtagtggcaacacaccacataaggacagtaatcaggtgttttcttttcatgatcgggatgtttctgttttagttcatttagcacattgcaaggacaaatatacggaataatacaaattaataagtacctttgcgaaaatttgattcgtaattatgtggatacttatagttggtctggtgttgctcgccatcgtggcaatgattgccgggtatatccgcaacaaaagactgcagaagaaaatagataacggagaactggacagttttccggaagtaaaggaagtcgacgtagagtgctgcggacagcacgaagtttgcgaacgtgacagcctgctggctgccgtcagcaaacagatagagtattatgacgacgaagaactggatacatttatcggccgggcacccgaagattatacaccggaagaggcggataaattccgcgatgtcttttatacaatgcaggacaccgatgtagccggatgggtacgtagcctgcaactgagggggatcagccttcctgatgaaataaaagacgaagtgtttctggtagtcggcgaacggagaatccatccctgatccatctgttccctccacactcctaactgctgaaccgtatgaatttactacaatatacattttttcaacacgctctcctggggagtcttctggcaagcattgcctgcggcattatcggcacgtatatcgtgactcgccggttggtgttcatcagcggcggtatcacccatgcctctttcggcggcatcggactgggattgtatgcaggcatatctcccattttatcggctgctgtcttctccgttttatcggctttcggggtagagtggctcagtaaacggaaagacatgcgcgaagattcggccatagccatgttctggacgctgggtatggcactgggaatcatgttcagctttttgtcaccgggattcgcacccgatctttcagcctatctgtttggcaatatcctcacgatcacacagacggacttactcatgctgggcattcttgccatcttgctgatcctgttctttaccctgtttatccacccgatcatatacgtggctttcgatcgtgaatttgcccgttcgcaaggcatcccggtcgtagtgctggaatatatcctgatgatgttcattgccctgaccatcgtttcctgtctgcgcatggtggggattgtactggcaatctcgttactgaccattccgcaaatgacagccaacctgtttacgaacaagtttaaacgcattatctggttatcgattgccatcggctatctgagttgcctgggaggtctgctgatctcttaccgcctgaatgttccttcgggagcatccatcatcttcttttctattcttatctatattgcctgtaagataggaaagagccttttcagaaagaaacaataaaccaacatacaagtatggaaatcaagattcaatcactggaacaaattcacgaagctgcccgcgagttcatctcagccatgggcgataacacggtctttgcactctacggaaagatgggagcaggtaaaacgacttttgtcaaggcactttgcgaggagctcggagtatcggatgtcatcacttcaccgacttttgccattgtaaacgaataccgttcggacgagaacggagaactgatctatcattttgacttctaccggatcaagaagctgagcgaagtatacgatatgggatacgaagactacttctatagcggtgcactttgtttcatcgaatggccggagctggtagaagaattattgccgggagacgccgtgaaagtaaccattgaggaactggaggacggaacaagaaaaatagtgatcaacgactaatcatccgaagaatggcccctcaatattttgtacagggaatatttgccaccgcagggctcatagccctgctggcatctatactcaactggaactggtttttcaccgctcaaaatgcacaactgatcgtacggaatgtcggtagaggacgtgcccggctgttctacggactactgggagtcattatgataggtatggctgtcttcttcttcctcaatacgcaacccgtatcagagtaactggcgcgatttcatttccagatatttattgatcacatcaatcgacagcttatcaggagttgtcagcagcgagtaaatgccatgctgtttcaaagttgacacaatcagtctcttctcgaacgcaaacttctctgcgatgacatgacggtaatagtcctcggtagtcaccgacttgcccgctatatactctttcagatcggcatcctcaaagaatacaaccaatactctgtgttgccgcgccaattgttgcaggtaaactaattgccggttcaggctggtcatattactaaaattggtataaagcaccagaaagctacgtttattcacatgcttgcccaagtgcccgcataaggcagaaaagtccgtttcaccaaatgttgtttcctgtttatagaggttctcaagcaaagtctgcatctgaccgacttgcttggaagcaggaacaaacgtatcgaaatactcgttaaacgtaaccagcccggctttatcgtccttccgcatagctacatacgaaagcaccaacgaggcattgatggcatagtccagcaatgtcatgccacggaaagcctgctgcatcacacgccctttatcgatcacgctgtatatctgttgactgcgctcgtcctgatagacattgaccatcaactgatgacggcgtgcactggccttccagtttatggtgcgataatcgtctccctttacatactctttgatttgttcaaactcagtctgatgcccagcccgacgaatacgcttgataccgagttcggtcaggttatcgctcatagccagcagctcgtatcgatggagcatcaggtaagaaggatataccttaacggtttcaggtctgccacaggtagccctgcgggatattaatccgattcgggtagtcgtaaaaacgcggatgaatccgaaaccgtattctcccctgcgagtcggcctcaaccgataggtaagcgtctttccctcattaggtaaaagcgacagctcgaagtgtacattcctttgctgaaatatgaccggcacttcatctatcacgatcaaacggacgggataggaataacggctctctatacgcaggctgacttcgttatcatcaccgttagaaaaacgtccggcacactgacggaaagcctggatacccttggtgcgatacaacagatatccatcgaaagccagagcaagcagcagcgcaagcagccctaactgtccgatgataaacagagaaccgaacaggtatccgccacctaacaagaggatgacgacaaggacgagtatatagaaacgtttggtcaggaacataattatttgggtacttccactttatcaatcaaccgctgagtcaccttgacaggcgaataaccttccatctctgcttccgcagtcagaatcaggcgatgctgcaacacataaggtgctacaaacttaatatcctccggcgttacgaagtcacgtccctgtaagagagcataggctttggatgcctgcaacatagccaccgaagcacggggagaagctcccagatacacagctttactggtacgggtttgttgggcaatcaaggcaatgtactgaagcagagtacggtcaacaaataccttttccgtcaatcgacgaagagaaagcagttcttcacgggtaatcaccggttgtatctcttccagttttaccaaggcggcattagtgtgatggcgttccaggatattgatttcttcatcaagtgacggatagtccatggtaatcttcatcaggaaacggtcgagttgggcctcaggcaacttataagttccctcctgctccaccggattctgggttgccagaatggtatatagttctcccatccggtaagttgttccgtcgatactggcctgacgttcttccatgacttcgaaaagagcggactgcgttttggcgggtgcacggttaatttcgtctaccaatatgatattggcaaagacaggtccccgatggaaatcaaattcattggttttcatattgaaaacagtcgtacccaggacgtcactcggcatcaggtcgggtgtaaactgtacacggctgaagtcggcatctatcaaacgggctgtcaggcgggcaagtaaagtcttggctactcccggcactccttctatcaagacgtgaccgttagccaaaatagctgtcaacaccaaatcgacagtacgttcctgccccacaataacggaagcgatccggcttttcagttcctgcatcttctctgaaaaaagagtcaaatcggtacgcggagtttcttctccatgcatatcattcatattttcttccatattctttttatttatcaaattcatatttcattcctcccacagctttcttcttccgaaaaaaggtcagggttgaggcttttctatctcgttcatcccgtcaatcagatctttcatcaacgtctcgccgacttcctgctgcccgcgaatcacgggacggagcttacggaacagattccggactttttcttcatcagtccctgttttccgggaaatccgcctagacaaggcattgtcatcactgtcatcttccacatccacctgaatattcctccgcaggctctcagcaaagtaaataaactttttgcgcacaagatcagcatgattcttcttttgataatataaagtaccgatcaactcggcaaactcgagattacggtttgcaggctcacgaatcaccggaatagccctttgccttctgcgggcggtaaataccataaagagcaccaataccagcatcgtcaggtaaagcgcccacctcagaggacgctgggaaaggaagtaacgaaaaggagatacctcaacctgtgctcccaccccataggcttcggtacggactaccggtaaacctttcagatgagaaagcagacggaaaaggtaggctgcattgtcgccatcgagcattccatagttggtaaacaataacggagtagtgaccaaaacaatctctccgctccctaccggacgactaagggccacgggcggaaaacaatccggcaaactgtcattgaacatttgcatcgaatcaatccgactggtagctaacggtagagacaacgaatcgtactttgtgaagtaaatgccacataaatgaggataaaaacgaaaagtacgcttatcatatactgctgaatccccaatccagcagacactgtcacgctccaataaattgcccgcatactctttcatccgtctcggattaaaataagcatacgaattgtcgaatcccaacgtatcagacagcgaagtactgaaagaggaagcggctatcaatatcttgtttcccctttgggccagatcgagcaaagcattgagatccgcctccaccagatttacatgttgagtaatgacaagaatactccggcaggagtcactgtcagcagcgaactgatagaatgtcttgcgcgaaagagaatatccatccggaagagaggacttcaagacatcatcaaacacggcacaccccagtggctggtgatcatgttgtgcaaaggtgggattccagacgaatttcttcggcagatgagattctaccacaaacatgatcagcaaaaagagaacgatcccgataataaaccaacgactgcttctcatacatcccctcccttcctgatttgagtttgcagagctgccagctcttcaaaaagagactcggaagcgggaaaattaccataacgtacccgtaagaaaccatgggtcagattcctgaaaggagtacgaagcatctcctgctttacctcataaatatattctgtaggagtcttataaagttgccaatctatccggccgtcatcgctcaacagtttaagggtctgcaaataaagcagacggatggcctcccggtaatccttgcggtctatggcacgcctgatctctgcatcaaaatcgactccgtaaatggtatcttcgtggacactatagtttacaggacctctgcgtgaacgcataaaaagctcgggacgctttttataaagaaaccagaggatcagcaacaggatgagaatagcaataataatcaggataatgccggaatactcctcagcaaaacgacttccgaaaatggcacgaagtaacttggagagctgcatactgagccacccgtagatatcaatctcaggagtcatcagttcacggttatagtcataatctggattggattgccaaaaagcaacccttgcggtatcgcagaccaatgtatcagcttgcaacgtcatttaaagtcgatcataattgctcaaatttatctatctcgctttctaccgaaatgctatctaccacctcactggcatgaccgtattgatataccataccaatcaaagaaaatatcatagaaagataggcaccaaaagtctggacgatagccaacaggtagaccatgaaactatatccggcagaaatggtcagttcattctgtgtatcgctcagcataaagaagtattttacgatagtggcaatataccacggagtcgtagtaactccctgcaatacactggatatcaaacccatgaccagagatactaaaaagacaccgccccatgtggcaaatcccagacggaaagttttccagaaagctgcaagaatgccgatctcctcaaacaagtaaatcggagtaaacaaggctaacggcactgcacaggctatcagcaacggaatagtaagcaaaagcgtgaacggagaagctacaaccagaatccccataacaatgcccaccactatagtaaggcctatacagaacagtaccataaccagcagccgtcttatattcttgaacagaaaaggtttcaagtcggcaaacgtcacaccggccaaccgttcttcgcgctgattataaatctgcatcagtccgtaaataatagaagtcagcaatatagaacctaccagatagcagagaaacatcagtccgtaatttacccagaattgcattccgatggccgctaaagaattggtcccggcctctttggcagctgcaattcccattgctcctcccataattccattcatgctgatggcttgaatcagacataacggcagaatcaaataggtacagaacttcaacatcggtttccagttctcttttataaagtccatggtcgcattcagtttatcaccaaaaggacgcttcacatataaagcaattttaggtttttgtgattccatgagtttttctgtttggtaaataaatatagtaatagataataaatgacagtgacaatagaatgatgcccaaccgcaaaacatcgggtaattcggtatgacgcgtgataaaaccttcgataaatccggccattataaagataggaactgtacctactataattttcagccctttcttggctcccctcataaaagactctttacgggaataagttccgggaaacagccacccgtttcctaaagccaaccctgcagcaccggctacgataatggcccatatttccaaagtcccatgcaaccagatcgcaagcatggattcgcccaacaaaccatgtttaaagaaaaaggtctgaaaagcaccgagcatcactccgttattaaacagtaaccatcctgttccaaagctggtgagcaaccccattgcaaagacgttgaaagaaaccatgatattatttaaagtaatgcccagaaacataggtacctcttccgaaccgttgtacacagccatcggctcaccacgcgctatgttatcaagtgtcatatccacatagccgttgcccagaatcaggcggacgaagttatcatcattcgctgctgaaacaatgcctaccaatacgctggccaaaaaaatcaggaccgaaaccaacaactctttacgagcatggtacatcgtttgcggaacctcttgcgtccagaaagtaaagatacgggtccatttctccttcttattgcgataaatcacattatgaagagccgaagccagattattcagataaatagtaatgcgggaagacggataatgagtttgtgcaaacgcgagatctgccgtaagttccgtataagcgtcggcaagacggtcaggagtcagtttatctgcctgctccaccaccttctcagtctctttccatttctcaatattccgacgtataaacgttacctctttcatccaaccggttcggctccggataagttttgtccgaaaccggaagcaaaagtaagagaattatgatatatttgcaaccaaaactaaaaaatgtttaaccggaaatgacagaatcgactatgattgtcacactttagaagaaatcggattaactctgcttaaaaacagtcactcactcttcttttctgtttttc

SEQ ID NO: 5092 - DNA, 398 bp, Unknown
  gut microbiota DNA sequence
ctctctaccaactgggcagacaaaaagctgatggttggttttgaaggaggctggttcttcaaagatcagtggaaactaaatttgggtggcggtgtcagcttcacgaataaccccggttatccggctgttcccggcacaatagacgattcgaataagaataactcggctgacgagaatatgggagagattcctaactatcgtgccgtagccgatgctcagtcgttcgcctataatgtgtcagcaggtgttgatcgttatttcaacatcaagcgtgttcctaacctgatgtggtatacaggtattcgcgtaggttttgcttacggtgaaaatgaaatgaagtatgatgaagagacctctatgggcaaatctattgccgagagttggaatcttcgcggcgc

SEQ ID NO: 5093 - DNA, 145426 bp, Unknown
  gut microbiota DNA sequence
tcactttagccggcggggcactgtccgtaggaacagccacgtcatcattctgcgaacaacttgccaatgccgctatcgcacacattgataataagatttttttaactttcattctgtgatttttttaatgaataaaattgataatgtttatttgtttcaagcttaaatattgttttttactgcatctctattctataatagagattgaaaggagagtaagcaaatcataaaattctagttatcaataaattagcatcacacaaccgacataataccttatgaaaagaacaattaatataataagctaaggtttaattcacagtattttagtacaatacgaaaagctatcagaacaagatgctgaaataatactgaagtaaaatgaataagccaccaaactcaatatgatatgaataagaaatcttcacttaacaatttgctctatatacaagagcatcgttcatgcagaaattacctggaaaaggtagaaaacggattcaaatatattgaattctcacatgaagaagttattctggaaaaagaaatttcatggaactatcttttatttgttctcgaaggagaatgtatcatcaattgtaatcagtttagagaacgtttgtttcaggctaactgtatggtgctactccccaaaacggctatggttgaaattaaagtcatagccggtacccggttactctccttatcctttgatgttcccttaaacgtatgtgataagttcatattacaatcgttaacaggactatgcaggaaactggattataatttccagtcactcgctatccgttatccccttcctccttatttggagattgttacgtattgcctgaccaataagatggattgcggacattttcacactttgttgcaacaggaattattttttttactccggggtttttatctgaaagaagaattagccttattgttccacccgatcatctcagcagaattaactttcaaagattttgtcattggcaattattttaaagtaagcaatgtaaatgatctcatctccctctccaatatgtgtaaaagcagcttttactgtaaatttaaagaagtattcggaatgacggccaagcaatggttgctgaaacaacggaacacacatatattaaataaagtgatgacctcagagactacagtcggagagttgatggaggagtttagatttgagtcacaagctcatttcacccactattgcaagcagcattttaattgcacaccacgggagttgattatgaaatatcaggttgtaaatcagtagtttttaactactttgtgaagttttgtacgaaatatcaaaattattgttctttttggcaataatggcaaactgacaatgtcgtacttttgtagcgagaaagatagattgatgaaaaatatgaagtattaatctctattatagaatagagaaatacagaggaactcattttctctccagaagattatttaccatcttattgatccggtgaagaggagccaaatccaattccttaagatagacaagtgtcatttcttctttggtatgccctaatcccgcactgattgccgaaaccggggccccgtattctctggccagtgttgcccatgtatggcgcgcggtgtacgtagtcaacggagaatcaatcttcagtttcgcagagattatttttaagtgcctgttggtacgtcctaaagctgtacgatactgagtatattcatttgcattgtttttgataaccgagaatacatactcttctgcattgttcgtattattcccatgctcgtctataatggatttgatctggggtgtaatgactatttgtatcaattgttttgatttatgtcttctatagataatccgattaccacttatatttttccacttcagatatgcaatgtcaacaaaagccattccctgggcatagaaaccaaaaagaaaaagatccaatgaacgttttaactctgcatcggaatgcaatgacagacaagccaatttaaccatctgttcccgatctaatgcacgttttactgttttacagggcttggtacatatttccttgaacggataatcgcatggaggaaccaagccgtcctttaccgcgagattatacaatgccctgaagttccttaaatagtatccgatcgtattttccgtagccccatttttggataaaaagtctctgtagcaagttacaaagcggtggttcacttgcgatattttcacctctttcttaccgatatatttggcaagtgaagcataggtactttgataagcagcggcggttccgtttttcattattgactttttccattctatttgtgtatcaatgtaaggcagtaataagaatttcccggtcgcttttgaaaacatgacagtagtgatatcatttattgtatattcctcaccacggctttccagtctgcgaactcgtgcggtcagttgcttatagatcctcaacaattcgcgactgattttgcaaccggtatggcaacccgaaacaacatttccggcaataattataaagtcctcttctttcatacggtatttcgtataaattatttttttgcgcttttggtggattagctggaataccaccggataattcccatctttcaatgcacgggtcttgttcaattttaattttactgatgtcataagttttaatttaatataacaaaattatcttttcgggttgcaaataaaagattcctccagcaattgcgcaaaagatcgataccaaatcctttattgaacttttgtattccgaaataattttgttaacgagcctcctgtttacatcaggaggctacagtataccggacgtcaagtgactttcgcagttattttatttgtgtgctttaaattcatttttttaagaagttatactgcataatccagcgacagaactatgtgtgtgctacttgtcctaatgcctatcatataagatctgcgtctttattaattctcttttcttcattaccataaatactgaatatgagtgcaggttatgtcttcttatttcttgaatacaaaattatgcaataaaaagaagaagcttattaccaatttgcgtataaaatctaccaattaaggcaaggtactcatattatcatccttattgctgtttcttatttgcatcggagcggcacccaaatgttgcttacaataaaaattaaaatgcgaagaggttgcaaatttaaattcatacatgatctgcttcaatgagatagcgggattcatcaatctttgttgtatctgcaaagccttccgtttctgcatccatttataaggagattcatcaaaattctctctgaaaagcttttcaaacgtctttatgccataccctaaaagaccggctaactctttaacggttttcacttttaaataattatccaacacccgttcgttaaagagcggattgctgcctaatataagataaaatatctgtattatctcctcatacgtatagaagtgcttgaacatgagatacagttctttatgtttcaaaatgtacatatgatgacagtttattccggactcaagataatgcttcatttgattcactactactttgacttcgtccttcatcactactccacggcaatcgaacttcacgccggcctttattttatataaaattcttgccctgacactcgtacatgggaaaatggtggcgttgtatcctgtaagaatcaacactgtttgcgtaacagctttccatttaaaacagttgtttttaggcagaaaaaacatttcattttccaacacggaccgattagtgtactgctcaaaactaattgtaatttcacctgaaagaataaaaataaaaaaactggtagttctattattcaattccatgcactctccctctttcattataatatactgaggtatcactttaaattccggagagaaataaggacaaatatccggttgttggtttaatttttgcatgattgtttgtatgcgattaagttttaaaactaataaaaagatagaaaagcaccaacttataagatctttttttgtttttaatatcagctatcatcattgaaatgaacaccgtgtataaagaaaatactttatcttcggaatgatgattttgccatatgaaccgatacggaatggattactatagaatattttgtatctttgacgagaataacagagaaaaaagaacccaatgatcattcgtaccatactcgatacagacctttataaattcactacttcgtatgcttatatcaaactattcccgtacgcaataggcactttcagcttcaaagacagggacgggactgaatatagcgacgagtttgtggaaagattgagaacggaaatcagtcagctatcacacgtggcactgaccgaaaaagaactggaatatatgataaagaactgccgcttcctgcccagggtctattgggagtggctctcttctttccgtttccaacccgagaaaatagaaatccgtctggacgagaatcggcagcttcacatcgaagtgaacgactatctttacaaagcaacgctttatgaagtacctctactcgccatcgtttcggagataaagaaccaatcgtccggcaatgttgccaacctggaagacatcctgtacaaactgtccgaaaagacagaactgtccaataagcatcagctacttttctctgaattcggaactcgaaggcgcttttcgttcgatgtgcagaatcaagtcatcgggcacctgaaacagacagcccattactgtatcggcacttccaattgccatttcgccatgaaatacggcatgaagcccatgggtacgcatccccatgaatggttcatgtttcacggagcgcaattcggctataaacatgccaactatatggcccttgaaaattgggtaaatgtatacgatggcgaccttggcatcgccttgtccgacacttatacatctgccatctttctaagcaatctaagccgcaaacaggctaagttgtttgatggcgtgaggtgtgattccggtgatgaattccggttcatcgatcagctgaccgcacgttataaagagttgggcatcgacccgaccaccaagacaatcgtattcagtaacgcactcgacttcggcaaagcactggatatccagaagtattgccggggaaagatccgttgctctttcggcatcggaacaaacctgaccaacgatacgggattcaagccatcgaacattgtcatgaagctatcgcaatgcaagatgaacatgaaccaggagtggcgcgaatgtgtgaaattatcagacgacatagggaaacatatcggcagcccggaagaggtgcgtgcctgtctatacgacttgcggttggagtaacctccaaccgcaaatacattttatcataacagtgctttaatggcatctgtgatttcttcatcggtccgccccattcgatacccccggatgacctttctgatcacccgatcctgatctaatataaagaataaaggtgccgcgccataagtccggtatgacttgacaataccttcatcaccgcacaaaaagctataatttatttgattcttatccgcataagttcgcagcgaatggggttcacgtccccaggtttctatagaaaccacttcaaattcaccggcattgaacttccctttcaatccgttcaggaaaggaatggaggcatggcaagcaccacaaccgataccggtgaggttcaccaatagcactttacttttaaattcggataacgccaccggtttctcatacatatctttcaacatccagtcgggagctttctgtcctataagatctgtcgccgcaggccgagtgacctttttttgctcgccatacttgcggatctcatagtcttggggcacataatcatataagtttaaaccggctatcgacaattgattcaagactacatccgaacaagtagtagcagaaatctgatgcgacatttccctgcgcattttataaggcagaccgtccgctttgctaatccacaattcgtaaatcgaggtcgggtctcccaaatcaaaaggaggcttcggtatgtagtacgcttttccaaaaaattcaacctgcctgtcttcatgtatcaccaacttgaagtaatacgcttctcctaaatccttccattcggtggtgatactatctcccgtactcaaagcatatccgatgatattccgggtataacaaaaaaacggaggagccaccaacctgaaaggaagggatctggtcgtgaaatcatcgatcataatccctttatgctcatgataacttatcatcctcacgtttccatcataaccaaattcaaatcgcgtcgtatccttggcgtcaagacacacatagctcgcgccgatggttgaatcagaaggattggtgtattctttaataaaacgatgaaaattggtaatggcaacggtatcgccgggttgccaggactgagattgctcatgataggaagctgattctatcttaccaagattaccgagaacttttttcaaataagttctcatatccacatcattcttaccacagacattcatgactaacaagaatgaaataacagataacaaaatggacttcatagtattttatattttagatacacgcaaatatagccaatgaaaacagaaatcgacaagcggtatcccaacttttatacttaataataatattataatatctactaacttttcatagaaaagagacactttaatggcccgaacacaaatagacgaagatattcctattttaagatcagaaagaaacgatttctctctttttaataacacaccgtctattcaaaacttatgtaatagaaagatacaacgcatagatatgacatttacatacagaaatctacattatattgagtaaatataccattttacgtacccaaagacttaactctttccgaaaaagaagttaatgttttcccggtaagaagttagtcttttcttcagaagaagttagtcttttgtccggaagaaattaataaagcaaaagaagaggtaaaatacatgctttctgaagttatcagagacctcagagggagcatttaccaactatcattttagagaacggaattgagttacatcaacagaatgcttctataccggaagattatcaatccataatatcagataaagagccccaatcacatcattttaattttgactaatggcaaaacaacagctttttcgggagcaatcgcaaagaagcccggaaagaaacgaatacagcccgtattaaaaatacagaatgacagttcgacgtgcttctgtcaaaatgaaaattttcatctgaatcgtttgtctttcctcctctctttacttacacatgctttttccgcatcaggagttgtctgatcttctccctgtcacccactatccataccagatctcccaaacggaaaaccgtactttgattcatggaaatcaactcgtcttcccgctcaatggcaacgataaggctgtcatactgttttcccaaccgtgactgggcaatacttttattcaggagcggagattcttcatctaccgtgaaagagtgaagcgtcacctcttgtcgcacattcttttcgtccggaaaatcctgccggatgtcgagttccgaacgaaacttctgtaactggccgtctgtaccgaccacgatcaacttatcctgcggataaatgcactcgtcactttgcggaatgtatatcctccgttctcccctgacaatccccactacattgacaccaaactcacgcctgaaaggaagttcctccagcgacttccctatataagatgaataaggagatacccaaacggaggtcaactcgatatctttatcactaaactcactgttgaaacggctcttcagcggatagcgattccgggccgcttcctcccttccgttcagattggtcaggaagtggttttccaaatgcgaatattgggtgaggttctccctgagaagaagtatcagtcccaacacggcaacagctatgacaatacctatcccgtaattaagactaaaataactgatgacaactcccgctatgaaaaaaacagccaccgaaacacggaacagaatcaacgctaccagcctcccgtgattgtaattgtcgtcattccacaacttcagaaacacgtccggagaattgtacttatctgaaacaagagcccacaagaaaggagtcatcagcaaaagggtgagcaggcacatcactacactcagccatcgtcccggggaatcaaacattccgtttatcgtcgggtatacggtctgaacggacaacagccaaatagcagtaaggaggacactgtaaataatcactcttccgacaatcgttttcagtaaccgcttccagtcactatcatgattgacggtcttcttgccggaagcgtaacggtccagaaattcacgggtccgaggggaaagtactttataaagccattcggaaaacggatttgccaaccggataaaatagggagtggtaaaggtagtgataacggataccgcaacgataatcgggggaacaaacgggtccagcaccttgagcgaggctcccaatcccgcgataataaaagcaaactctcctatctgggccagactgaacccggacttgacggaaaccttcagtggttcgccggatagcaagacccccaatgaagagaaaatcgatttacccacaagagtcaccaatgtaatgataaccaccggccaggcatactgaagcaggacagacagattgaccagcataccgacggatacaaagaaaatagctccgaaaagatctttcaccggctgtatgatgtgttctatatgttcggcctcaaccgtctcagcaagaatagatcccataatgaaagcacccagcgcagccgaaaaaccggtacgggtagccagcacgaccattgccaggcaaagcccgagagagacaatcaacagagtttcattattcatcaaccgctttgcttttttcaggaagaacggaaggatgaatataccgaccagaaaccacaaaatcaggaaaaaggcaactttcaggacactcatcaagagttcctcacccacaaactctttgctcaccgccatagtagaaaggatgaccatcatcaggatagcgatcaggtcttcgaccaccaaggttccgaacacaatgcctgtaaaccgttggctgcgcaaaccaagatcatcaaaggctttaataataatcgtggtagacgacatggacaacattccacccagaaacacagaattcatcgtactccaccccaacagatgccccaccataaaaccgatcagtaacatactgatcacttcggttgttgccgtaataaacgctgccgatccgacattcatcaattttttaaagctaaactcgagtccgagagcaaaaagcaaaaagacaactcctatctcagcccaggtattgatgttctccatatcgccaacagtcgggaagatgcggacataaggcccggccagcaatccggcaacgatatatcccaggaccaggggttgcttcagccatttaaataaaagagtaatgatacttgcggacatcagtattaaggcaaggtcagcaatcaaggtaggtaaatgtgacatagtatggtatgtatatttcgttagtacttcattccgttttatgctcgtttattgtacccaaagaacaatcggtagtccgtttgtgttccgtatatatgacatttattttgaaaaaaagctgcgggggcattgcacaaaactgaacttttcgtgcaaaaagtatccatcctattcaatatttctctatatttgtcgccgaattggttcggaatccgtggtcaacggacgaagattaaaagggaatcgggtgtaaatcccggacagtcccgctgctgtgaaactctgtatagcatcttatcaatcagccaatttcgtaccactgacagaaaaagcaaactctgtcgggaaggtcccggtaagatgtagagtcagtcagaagacctgccattcgtgaataagagcattctctcctcgtgggttaggaaagaaagcatcgttgttaagccccaaatcgtagaaatactgtgttttcatcgggtggacgtatgtccgcagggtggaaaagcgcgaatatgtatatgcatttaattgagaaatgaatatgattaaaagaatcttagtcgccaaccgcggtgaaattgccgtgagggtgatgcgctcctgtcgggagatggaaataacgagcattgccgttttctcggaagcggaccgaacagcgaaacatgtgctttacgccgatgaagcttattgcatcggaccggcagcatcgaaagagagttatctgaatatagaaaaaatcattgaagtggcaaagtcatgccacgcagacgccattcacccgggatacgggttcttatcggaaaatgcaacctttgcccgccgttgccgggaagaaggcatcacctttatcggtcctgacccggaaacaatggaagccatgggagataaaatctcggcacgcatcaagatgatcgaagccggggtaccggtagttccgggcactcaagacaacctgaaaagtgttgaggaagccgtagaactctgcaaccaaatcggctatccggtaatgctgaaagcctcgatgggcggtggcggaaaaggaatgcgactgattcatcatgcagacgaagtggccgaagcctatacaacagccaagagtgaatcgctttcctcgttcggagacgacacggtctatctggaaaagtttgtggaagaaccccatcacatcgagttccagatactgggcgacaagcatggcaacgtaattcacttgtgcgaacgtgaatgctcggtgcagcgccgcaaccaaaagatcgtagaagagagcccttcggtttttatcacaccggaactgcgccgggatatgggcgaaaaggcagtagccgctgccaaggccgtgaactacatcggtgcgggaaccattgaattcctggtggacaagcaccgcaattattactttctggaaatgaacacccgcctgcaagtggaacatcccatcacagaagaagtagtcggcgtagatctggtaaaagaacaaattaaggtagccgacggacaggtactgcaactgagacaagaggacatccagcaacggggacacgccatcgaatgccgcatctgtgcggaagatacggaaatgaacttcatgcccagcccgggtgtcatcaagcaaatcacagaacccaacggtatcggagtacgcatcgacagctatgtatacgaaggatacgagattccgatttattacgatccgatgatcggcaaactgatcgtgtgggccaccacacgggaatatgccatcgaacggatgcgccgcgtgcttcacgaatataagttgacgggcgtaaagaacaacatcagttacctgcgcgccatcatggatacacccgactttgtggaaggacactatgacacaggcttcatcgccaaaaacggtgaagtgcttcagcaatgcatcacgcgcaccagtgagcgtgcggaaaacattgcgctgattgccgcctacatggactacctgatgaatctggaagaaaacaacagcggactggcagcggataaccgcccgatcagcaagtggaaagaatttggattgcacaaaggggtattaagaatataaaagtatggaaatacatataggaaatcgcgtggccgaaatagaattggtcagcaaggaagacaacaaagtggttctcaccatcgacggaaaaacgttcgaagcggacgttgtcatggcagagaacgggaattgcaacatcctgatggacggacgcagctccaacgcccaactgattcgcaaagagaacggaaagagctacaaagtgaatacacactacagcagcttcaatgtcgagattatagacagccaggcgaaatacctgcgcatgcgcaagaaaggtgaagaggagcagaacgaccgtatcacttcgcccatgccgggcaaggtggtgaaaatccccgtcagtgtgggacaagagatgaaggccggagaaacggtcatcgtcatcgaagccatgaagatgcagagcaactacaaggtgacttcggactgccggattaaagagattttggtgcaggagggcgataacattgccggagagcagacgctgataacgttagaataaaattaaagcaagaataacaatggaagatataaataaagcttatgccacgttcgccgaacgtgaccgcatcgcttctttgggtggaggcgcagccaagattgatatacagcacgaaagcggaaaaatgaccgcccgcgaacgcatcgacatgttgctggataagggtacatttgtagagctggacaagctgatggtgcaccgttgcaccaactacggcatggaccggaacaagattccgggagacggcgtcgtgtcgggttacggaaagatcgacggacggcaagtatttgtctatgcctatgacttcaccgtttacggcggttcgctatcggcatcgaatgccaagaagatagtcaaggtgcagcaactggctttaaagaacggtgctccgatcattgcactgaacgattcgggcggtgcacgtatccaggagggaatcgaaagcttgtcgggttacgctgacatcttctaccagaatacgatggcaagcggagtgattccccagatctcggccattctgggtccttgtgccggaggagcctgctactctcccgcactgacggatttcatctttatggtgaaagagaaaagccacatgttcgttaccgggccggacgtcgtgaaaacggtgatccacgaagaagtcagcaaagaagagctgggcggcgccatgacacacagcagcaagagcggtgtgacacacttcatggccaacaccgaagaagagctgttgatgtcgatccgcgagctcctctcattcctcccgcaaaacaacatggacgaggcacgcaagcagaattgcaccgacgacgtcaaccgtgaagacgcctcactgaacagcattgtcccttccgaccccaacgtaccgtatgacatgaaggagatcatcgaaagagtagttgatggaggctatttctttgaggtgatgcagaactttgccaagaacattattatcggttttgcacgcatgggcggacgctcggtaggcatcgtagctaaccaaccggcttatctggccggagtgctcgacatcgacgccagcgataaagcaagccgcttcatccgcttctgcgactgcttcaacattccgctgattacattcgaagacgtaccgggtttcctgccgggttacacccaagagaacaacggcatcatccgccacggagccaaaattgtgtatgcttttgctgaagcaacagtacccaagttgaccgtaatcacccggaaggcttacggcggtgcttacatcgtaatgaactccaaacagacgggagcagacgtgaactttgcctatccgagtgcagagatcgctgtaatgggtgccgaaggtgcggtgaacattctgttccgcaaggcagacgcagagacgaaagcccaagagctgaatgcctacaaagagaagtttgccaccccctatcaggctgccgaactgggattcattgacgaaatcatcctgccgaagcagacccgcaaacgcctgatacaggcattggagatgacagagaacaagatgcagaccaatccgcccaagaagcacggaaacatgccactttaaacagctggcggatggagtaatcataagagagaggagggtgaataccagtttcaacacctcctctctctctttttaacctgactactttaaaaaaacgctttcacttatcgctgccgcatctcgtttacaaattcatccgttgtatacaccttttccgccaacaacgtgaagttgataaacgctgccgtatcggcatccatccccggaagcttggcagaagccgtagcatcaaacaccaccgctgcctcaaatccccgttcctgcaactcgcgcaaatgggattctgcacagagattgccggacatgccgcacaccactactttattgaccccgcgcttacggagttgcagaatcaaatcattgttttccggaccgtaaagtttgtgcggagctgtaacgatgatgttcgtgccttcgttgatataaggcttgtagagatccagccagtcggcacccgaaccttcaaatccctcaccggtcagttgtccccggcgctcaaacatacccgtgtcatgcatcagtttctcgataggcccctcaaaaagccattggtgatcgtgtttgtaataataatgtggagagatgaataccagcatacctttcgctgccgctacctcaaagatgcggcggaggttctctaccgtaccgttcttctgtatattctctccaaaagctccccaacctaaaccgttctcactcaggaaatcgttttgtgggtctgtcattacaatcgctgtatgttcgtcaataacgaacggggtattgataccttccataatctttttctgtttttagatgtttatattcattttcaacccgggtgctgccgtatcgggcagcctccgtttttttcgactttgcaaaggtcggtattcggtacggtacgggaaatggccattcaaccggataatttggcaattcttcccgattacacaaaaacatctattttcatcccggaaagggaccggtataggaagaaagccggagcaggaacacctatttatatataaaacacttatgttataaaccattagacagtaactcccgagagttcttttttgtattcgggaataattgcctattcaatatgtgatatcgctatttcccgtgaattaaaagccgcctatctttgcaacatcagattgagacaactaaaagaagacccaaaacgttatgaaaaagaatttattaattttagtcgcactgctgacatcggcaacgatatcggcacagaacggaggaaccattatgaagaagtatgagaaccaactacctcaagccggcagaggaaacgtgcatgttgcctaccaaggcaaagccatcgaccaaatgatttacgattttatggaagaacagggaataccgggcatgacacttgccatcgtacaggcaccttatattccgcgtgtagcaggctacggagtgacggaccttgaaaaaggaaaccttgccgctgccaagactctttggcccatcggtcccatctcacaaggatatgcagccgtggcagtgatgcagctctacgaaaaaggaaaactagacctgaacgacccgatcggcaagtacctgaaagatatacccgaaaactggaaaccgatcagtatccttcagttgatgcaacacagttcgggcattgcggactatcgtaatgaaaaggaattcgatgtatcggccgattatcgcccggaacaactgatcgaaacggtagccgccattccgctcgccttcgaaccggggacagacgtgaaacagagcgccacaaactttctgctactgacttctatcatcgaaaaggccggcaagatgccgtatcacgactttgtgaaaaagtatcagatcgactacctgggactgaaacagacattcttcggcgaagacctggcgaaagtaaaacaggaggacgtgaccctcaccggcaacgtgcatcagacattcaaaaaagataaagactacatcaatccctcggaaacgactaccggatatgtggaaaaagagggtcgccttgtcgccgcaccggctgtcagcccgacggcactgaaaggattctccgacatctgggcatcagccgagaatgtgagccactgggacatcggactggcgggaagtgcattgatcgaaaagcccgaaaaccgtgacatggtgtacaagccaacccggctggccaacggcaaggtagtacctgccatggcaggatggcagttctataaccacaacggcctgatggacatcaaaggcaacgtatcgggccattcggctttcctgagtcgatttacggacgcctcggaactagtgtgcgttaccctactggccaataaagagggggtagacctgacaaatctgggacgccgtatcgcagccgctttcgacagtgataagatgggtacgggagccaacgacaacctgctctacacttatgaaagccagttcagcgtgcccgaaaccatgacgcgcatcgagcagaccctccacacgatgggcgttcccgtctttgccaagttcgatcacgggaaaaacgccgaagaagtgggattacaactccgccccaaccaggtcatcgttttcggttcaccgaaagttggcacaaaactgatgcaggacaacccgagtatctcgatcgaactgccgctgaagatctccgtttgggaggacaagaacggaagcgtatgggccacgttcccacagatgaggacgatggcggccgaatacgggctggaagccgaaccggtaatcggaaagatgcaagaactactggagaaaatcgtaattaaaggggcaagcgtatactaacttcctactgtagggataaacgcttttcctgcagaaaattatttataaaatatttggaagaaacacacgggaaaagtcacaagcggctatagaacaacgcagcatgacttctcccgtatttttttactgtacccaggcatgcaaaacaggtttcattcttttgagtaggtttgtttatccgaaaagataatatttttgtcttccgggaacaatcgttgagaaataaaacaaccgacattttgcgttcagtgaacatctgatacggaacaggcggactgaaacggacctccggagggtatgtaccccacctggaatccacatcagtccgcctgttctacatttatctgtatatccgtattcttaactcgctattgcgagaaacggaatgaccgttattatcctttttctttcaggatcacatcatgtgcaccaccctctacgatacttgtggatgaaaccagcgtgatcttggcattttgttgcaaatcgggaatggtaacagcaccgcaactgcacatcgtagccttgatcttactcagagtggccgccaggttgtctttcatcttgccggcataaggcacgtaactgtctacaccttcttcaaacttaagcgattcagttccacccatatcgtaacgttgccagttctgggcacgatttgaaccttcgccccaatactctttcacgtagttgttcttgatgcagagcttcttggtaggcgattcgtcaaaacgtgcgaaataacgacccatcatcaggaaatcggctcccatggcaagggcaagcaccatgtgatagtcgtgcaccaatccgccatcactacaaataggtacataaatacccgtccgtgcctgatattcgtcgcgggcacgagccacatcttgcagggcagtcgcctgtccacgtccgatacctttctgctcacgggtgatacagatagatccacctccgatacccaccttcacaaagtcggcaccagcctctgccagatagaggaaaccttctttatctaccacattgccggcacctaccagcactttatctccatattgttgcttgatccattgcagggtctcatactgccattccgaataaccatccgaagaatcgatacagagcacatctactccggcttctaccaaggcagggacacgctcctgatagtcacgggtattgataccggcacctaccaacaatttcttgtcgggactcgacacctcgttcggattctccttgtggctgtcgtagtccttgcggaaaacaaagtaagccagacgtccttctttatcgataataggaagtgtattgagtttatgatcccagataatctggttggcctcgctcagtgtcaatcccacttcacccacaatcagcttctcaaaaggagtcatgaagtctttgatctttttatccagcgggtctctggagatacgatagtcacggctggttaccaatcccagaagatgtccgtttggcgaaccgtcatccgttattccgatagtagagtgaccggtctggcgcaacaggcggagtacgtcttccaacgtatgttccggcgtcagattcgaatcactggtcacaaaaccggctttaaatttcttcactttccgcaccatttccgcctgactggcgatgggttgcgaaccgaagataaacgagagtcctccgttacgcgccaactcgatggccagttcgggaccggaaaccgattgcatgattgccgaaacgaaagggatgttcaattcgattgctgcttgtgtgcctgccgcatgtttcaccagcggagtgcgcaaagagacattggagggtacacactgtttggtggtaagaccgggaataagtagatattcaccgaaagttcttgaaacttcttctacgtaaactgccataagataagttattttttggcatgcaaaattacatctttctttttaatatgtgactggggaagggagattttttcaataatcctctcaaaagcttgtttttaatcacatcggggcaataaagaggagactcactcctgaaagcacaccgtttaaaccaccttcttacaatatcacattctcctgatgtctgtccatccaactacggatattattgaacacaatctttatatcaatctatttttaaaagttccttgaatccttctaccgacttattcggttcaaactctatcacccgatagtctgccacagcattaaaagggtcctcaccgattatcttttctacttctgcacggctctgagcacggcaaagaataactccccccgtccggggcacctgcggcccggaagcaagaaagattccggcagcataatacttatccagatagcaacagtgtgcttccagcaattcgatcaccttttcgataggtgctttataagtcaatattaatacgaacatggcccgatttattttagttctcccgcaaaggtaacacaaatcggcctacgttaggcttttcttataaatttaatctgaatccggaatatttcttttaaattaacaggaaacaacactacttggcaaacactttcatacctccggtgttatacatcaacatacaaaaaacaaccgcctatgtcacaagaaatgaaagcattcccaggaatgaaagcttcacagaaactcaacttcaaccattccgaagttattatcaacagcgcaccggaccggaaggttatcttggaatcgactctgttagagcagtcattcgtggaaaaaggatgtggggaaaccactccgcatgcttggaaaacaacatcgaaagagtctctgaaaagacccgtgtttaacgagatatggtacacataatgccagcttgacctgacagaaaccttatcctgccaattccgccctgtactccatcggcgaaaccccttcgtgtcgcttaaaatacctacccagatacgactggtcgggaaaattcagccggtctgctatctcctgaatactgagatcggtcgattggaggagtacctttatttcaagtgccgtaaaatcatcaatcacttttttggccgaatgacctgtcagcgaacgacagatgctcgtcaggtacttagtagaaatacagagtttgcctgcatagaaaacgacatcccgttgcgaacagcaatattcgtgcaccagagcaacgaacttatgaaaaagttcgttcggacgactgccgccctcaatctctttatgggtgaaaaggcggtgtactttgtcgtatacatcaagcaggaaactttgcaggtgattgcgcgctatctggttgcggaaacgatgatcggtatcggcataaatagcagacgtagcatgcaggagaccgtttatgggggcggtaaattcggaaggaagtgtataacagggcttctcttttataaaatgaaaaaaggagggttcaaaacggatacaagcctcacgaaacatttcaatatgtgaagcgaaaaaggagacccgaaaatcatcgctcttctcatcaaggctgataacagcacccggaaggagtacaacctgggtatttaccgttatctcgtatttcttcagatcgatggccattgtaccacggccggcacggcaataaaggataatggcacaattgagtttatgcaaacggttgtaaaagggagaaaaatcatcggtccctgccacaaacggctggtcgagcgtgagggtaagcgggtttcttttttccatatcatgttctttattttgcctacaaaaataggtctttttagtgaattagcccgcatactgttccgataatgaacaatactggggcgggtatgaaaagcagtcgacagtgaaaacgctctacctttgccacgacaaaattaaataggaattatgattgaaaaggttagtaaagtaaagcaggctatattattcgcctgctgtttggccgccaccggatgcaagcaagcaccgcaggcaactgtagaatcgggatacaaagtaataacccttgcgcctaccgaccggacgctatcgagtacgtactcggcaacaatacgcggacgccaagacatcgaaatctatccgcaagtgagcggtacactgacacaggtgtgtgtcagcgaaggagaacgggtaaaacggggacagtcgttgttcatcatcgaccaagtgccttacgaagctgccctgcagacagcattggcaaacgtggaagcagccaaagcctcactggctacagcacaactgacgtatgacagcaaacaggaattatataagcagaatgtggtttcggccttcgacctgagtacggccaaaaactctcttttggcagcacaagcgcaattggcacagatgaaggctcaggaggtgaacgcccggaacaacttatcgtacacattggtaaaaagtccggcggacggagtggtgggaacactgccctatcgggtaggaacgttggtgagtgccagtctgcctgaaccgctgactaccgtttcggacaactcggacatgtacgtctacttctcgatgacggaaaaccaactcttaggactgatccgacgctacggatcgaaggaagaagcactgaaacaaatgccggaaatcggcctccaactgaatgaccgatcggactatccgcaacaaggacgaatcgagacaatcagcggagtgatagaccggaacaccggaacagtcagcctgcgggcagtatttcccaaccgggaaggattgttgcacagcggcggcgcgggcaatgtgattgtaccgacagaaaaagcgggtgcattggtcattccgcaagccgccacatttgaggtacaggataaagtatttgcatataaggttgtggacggaaaagcgcaatccgctccggtacaagtgacacgtgtgaacggcgggcaggagtacattgtggagagcggtttgcagcccggcgacgtgattgtggcagaaggtgtaggattgcttcgcgaaggaacagagataaaaacaataaatggtgaatgatgaaccgaactgccacagccgcccatccaagtaagccggcttttaatatccacttattaaacgtattactaacaagaatattatgaatttacgaactttcattgaacggcctgtcctatcggctgttatatccataaccattgtcgtggtcgggattatcggattgtttacgctacccgtagaacaatatccggacattgccccgcccaccatcatggtgagcaccagttacttcggtgccagcgcagaaactctgcaaaagagtgttatcgcaccactcgaagaggccatcaacggtgtggaagacatgacctacatgacctccagcgctaccaatgccggaacagtctctatcaccgtctactttaaacaggggactgacccggacatggcggcggtgaatgtacagaaccgagtttccaaagctaccggacagctcccctcggaggtaaaccaagtaggtgtcaccacttcgaagcggcagacgagtatcctgcaaatgttctcgctccacagcccggacgactcgtacgacgaagccttcctggccaactatatcagcatcaacctcaaacctgagattctccgtatctcgggcgtcggagacatgatgattatgggaggagattatagcttgcgtatctggatgaaaccggacgtaatggcacaataccggctgatcccttcggacgtatcgactgtcctggcggaacagaacattgagtcggccaccggatcgttcggtgaaaattccgatgaaacgtatcaatataccatgaaatacaaaggacgccgaatcacaccggaagaattcggtgagatcgtgatccgttccaccgacgacggacaggtgctgaaactaaaagatatcgccacaatcgaactgggacaggaaagttatgcttacagtggtacgacggacgggcataacggtgtctcgtgtatgctcttccagacagccggctccaatgccacagaggtgaacaaccaaatcaaccgattccttgaagaggcaaggaaagaacttccccaaggagtggaactgacacaactgatgtcgtccaacgacttcctgtatgcctccatccacgaagtggtgaagacactgttggaagccattctgttggttatccttgtcgtgtatgtctttttgcaggatatccgctcgacactgattccactggtggggatcattgtatcacttatcggtacgttcgctttcatggcgatagccggattcagtatcaacctgattacgttgtttgccctggtactggtcatcggtacggtagtggacgatgccattgtggtggtcgaagccgtgcaagcacggtttgacgtgggatacaaatcatcctatatggcaagtgtcgatgccatgaaaggaatcagcaatgccgtcatcacctcctcattggtgttcatggcagtttttatccccgtatcgttcatgtccggcacatcgggtacgttctatactcaattcggactgacaatggccgttgcggtaggtatctcggcagtaaacgccctgacactgagtccggcactttgcgccctgctactgaaaccgtacatcaatgaagacggtacccagaaacagaacttcgccgcccgtttccgtaaagcattcaatgcagctttcgatgttgtggtagaaaaatacaaaggcatcgttctcttcttcatcaagcgccggtggctgacaggatcactcctgatagcttccatcgccttactggtagtactgatgaatacaacaaaaaccagtcttgtgcccgatgaagaccagggcgtcgtattcgtcaacgtcagtacggccgcaggcagttcgctacggacgacagacgatgtaatgaaacgtatcgaggaacgcatggaacagattccacaagtgaagcatgtgcaaaaggtggcaggatacggattgctggccggacaaggaagctccttcggtatgctgatcttgaaactgaaaccatgggacgaacgccccggaaaagaagatgatgtgcaggcagtgatcggacaagtgtacggacggacggcagacatcaagggtgccagtgtattcgccatctcaccgggtatgattccgggctacggaatgggtaacgcacttgaacttcacatgcaggataagaccggaggagacgtcaatgaattcttccagaccacacagcagtatctgggagccctcaaccaacgtccggaaatcgccatggcctactctacattcgacgtgcgctatccgcagtggctggtcgaagtcgatccgtcgaaatgcaagcgtgccggtatcacaccggaccaggtattgagtactctttccggatactatggcggacagtatgtgtccaacttcaaccgattctcaaaggtgtacaaggtgatgatccagtccgacccgcagtaccggcttgacgaagcgtcactgaacaatacattcgtacgcatgtctaacggagagatggctcccctcagccaattcctcacactgacccgtacgtatggcgccgaatcactgagccgtttcaatatgtacaactctattgccgtaaatgccatgccggccgatggttacagtacgggtgacgccatccgtgccgttcaggagacagcttccacttccctgcccaaaggttatggatacgattacggaggcatcacccgcgaagagaatcagcaaagcggtacgacggccatcatcttcggcatctgttttctgatgatctacctgatcctgagtgcactctacgaaagcttcctgatcccgttcgccgtcctcctgagcgtaccctgcggcctgatgggttcattcctcttcgcacgcatgttcgggctggagaataacatctacctgcaaaccggactgatcatgctcattggattgcttgccaaaaccgccatcttactgacggaatatgccgccgaacgccgtaaggcaggcatgggactgattgcttccgcattgagtgccgccaaagcccgcctgcgcccgatattaatgacggcattgaccatgatctttggtctgctcccgctgatggtagccagcggcgtaggtgcaaacggtaaccgctcgttgggaacaggtgctgtaggtggcatggtcatcggtacactggcactgctgttcatcgtaccgtcgctgttcattgccttccaatggctacaggaacggatacgtcccgtacagatagaaccaagtcatgactggcagattcagacagagcaggaagtgagtgaacacgaaaaagaagaagctaagaatcgccctctaaaataaataaacaagcatgaaaaagttaatcatatcccttgccgctatcctcgccctaagcagttgcggcatctactccaaatacaaacccgtcacggagattcccgacggactttacggacacggaggaacagacacccccgggttgacttccgccgatccggaaatccaacgaagtgatactgccgccaacttcggcaacctcagctggcgggaggttttcaccgacccgtatctgcgcgtactgatcgactctgccctcgtgcgcaacaccgatctgcgcactgcccacttacgggtgaaagaggctgaagctaccttgctttccgcacgcctctcctatctgccggctttttcactttctccgcaaggtacggcaagcagcttcgatggcggaaaagctactcagacctattcactgcccgtcagtgccagttgggaaatcgatatctttggccgactgaccaatgccaaacgtcgtgcccaagctgtcgtggcccaaagccgagattatgaacaggcggtgcagacccaactgattgccgccgtggccaacaactattttaccttgttgatgctcgacgcccagatcgaaatctccaccgctacggaagctgcctggaaagagagcgtcgccaccacccgtgccatgaaagcagcgggaatggtgaccgaagctgccttgtcgcaaaccgaagctacctattataatatatgtacaactctgctcgatctgcaagagcagctcaaccaagccgagaacgccctttctttgctgctggcggatgtcccccaccgtatcccccgcggacgtctggccgaccaacagctcccggagaatctatcggtaggcgtacccctgcagatactctccaaccggcccgacgtacgcagtgccgaacagtcgctggcacaggcattctacactaccaatgctgcccgttccgccttttacccctcgatcacactgagtggcagtgcgggatggaccaattcggcaggtgccatgattgtcaaccccggtaagtttcttgccacagcagtagcctctcttacccagcccttgtttaaccgcggagcaaacatcgcccaactccgcatagccaaggcgcagcaggaagaggcacgcctcagctttgagcagaccttactcaatgccggaagtgaagtcaacaatgctctggtacaatatcagacggcacgagacaaatcggcctatttcaaccgtcaggtagcctctctggagaatgctgcacgcagcacgcaactactgatgaagcatggtaacacgacttacctggaagtgctcaccgcacagcagacactgcttaatgcgcaactctcccaggtggccaaccgctttaccgaaatccagggagtcatcaccttgtatcaggcattgggagggggcagggaaactgcctccggagaaagaaattcttaacagaagaatacagcctaacttttcaacctttcttaaatgatgacgactgtctgtccggtaccttgtgtaccgggctgtacagaaaaagcccgtactacctcttctctaacaaaaaggatgtacgggctttcctgttttaaacggtatcttatgcgttcagcgcctgttcgatgtccgcgataatatcatccgcattttcgattcccaccgacaagcggatcagatccggacgaacaccggcttctatcaattgttcgtctgtcagctgacgatgcgtatgactggcgggatgaagcacacatgtgcgtgcatcggctacatgggtaacgatggccgccagcttcagcgaatccataaatttgatggacaactcacgaccgcctttcaagccgaaagagatcacaccgcacgagccattcggcatatacttctgcgccagttcgtagtatttgttgcccggcagaccgcaatagtttacccatgccaccttgtcgttctgcgcaagatattcggctaccttctgtgcattgccacagtgctgaggcatgcgcaaatgcaacgtctccaagcccagattcaacaagaaagcattttgcggactttgaatactgcccaggtcacgcatcaattgcgcggttgcctttgtcatataagcgcccttgccgaaagccttggtataggtcagtccgtgatacgattcatccggtgtgcagagtcccgggaacttgtccgcatgggcttcccaatcgaagtttccgctgtctacgatgcagccgcctacactggtggcatgcccgtccatgtatttagtagtggagtgaaccacgatatcggctccccactcaaacggacgacagttgatcggtgtcgggaatgtattatcaacaatcaaaggcacaccgtgactatgggcaatgcgggcgaatttctcaatgtcgagcacttcaagcgacggattggagatggtctcgccgaacagtgctttcgtattcggacggaaagccgccgaaatctcttcttcaccggcatcggggctgacgaaagtgacatcgatacccaatttcttcatcgtcacgccaaagaggttaaacgttccgccgtagatggccgacgaacaaacaaaatgatcgcccgcctggcaaatgttgaatatggcatagaaattggcagcctgtccactggaagtcaacatagctcccactcctccttcgagagcggcaatcttggcggctacagcgtcgttcgtcggattttgcagacgggtataaaagtaaccgctgtcttcaagatcgaacaagcgggccatctgctcactggtttcgtatttaaaagtagtactttgatagatgggcagcacgcgcggctcgccctttttcggagtccatcctgcttgtacgcacagggtttcgggcttgaattgttttgccataatgatattgagtttacgattatattgccttaaaaaagttatatcgacgcaaaagtagagaaaattattggtttaaaaggctatctttgcgagcgaaaaagcaaaaattcaccttagaagtcaaacaatagcacagcagcccgagcctgcatcttttatacgtagcgatatgaaaagaaaactctgtcttctcctgttcttctgtcttttattgactgccccggctttgcgggcacagcagaaagccactcccagatccggtgaaggtatctctaccttcctcctgcgccacaaccgcgccccgaagaaatactacaatgatttcatcgaactcaacaaagccaaactagggaagagcagaactcttaaaatgggtgtcacttacctgattccccctgtcaagaaagcgtcggccgccacttccggaaaaacgacggaggcagcagccgaaaagacatccgcacatcacccgcgccgtacggaagtcaacgagccgctcttcgggaagtggctttcaaatgtcaaggtcacttccaatcgccttgccggtacctgcttctatgttgtcagcggacatggcggtcccgatccgggcgccatcggacgcgttggcaaacacgagctccacgaagacgaatatgcctacgacatcgcccttcgccttgcccgcaatctgatgcaggagggtgccgaagtacgtatcatcattcaagatgccaaagacggcatccgtgacgaggcttatctctcgaacagtaaacgtgaaacctgcatgggctctcccatcccgctgaaccaggtacagcgccttcagcagcgttgcgacaaaatcaatgccctttatcgtaaagaccgcaagaagtataaatactgccgcgccatcttcattcatgtggacagtcgtagcaaaggtacccagaccgacgtcttcttttaccactccaaccgcaaagccgagagtaagcgcctcgccaaaaacatgaaggaaaccttcgagtccaaatacgacaagcatcaacctaaccgagggttttcgggcaccgtaagcggacgcaacctctatgttctggcccacaccacgcccgcctctgtttttgtcgagttgggcaacatccagaataccttcgaccagcgtcgcctggtgatcccctccaaccggcaggcactcgccaaatggttaatggaagggtttataaaagactataaataaacagaacctcttgtttttctgaaagattacaaaaggatgtgaatgtactgagagcagatgaccggagtgagccgataaatcctatatttgttgccggatgtaaagtaaaacttttaaagtcatttttatggaacagttatcttttatagaatcattccggacttctcctttcattctcaccgaaggcgctatcgtagaacgtttgcgtcacgagtttcacatttcaccggacaaacacattgcacatgccgcactgatctacgatgactcccatcgtgagattctggcatccatctaccggcaatacctgcagatagccactgagttccgcctgccactgatgctgatgactcccacccgcagagcgaacatcgagcaaatagccgcgtccgattaccggcataaaaatgtactggcggatactatggcctttctctcccgcttccgtgacgaagcttccactcccgtatatatcggcggactggccggatgccgcggcaatgcgtacgacggccgctactatctgtcggtagaagaagccatggagtttcatttcccgacagtccgcacgctggcacagtcgggggcggactatctgtttgccggcatcatgccgcaactgacagaagccatcggaatggccaatgccatggctgcaacaggactgccttacatcatcagcttcatggtatgtcgtgacggacgcctgatagacggtactttcattcatgacgccatcgatgccatcgaaaaggaaacttccacccgtccactgtgctatatggccaactgcgtacatcccgatgtgttgcaccaggcgctgctgcatccccggaacgatacgcctttggtgcgtcagcgctttcagggtattcaggccaatgccgccaacctcagcccggaggaactggacggatgcgatcatctgatttcttcttcaccggaagaactggcagacagactgatgacactgctgtgggactttccgttaaaaatttgcggaggctgctgcggaaccaaccaacagcacatgcaccgtttcgcagagatgctggcctaccgccgtgacaataaagcgtggtaactgtctgctccggtaaacgggaccgcccgtgccggcaatgcaaactctcactccttcctcctgcggttcagatatctgcgcaacaatgtgggagtaaagcagaagatcaactgggctttactccacttgtagcattgctggaacacaagcataccgatagcgatgaacagggcagcgcccgcagcagcttgcagaggcagccaatgcacaccctcttgcgggactatcagagggatcaacgccaatgctccggcgggagcaaagtactttccggtccactcgaagacagcaaacaagcagcagatgatgagcaaggcgaccaccgtttcgggcaaatgcaaaaaggtatgcccgataatctgaaaagcggtccccaaggcagctccggtaaccaaaaacagaaacacctgcatggggcggtttctgaatccggctttcgaattgacaatctccgtgaatgtcacgatcaacggaggaataatgaaataactgcatccgcaggagatagaaagggcagctaccagtgaaacccaaaagagcagagccgcccaacggaaaatctcctttttccactcacgcccgggcaggacgtaatccgtctcccggcgcaaacctcctttttccatcagcctctgtccggcaacaagcacggcggaaagcaggaaaacggccgacggatagatccaggtctcagtgtgcagcagcaccggcagcatacaagccgaaatctgcggaatcagagtagcccggctgaacagcaggcaacaggcggcaaaggcaaatgccagacataaattgcagagcaacggcagcgtggagtagcgcacgatacaaactccggcaacagcccctgctgtcatcagcccgatcagctgccaacgcccgactttccaaacccgcttatcgatcacccacaagccgacggcgagcgccgccatctccggaaagataatctctttctcgcctgtccattcggctatgcccaccatcagcatcaccatgaaaacagagaatacatatctgacttttttcgttttgtccatcatgaagtccaataaagatccgcaaagatagtcatttatcaggaggtatccctcccgaatggctaccggatggaaatttaaccgtaaaaattcgacgatcgtccgatcataaccgtcccggatttgttattacaccaagtgtaacatcaaattcttatgaccatgtccgatttcaaccccagaccgtccgacaaactgacggcaagcgaacgtaaagaactggatacctccgagttcggcataccccaattaagagagttccccatccacgacgccgcccatgtacgcgcggcagaagcctacttcaggtatgcgcccgaagagtataaagcgcagttggcacggaacatcctggccaaagcacatctgttgggagtgaacgtaaaaagccccgccatcctggagtgggcagagaaataaccggaaataaaagcaataaggcaggcgcacgaagaaagattcccggattatttcctacttttgtacccatataccccctcactttataaaaactgttgtatatgagtttctcaggattcgtttttgatatgatcaggcgcaataaggagaacagagacctgcttactctgcgccgggaacggatgaaggaccttcaaggtaaaatgtaccggaaagggacgcttcaaaatccgaatgtaaccctggaagagctggagaagatagaaaaggccacccgtgaaaaggaaaaagcggaaacacaatattatctgcgcgccacgctgatcttcctgaccgtgacagccatactggcactcatactctggtggatattgtagcactgtccccgctttagagaaccgtcggttccacatccgttaccgttcacctcctcatacctttattcaaccgattatgaacacaaagacatacccttggctgcgtacggccgcatcggtgaaacgataaaagagaatgctcaggactacggacggtgtctgcccttctgaaaacgaacgggacttatttgtaaccggtatgaaaatattctttcatgccgggatgatattcgtcggataaacactacctttgttggaatacaacgtttccaacctaatatcaatccatataacatgactccagatttcgattacagtgaagtgcctttcggattcaactattgcctcaacaaatcatgtaagcaagcctccacgtgcctgcgctaccggttgtacactcatattccggcagcttgccagaccataagaataatcaatcccgtttacgccgccaccatcgacgacgtgtgccctttcttcatgcccgacaagaaagtgcggtatgccttaggcatcacccacttgctggatcatgtgccttacagtgacgcagtcagcatcaaaagacaaatgctggcacacttcaagcaggccacttattatcgttgccgccgcaaagaacggatgctcgatccttccgaacaggaatacatccgtaaattatttgtcagtaaagggatcaaagaactaccggtatatgatgaatacatagaaaagtacaactggtagcacaagcatttataaagaaaccggcaacttcggtaaagggaaaggattgcttcataaaagagaaacgaatgctttgtcaaaggggagaaaacgccttgttgaaagggaatggcagacctctcccaaaggaaaaatcgcacgacccaaagaaggcagtcaacctgccgaagagaaaaaaactactatctgaaagggagcaatcacttcaacaaaaaaaataatcacttcaacaaaaggggaatagtgccctcttcaaagaaaaataatcgatctgtcatagaaaagcagttgcctcaccacagaaaaacagctgcttcaccacccaaaaacagttgcttcaccacagaaaaacagacatttaaccgatgacaaacagatattgcttccatggcaaatcatcatttaaatgaagagaaaccttccactaaagtgtcacaatctttacttctaggcgacaactttttgtcgcccgagagaaaaaagtttttcacctacacgacacaaagtgaaacaatagagaaaggaataaatacatctccatctactggattcttccactgaattcttctaataaacttatcggattctatattcaaaataagattgcgaatgtaccgttttttacagaagttccgatttaatatccaagggtagccggatgtaattgtgcgatagtgaactgcctttgtgcgtgtccgcacaatagcaaaagaatgttcaggaatatattgtattatataatagccatttagcgatatggcatgattcttgcaagcataaagaaaaaacagtaatagaaccatgatcaagcattacttgaaagtagcattacgcaatttgatgaactttaaagttcatagtcttatttcggctatttgtttagcgataggtatcacctgcttcagtatgatgaattattttattgatgccataacgggtaaagtagaactgtccgataataataaatacagcatccggttgtccggagcatcttcccagacagccgccgatatctatttgtttaaggaggattttgattatctgaaagagttgccgatagcgggcatagatacccttgtggcttcttcctcttatagcaatggaaaagagattacggccatcgacaaaaaacaacgggaactgccgtttttggtgtcgttccaaaatgtatcatccaattatttcacctataattcgctccaattgaagtatggcaatcaagagataacagctcccgacgaggtgatcgtctcccgatcgtttgcccggaaagcatttggagaagagaatccgataggccaggtcatccgtcaggaaacagaggctgccaacccgtctgatcttatggtgtataaaattgtcaatgttgctttgacagaagaaaaagattctcatgggaaaacgatcgattgttattttcccttgtccgcaaaatcccgtactccactctgcatcagatcacgtctcaccggacaaaccacgaccgaaagcctgaataaacagttaaaaggcctgacctggaagcatggagaccaggatatctatttatatgcctccctggagtcggaacagaatagcagtgttcaaagaacgataagcattctgctcgcccggtttatagcttcgctgatcttattgtctggtttgatcaattttctgaaattcattatccagatgttctataaccggcaacgagaactggtgcttcgcaaatgtatcggttcggacatcaaaggattgtttgccttgcttttcgccgaaatcttctggatgctatctgtcgctttccttctgtccttggccgtgacggaaatcacgctctctctgatatatacgtacatccgtccggaagacatgatctcattctccctggtagacttgtatggttcacagttaggtttgtacctcgctttgttgttgatctgcatgctcgccattctttatcctatctatcggttacgccggttgagtgtcctccattcggtcgtgcagagacagaagcggcacgtgttccgcaatttcatgattgctctacaattggcgatctccatccttttcacaggcggtgtatttggcataacgcttttgttcaatgagatgtttgaaggaatgtaccgtcctttgagcacggaagaagagaaccgggtgatttcaatatcggtcaataccatatgcatgcagaaaaacatggatgccattctttcggatatccagtctttgtccgagataaccgatcggacatccgccttcaataccttcgatgccgatgtttatacttacatgacctatatgaaagacggaaagccgagaggaaatgtgatgatgatccaagcagagcctcattattttgagttcttcaagatcccgttctccggaaaattagtagataaggatgctcaaggctttgtttatataagcgaacagtttaaagaacaattgcaaagggatagtataacaggtagtgtcacgctggatggcaaagaatactggattgccgggacttaccgtgcactgaacagggaagatactcagagcagttcagtcggttctgtctttctagttaacccgcaagcctacacctattacttcaaaactctccattccgatattactccggtcgccctggaaaagataacggagatctgccggcgttatgtacccgagacattgcctcttaacattcgtaatacgggtgattccaaacagtccgtcatgggaactgtagcactcttgcagacagcatccctgttgttggcgatagtcagtatcctcctgttgatattaagtatttattccggaatctccatggatgtgataaatcggcaaaaagaagtggccatccgaaaaataaacggagccaccccaagagtgattgccctgttattcggcaaaatctatttgattatttatctttctgtcttcgtcattatctatccgctggtacgattggtgttgataagcatcacacaaaaaagcaatctgcaaagcatatatagttggagctggggagtcctgttgttcttcacgatggctcttttgatctttttggttacggcatacaagatttataaagtaatgcacctgaatccggcaagcgtcttgaaaaaggaataaaaacgatctctattgcgcctgcctgttataaggtcaaaatgaggagatgtgtcaagactcgtattcaccacaggttacacggatgtatacagataagcagtattggttatcagcagataaaaaaatcgtttagtgtaaatctgtgcaatcctgtgtggtgagttatgaaaccctctcctttcctgcgcgatgcacaataaccatgtcagggtgttgatgcgccccaaggctgtggaagtacaccgcctactcttcaaagccattctcttgtgcaacctcgttttctgctttatcctcttagcactgccggcaattccgccaacgaatgaatcatcaaatactctcgctccgtcccggagatcacctcgtgtttccacatagcttcggccggcacatgaatggcatgcccacccaatgacaataccggaagcacgtccgatttcagcgagttacccaccattaaaaaagattgtggagcaacgtccagtgaagagatcagccgctgataatcctgcggtgccttgtcggtcatgatctccgtatgatcaaaataatgggagattcccgaacgttgcagtttacgttcctgatccagcaagtcgcctttggtcgctacaaccagtttatagtcatccttcagtgtctcaagcgcttccgtcaccccgccgagcagacggataggcatctccaacagttcttttcccatctccacgatgcgtccgatcacttcggcaggcacccggttccggctaatcttcacggcagcctccaccatggagagcgtgaacggcttagccccgtatttatagatatccatattctccatctctatggcgaataggcgggacgagatttcttccgccgttccatacccggcaagtaaatggcaaaattcactctcaaccttgtcgtaaaacacctgattatcccataatgtatcgtccgcatcgaatgcgatcactttaatttgctgcatgtctctctcttttgattcctgcaaaaatacgcttataaaatgaaagcagcctgcatccggtaaataaaattaagttcttttccggattcaagaaccaacacatacggcttttgttattaccgcataatcagagatgttcaattttcaaacagtaaaatcaatgtatgataacctaaaacaacagaagtatgaaaaagttaatgtttgctgtaatagcttgcgcgatgggcctttcgggctgctcttcggaagatgactgtgctaccaatcccgaacctgcgggagatgtgacggaaatcaaattaagtgccggtatccaaggagtggcaacccgcagcccggtatcgaccaatgacaatataacggctccgtttgtggcctccgccaccaccggagactatacgacgaatgcatggagttccaccgtgacgtttgtggcatcgcccacaccgacagccgcactctctttcagcccggcacggtattatccggtggataattctcccatctatatcagaggttactacccggcagggacactttccggcaaaacagttacgctggctggcgatgggacagaagacgtgatgctcaccgctcaagcctcagggacgaaagcgactgcaggagcactgtcgtttgtcttcaaccatctgctgacgcaattgcaattcaaacttgtggccggtgcaggatatccggcatcgggtgtcaacgtgaccagtcttgtcatcaagcaacaaaagacacctgccacactggacctgaatacatccagcctgacgtataccaccaaagaccttaccctttcgggtacattccccatcctaacggccggaagtacaatcaacaactatccgatggtgaaaagcagcgaagccctcacggtggcagtcaccacaagtgacggagtgacttatcccgaatctaccatctcggtcactaccgaagtcggaaaatcacatttaatcacccttacctttacgccgaaggaaatcacgtcctctatcagtgtgacagcctggcagacaggagggaccggatcgtccacattacaataaacgttctcataacacgcaggttgcgcaggagatggcgacagctatatccgcgcaatctgtcacatcaagaaagaaaggggcgatgaaacggactatcctcatcttattgggctggatgctgctctcgcaaggatgcagctatggtgtgggcgacgactgcctcccacccgaagaacctgtacccatacggatggcgattgcagaaggaaagctctccacgcgggcacctgtcacaacgatcgatgcaagcaatctgtcgaatgtcggcatttacgcagtcagcgaagggagcatagccgggcaatatccctggacatccactcctttcgccctgaatctggtaccgagcggcatcagcggcagccagctctctttcaaccccaaactctattatccattgggagggaaacgggtcattttctacagttattatccgcgcacgacagccacaagcggcagcaattacatcacggctccgggcaacggtgtcgcccctgcctatcatttcacgctgacgggagcagaagacatcatgtatgccgcaggcactcccacaggaagtaccagcaccatgcctgtcagcctgacattcaaccatgtgttgacccaactccaactgaacacttctctattgggcgcactgtccagcatcaagctgctgggtgtgtacaataaaggtacgctcgacattggcaacggaaatgtcacctacgacagttccacgacggatatcacattgaccgttccccttctaggttcggttaccaataccgtaatggttcctgccggagtagcaagttataaggtagaagtcgttctgctgctttcgctgttgaaaaggacatatctggtgaaacccacttcgggtaatttccaacctggggtaatttatacaatcagtctctgatcaggaaaagagtaacgacaggaagtttgcattctcctcctgctctccgtcttccggattatggctgtagccgttctccatcaacaagtcacggtatatcaggcagagctgcatgggtgagtggtaaggctcgtatgtgctgaccggaagttgcgacaccgcatgcagggcatctgctattttcattgccatccgcctgttctcctgtatccggtggaaacactcttcccgctcctctacactttcggcatgtaccatctgcgacgcaagttcttctattcggttgagaggtccccgcagctccctgctgacgtgggcaaaaaaggctgagcgcaaccggtccgcctgttcggtgcgctccttctctatacacagacggttggcttccatcacctgtgcggttatattcttgacgtatcctttcagataatagaatccattgcccagcggttggcaggtcacaacatgattttcaagataaaagtcctctccgttaccatgaatcttataacggattccttcctggggaggacgcccggcatgaatgtcggccataaattgagtgacggtctgcagatcttcaccgttcatcaatttcagataatccgctggatcgacatactgcaattcgtcgtgccgatggatggtatcggcgaatccaatgtaacgtaatcttcccgtttcggtactgtatgtccacataccaactcctgctattttcagcatttccagcaataccttttccctgaaaagggcatcaaggctctctttacgatgttttttagccattctgtaatgattatgaatacttagatggtcctgagttgttttacagttaaatctattttataagtccattgtctatccaattgcatagtacacatccgaaagatgtttgttgaagtacaacaatcgggaaaagaaaaggttcggtagcggtcctctactttccggatgaggagcaggctgctaaaaagaggatgtgtcaagactcctgctcaccactgattgcagcgattgacacagataaacatcattagttatcaatagattaagttcgctctacagaactcagtgttgctctgtggtgaattttgacacatccccctatcttctatcctacgctgtgacagcgttactcatcccgatatttgcagcagccgggcagagcatcgtaaactgctttgacggccttgtacttatccgtatcatgacccgctgcggcaatggctttggcaacggcgtcggccgatgtttctgacgggtcgagttgcaggtggatcatttgtttctcccggtcccaatgagcggaccggacaccggagacacctttagcggctgtttcgatgcgttccttgcacatatcgcaagaaccacggacggcaaacggtacgtgttcactttcctgagagacagcatgactgccagacataccggacatgctgtgtccttggtgtccggtcatgggagcagttcccggagcatcttcgttcatcattgagcgtttgccttcgagttgcgcactggcatcgatggagaagactccgttggtcacaatctcctcaccatcggaaagtccgtcgagaaccacataggctccgccaagagcggggccaagggtgacttcacgcatccggaaggtgggagtatccgtatcgggcaggcgcacatagaccacagcacgcttgccggtccagaggacagccgtttgcggaacaacaatccggtctttatacccctttagaggagcagcaacctgggcagtagcatacatttcgggcttcatctccagagtgggattggctacatccacgcggacccgggccgtgcgcgtagtggcattaagaatgggatcgatgaatgaaatacgcccggaatacgtctttccgggaaaggcagaaagagtaaactccacctggtcgcctttggcaagaaaaggtaaatccacctcaaaagcgtcgaacatggcccacacacgggagaggttggcaatatcgaaaagaatgctcccctgtgaaacatagtcgccccggttaacccgcttggcaatgacgatcccattcgtgttggatttaatctctaccataggagacgcctggccggaatattggatagcgtcgatctgggcatccgtcaagttccaaaggcggagtttctcgcgggcagcctgcacaagagcgggttgctgcatacggaccgcttcgagcaattcctgctgggcggtgaaaagttcaggcgaataaagagtagcaagtgtctgcccggcacgtacggtctcgccggtgaactcgatgtcaagccgttcaatacgtccgccgacataagctgtctgcgactgcagactacgttcgtccggaataatcttaccgtacagccggacttgcttcacggggttactgcgactgacacgggtagtctgaacatcggcgagagccatggcctcatcagagagccggatggcatcgggatcggaaacagcatcacctccagaaataacgttcttcttaagagggatcaggtccataccgcagatagggcatttgccgggtttgtcctgacgaatctgcggatgcatggagcaggtccagacaccggattcgtcctgcaccagatcatgagacgttccatgcatatcatggttatgagcttcagcatgtgttcccccggcagactccggagaagatgaagggctgaacaaaagccaccccagcacaaagccggcaagggctatcaggggataaagtacttgcttcttacgaagaatatctgatatctttttcatacaattactattttagtggttctatttattttcagtcggctatcagcttttctatggctgccaccgtagtattataagcggctacggcctcactctttttcagtttataatcgagcatctggcgctccacctgaatcacatcggtcagcgattgacgcccggcggtaaattcacgcaccatcaactgccaggtagaaagagagagggcatactgccgttcgtaaagtgacaccttacgggcggcatcgtcgagctgctggcgaacgttaatgtattcagcctgcaactggttctgtacattgtcacgtttcagttcgcttgccatccggtagttatggctctcccgctgccgggcattgtatttccggcggaacagcggaagacttaccttgaccatcggcatcaccatgtccttgccgttcatatcgggcattcccatcggatcggccactttattgaccacagagtattgaagaccgataccgatcataggataactcatgcgacggtccatctttgccttggcacgataggcttctccctccgcctcgagcatggcaagcatgggattacgggtgaagatgctgtcgagcaggagctgtccgtctatccggtagaagcgttgtgtcagagaatcgggtacacagacagaagcatcggacggacggttgagcagggcgttaaaccgggcttgaacggtcagccgggcagaaagcaaactggcaaggttatcctccaatccggcacgctccatttgaatgcggagaacatcggacataccaccaacagcaacgtttcccattgatccgcctcccatgccggacatgcctctaccggaagagctgccggcagaaacacctggagtccccgcaggcgccgggctgcccattcctcccataccggacatgccacttcccgaagaaagtgcagatggcatcgaagcaactgacgttacagaagtcgacgagggagctgcctgtgccgacgaagcggaaaagcggttcagtgccaactgctcgagttgataaagaagacggatattagcttccgtaatgtgatattgctcgttgaggctactaagctgataccactgggccttaacctcataccagagattattacgtgtatcacgaaattgttcgtaagccatacgtgccatctcagaagcttcactgcgggcggccttgcgagtgccgaaccaaggaaacatctgcatcaacgtaaagtcggctatctgctttcccatcagcgtctccataggtttaacgaaaaaaccgatttccaattcgggatcggcaaaagcaccggcctgagggatcttctccaaagaggctttatagagcatgaagtcggcattgacttgcggattactgcgtgccgcctgttccagatagtgggacaagctgtcgacagagggttgcaccgaaacagaaggcacctccacaacggatggctgcgccgaagccgaaacggcaaaatgactcagcgaaaggaatatcaccaaggtgagtaaagatatatgtttcttgtttatcatatctgattgtttttatgtgaatccgatagacgaatcgaagactgtcggattctgattctgttattctttataatgatgagtacggtttcagccccatacgaccggcagaggggacattccaaatatccgggaatgtcccggatagccatcagggagtatgccgaatgcccatctgaagatcagataccgggagagcctgtaaccggctcagaaacttcacttccgtttttcttctcacgtctcctctccacagtctcacgccaccagcattgtaataccgggacgacaaacatggtcattgattgtatcagcattcctccaaacgtgggtatagccatcggtaccatgatatccgctccctttccggtagatgtaagtacgggaagcagagcgatcagtgttgtcgccgttgtcattgcagcaggacggacacgcttcagcccggcttctactaccgcctcacggatgtcatatttcgtacggggatcgcgttccagaaaaacatggtgaatatacgttcccatcaatactccatcatccgtggccacaccgaagagagcaatgaaccctacccagaccgctacactcaggttgatgggatgcatctggaagaggtcgcgcatgttttcacccgcaatgctgaaattcataaaccacggttgcccatagagccacaagagaataaaaccgccagcgaaagctacgaatacacccgaaaaatgaatcagcgaggccgtcaccgtacgaaactggaaatagagtaccagcaggacaatgagcaaagccaacggaacaacaatcatcaaccggtccgtagcacgttgctgttgttcataattaccggcaaacttataagaaacacctttggggagaaccagttcaccgctttttactttagcctcgagcagattactcgcctccttcaccacatccacttcggcacggcctgaaagtttatcgaagatgacataacctaccaggaaagtgttctcactctggatcatttgtgcaccacgggaatattcgatgtccgccaactctttaagaggtacctgtattccggtagcagtaggtacaagcagcatggaaagagcctccggactatcacgcaactcacgtgcataacgtaaccggatggggaagcgctcgcgcccctctacagtacgggtcaacgccatgccaccaacagcagcactgagcacttcctgcagatcgcccaccgccacgccataacgtgccattgactcacgattcagctttatttcgagatacggagcacctaccgcccggtcgtagaacacagacgagggaatgacagacggtacagactttaatgcctgctcaatcgccttacctccctgctctatatcctccagtgtgggaccgtataccttcacccccatcggtgcacgcataccggttgaaagcattacgagccgtgcctcaataggttgcagtttcggtgcagaggtcagtcccggcaaatgggtaacattgacaatctgttgccagatatcatttgcattcttaatctccggacgccactggcggaaatagtcgccacgcgaatcaggcaccagactatcggcagggataagccggaaaccattggcaggattatatgtacctccacctttcagcaggaatgcaccatcataattcacacggaaacgggcacgctttccgtcttctccgatgatatattcgggacgataattaatggtattctcaaacatctggaccggtgccggatcgagagcggaatttacacgtccccacttaccgatggcagtttctacttctggaatggccgccagccgcttatcgagtttctccacataatctagattctgttcaatacccgtatgaggcatactggtaggcatcaatagaaaagagccttcgttcaggctgggcataaattcctgcccgatactccgccagatgaggaaaccacaaacgacggttgctgcaggaatcatcataaacttccaacgattggccagacaccaacgcaaaatacgctcgtagaaaatgaccagtatccaaagtaaagccagaatgatggcaacgcaaccggctacaaacagcacatttaccgacagtccccgttgcggtcccatcggcagccactcttcggacagatagaaaacagctaccgacagggcaataccgatattaacataattgcctgtcttaggattcttccaacgatatgcaagcaagttattgattccaaccgccgtcagtcccaatgcagggacactatcgtatacggcgaacaaaacaaaacccgctgctataagcacacagttcattacgcgccggatcaacctcgagtcaatccgcaccgaaaaaaggatataagccaatgtaggcagcaaaattaatcccaacacaaaagctgatgccaatgcataagtttttgtatatgccagtggagagaacattttcccctcttgcgcctgcatggcaaatacgggtaagaaactgacaatagtcgtaatcattgccgtagcaatagctcccgacacctcgcttacagctttatagatcagtccgacaaatggtttaccccgcgtgatacccttattctccggcatctccatgtaccggataatactctcgacaaataccacacccacatctaccatcaccccgatggcaatcgcgataccggacagcgccacgatatttgcttcgataccggtatatcgcatcagtataaatgtagccaatacggcaataggcagcatacttgctattacaaccgatgcccgcaagttaagtaccaacacaatgatgacaataatacagatcaatatctcgtgcgaaaggctcgtctccaatgtaccgatggtctcctttatcaatcccgtccggtcgtagaaagggacgacagtcactttcgacaccgtcccgtcagccaatgttttctgcggcattccggcatccatctcatgtatcttttctttcacattattaattacttccagaggattggagccataacgggcaatcaccacgccccccacagcctctactccttccttgtccagaccgccacgtctcgtccccggcccgatattcacaaaggcaatatcggaaatacgtacaggtaccccttcacggacggtaacaaccgtattctctatatctgccacatttttcacatacccaagaccacgaatcaagtattccactttattcacctccattgtttcggcaccaatatcaaggttactcttcttcacagcattcatcacatccatcaccgacacattgaacgagtacatcgcatccggattcaactcgatctgatactccttgataaaacctcctgctgaagctacttcggacacaccttcggcagcagacaaagagtacttgacataaaagtcctgaatagtacgcaattcctcagcgttccagccgccggcaggtttcccggttttaggatcacgcccttccagcgtataccaatagatttgtcccaatgctgtagcatccggccccagcgtaggctgcacattttcgggcaaagtgcccggaggcaacgagttgagtttctctaaaatgcgcgaacgactccaatagaactcaatatcatcctcaaaaataatgtagataaacgacataccgaacatagacgaactgcggatggtcttcacccccggtatacccaacaatgaagtggtcagcggataggtaatctgatcttggatgtccttaggcgaacgtcccatccattccgtagccacaatctgctggttgtcaccgatatcggggatagcatccacaggaatcgggtttcgcggcacaatccccccatgccagttaaagggcgcagtagaaattccccaaaccacgacaagtgtcagcagaagaatagttatcaccctattttcaaggaaataacgaattattttattaatcatacagatagattatttattttaaattagtaaacacttggcaatgccaaaaaggatcagtaaagtgataataaaatagaaagtaggaagccaaatccccatcgatacatgggtatgacgactcctacctcactttaaaatcagtaaggtctaattttctcttcttttctggccgaaagagaagctatgtgaaaactaaatcagataagtacaatgatgaacaaacagcggaatacctgtttgccaaggtgggaaattgaaagaagcaacacttcgacgcagactttctgcctccaatggtataaaagcactatacatcacaggtaacagttctgtcactgccggtaatagattagttaccggtacgtggttcacatcctgatctaccgccagtttgacgtaatgcgcctcgtccttacaacaatgtgaggtcatcttcttctctccacacgatgcacaaacggacgcacttccccactctacatccgccagacggcccatgcagtaatggaaattaatcgttatgcctgatgaaacaacggcataaagcaacgtcaaggtgattaatataaacttcttcatgtgcattttgaggctgcgaaaataagtatcgacaccgatactaccgatacccgttacatataattaacgtatgaacatcctttttggtttaatccttttggttatctttaccccactaattaacataataattgtcatgaaacatatatctattaactatattctaactactgcacttgcgttaggtatcggcatcagcatccctgtccttgtaggcagcacttgcctcagcgaacaacactctgtacaatccgaagttccttattgcgtcactcctcccactgtccccgaacaagctgtgtttgatggtgacacaatcgacctgcgtcgttatgaccgccgtgaacgtatggaccgcgaactgatgtccttcacttacatgcactccagcaccatgcaaatgattaaacgggccaaccgctacttccctgtcattgaaccattactgaaagccaacggtattccggacgacttcaaatatttgatggtaatagaaagcaatctcaacccgatagcacgttcaccggccggtgccgccggtttatggcaatttatgcctgtcactgcccgtgaattcggtcttgaagtaaatgataacgtagacgaacgctatcatattgagaaagctaccgcagccgcctgccgctatttcaagcaggcttatgccaaatatggcgactggatggctgtatctgcctcttacaatgccggacaaggacgtatttcctctcaactagacaaacaattggcagatcatgccatggacctctggctgacagaagaaacctcacgctacatgttccgcctactggctgtaaaagaggtattcggtaatcctcaacgtttcggttttctgctgaagcgggaacatctctaccctggcattccctacaaagaagtggcggtagatacagaaatcagtgacttgagcaactttgcacagaaacaaggcatcacctatgcacaacttcgcgatgccaacccctggcttcgaggttcatcactaaaaaacaaaaccgggaagaaatacgttttacatatacccacgcaagagggtatgaattatgatcctcgtaaaacagttcctcacgaacataaatgggtgattgactaatggttaatcaaacgagtacattggtatattaatatattggcacattgaaaagtgattcttggctccatcgttttttgcataatcagccgctaaagcataagctgtatgtcattatcttcgaatccgatacacccgcagggaaagcattcgacgtaaccctgatcatatgtattctgctgagtatcctgcttgctataatcgaaagccttcaaggtctgccttcctggctttccactccctttatcgtgcttgaatatcttttcacagtttttttacctttgaatatgtcacccgcatctattgctcacccaatccacggaaatatattttcagttttttcggtattgtcgatcttctggctacattgccactctaccttgccttcttcctgcccggagcacgctatctgctgattatacgtgctttccggattatccgggtattccgaatattcaagttgttcaacttctggctcgaaggtgaacgtctactcacttccctgcgggaaagcagcaaaaagatcgccgtctttttcctcttcgttgtcatcctcgtcgttgccatcggcactttaatgtatatgattgaagggactcaacccaatacacaatttaataacattccgaatagtatctattgggccattgtcaccatgaccaccgtaggctatggagacatcactcctgctaccgctcttggcaaatttctttctgcctgcgtgatgctgatcggttacacaattattgctgtccctacaggtatcgtctctgcatccatgatgaaagaatacaaaaaattaaaagacttacaatgtcccaactgtcataaaacggggcacgaagagaatgccacttattgtaaatactgcggacataaattgaaaaatgatgaaatttaccggcaggaaaacacggcaactgatccggatcggactacttcataagtattttatccccttcaatctttacctcttctccgtccaacagtatttgcactcccctacgcatggcagtctccacattcaatccgaaacgtgcataccccaacaactgggcggttacccgcattaagtcaaccaaaggtaaagcgacctgctgttccagtatattccgagccgcattggctacctcacgaggaggtaaatctacggcttcacgcttggagtctatgcggaatccggtatacgagtctgcttcttccttggtattccagtagaaaaccaatccatcaatttcctgcttgtaataaggagttttatccagtataccatccatccattcaatcaggcgagctgtcttccgaagaatgccataagcattaaaaatcctgctgcttaacaatgaacggctaatcggagcctccgtacgcatgatctcattcaattgttttctgatacggggctcccggcgtggcatcatcaattcccaagcagatacatttacagagtttagaaaagttttttcatagatctccagtgacgcagccttcacttcttcccgaattacttgctccggcaacttcactaagcagtgttgtgcatggcatagtaaaccctctttttgcacttctcccgatcctgaagccaaagaaatcaccggaacggatcgttgcgattttccgcactctgctcttttcaattccgcctctatatggtcaataactttctgtgagtcttcccaccaatccagagtccatactttacaaatgttccatcccaacattttcagtacactgtcttgcacaatctccctatcccgagctgtttttgcagcccgataattctcaccatcacacaaaatcccgagcatataacgggaggtatcattaggatcgataatacctacatctactttgaatccggaacatccgattttggttttcacctgatgtcctttttcacgaagtgccgcagcaatcagctcacccatttcgacctcttcagataccgctgcataagaatgattcaaaactccggtacccttacctgcatattcaaggaaatatttcaaacctgccactcctatagaagatgtctttttcagatcaatctggtcagctcttaatgtagagaagactttcatctcatatcgggcacgtgacactgccacattcaaacgacgttcgccaccatccctattcaacggtccgaaattgagactcacccttccgttgacatccggaccataacctacagaaaaaagaataacgtcccgttcatccccttgcacattttccagattcttaataaaaacaggttcttcacgattgaatgcaagattctctaattctgcgttctgtaaaacaacatccgataacatgtcttctattaaagtctgctgtacggaactaaaagttacaacacctatactctgatttctcaattccggatcggaaagtctgcgaacaatctcgtctactaccgcctgtgcctcagcttgattctgacgacttttacccttatcgtaatatccctcgatgggtactaaagtaactttggcagccagatcatccggagatggaaaagtcagcaacttattatcataatactgagaattgctgaaagcaatcaggctttcatgtttactgcgataatgccataacaaatatttagaaggcatagacaaagccaggcaatcatccaggatactctccagatcttctatctctatatgttcttcatcaactgaattactggtaaagaaattagtcgggggcatttgcttcggatcacctacaacgactacatgatttccacgggcaatagcacctacggcttcacaagtaggcatctgtgaagcctcatcaaatacaaccaaatcaaacttatcgtggttcacattgatatactgcgctactgacattggactcatcagcatacacggacacatacgtgacaataagttggaaatcgaatcgaacaacttacgaatagacattccacgtccgttactgcgaatacatttctgcaaaataccaacctccgaactttgggcagccgcaagtacaaatgatgggatattagaagccagttttgtataaagttccttttttattaattcctgatactccgtattcaattcacgaaaacgccggatgctgtcattgaacagctccccgttaaaaaattgcagaacctgctccttcccgatggcatattcaataaaactatgataaaaccctttcaaataaatattcatcatccgttcggcaggcaaattacgttccgtatatgctgcaaatacagaagtcaagccacaagcctcgaaccgacgagatacattcagccaacgataccaatctttcagcttatccgtattccttgcccaaatctcacattgtcgtgacgctcctgccagccagtcgtcttcacaagcatgaagcacctctttggaaacgcccaataattgcaacatcgatttttccaattgctttatacactcccagtcgtataccaaaccttccaacaactcccgattcatttgccggaacaaagaataaccctcagagagttgttccgccagcttctccttaactcgccgtatagacataggatcatccactacctccaccagaagcctgttcaattggagtatagccttgctcatcacttctatatcgtcccattgctcttcaccgggatgggatttattcccaaataagtcctcaaaccaacgactactgctatctacttcctgtttttgctgctgataaaagagcaattgttgcaaagcgggaagaacttgttctttattgacacggccctgaagcgaaaagagagacagctccttacaaaacttccgttgttttaacaagcgaggcagaaaccaactctgtgtaatatctttccattccgagatcttttgctgcaccggtaaagtgagaaaagtgccttcaaatgattgttttaacagattgcaaaattcatctctttttcgtccatgttcaatgatccggcctatcttatcaacattctcgtcaagatcggttaacaacatcaagttaccggtcataccaggaagttgcattaggattcggatgaaccgaacaaagttatccaatagcttctctgtgcatttattccttattccataatttgagaagcatctattcatcttctcttccatcttctgcaacagaatcatatagtctttcagaagtttatccgcttcttctttcagttgagaagagtactccattatattgattcctgtgagaggatgctgatgggaatgtccacttacttttccaactccgatcaactcttccacagcatgattccattcattgaattgctccttagtcaacgaagcaagcaaagaagcgggtatcattatttcttctgtttcgtcaatggagctataacgggtgatagcctcgtagacagatatgccacaaggatatattcggtgtaatgcctctacatatccattaatctgctgacgcattttaaacagcctttccgactcttccttaaactcttccggttccttataacgaaagatctcagttgattctttcagctgactcagtacatctgtctttcgtgctttattagaatgcagttccaggcagaacggagctaaacctatattcataagccttttctgaactacggagagtgcagccattttttcggccacaaacaatacccgtttaccctgatacagtgcattggctataatattcgtaatggtttgtgacttgccagttcccggaggtccatgtaaaataaagcttttctcatttacagcttcataaaccgcttcaagctgcgaagaatcggcactgacaggcaacgcaatatcagcaggagttaaagcatgatccagttctacggcattggcatcgacttctgcaacctcccattccattttaccactcatcaaactgccgacaatcttatttttactcaactcttcggcattcgaatgaatgtcattccacatgatgaacttactgaatgaaaaagtacccaaaatagcctgttcttctacgtcccaacgcttttcgttcatcacagctttccgaaagattgagaaaatacgtttcacatcggttccattttcatctttcggcaatgaatcgagcccagaaatagtgatgccaaagttttgtctcaacatctccaacaaggtaatgttaagcatactctcttcttcacgggcacggataatatatcctttggataccgacttacggatcatctcaacaggaagtaacaatatcggggcatagcgaggacgctcactatgttcggtttcataccacctcagcagccccaaggcaagatataaagtatttgcaccattttcttccaatgctattctggaagaacgatataaataagtaagcgatttcttcagatcctgttcggtaagataggttctcaatcttttttgagtcagctcctgcttaatcaaatcaatcatcggatccgatttcgttaaagtgccataaagcctgaagtcatacaacggattatcccaatcagagggcttacccaaaatctgaaattctgttccgtccgaaaaagcatcttccatcttatctatatccgcagagatcacttgaagggcattacgggtaatacgcaggttcagaaaattattacgtagactcaggtcaagtaactttcgttcccacaaaagttgtttggtgaattccacataactatcctgattatccaaatcatattgcttaatctcttccggagcactaacaggactaatgtacaacccgcttttaggaatctgagctacctccggacccacagtccatgctttcccatgcataacccgttgaggtaaaggcaaaatatgagcaaaacggctgcgagcaacatctataaaacaagtaaagtcattcacagccaacattttgtcattagccagcccgactgcggtatcgaaagtcacattgtttccatcggtcatacaagtggcttccagcaaaataacttcgttgataccgtccgccgttcgtttggtcaataacgaagggtcatcgttcaccgcatcaggaaatgtcccgtcaatcaaccagcatcccacaaaagcatgtccctgaatgatcaccaacaacggatgcaaccccatggcttcggcacatgaagcatacaacagtgacagatccaaacaagtccctaatttaccggaaagtacattatccgaaagcctgactcgctgaccggcatcaccaaaactggacggaggcgtgcagtatgcaatatgctgttctttaatagcctcgtacagagccgccaattgtaacttcacccgattgggattacaactctgataagcatccaatgaagaattaccggaccactctttcaggatagatgacgcccgcgaaagaactcctgtaagtaccggatgattaggaaccacaaatgcagacaaaagttcaggcaatacctgaatgcctccccattgatcaaaagccaggatatcaacaggatacttctcttgaaaaaatacgttttcttcatcagaaactaccagaacgatagtaccggacaagcgttcggtttgctgaataaaaaaagaagggtccagcattagatttaatccggttattgtaataatctcaccggaagctaatttttctaccattaccggtgaaactgatgcaaattcaggctccagagttagaaataccttcaaatccgtaagcggatgttctgtattatttttaatagaaagtaaccggacaacaggtatccgattttgctgcatggaataattgataacaggcaaataaataaattccacatccaattgtgaagaaggattctcttgactcatgataaacgagattaattaattcacattcaaacaataacatgtggcaaaattacatatttatttataaaggagacctctttaatttaaagaatttacaaaacaagcagaaatatatgtattattttcttttcttatctaaaaaatattctgccagtagaataaatacatatccgccggcataactgaccatatctttcaaatcgaaagtagaaccaagggctatacggagtatacgattcgatattcccaacacatccaccaactgaaaatattgaagtatctctatgaaacaggcaaaagcaagcacatacaaaggtaattgtgacaaaccgttcggaataaaaatccgtataaaacaataaatcaacacaacaaccagtgcgtcacccatataaggacgtacaaagctatcacgaacatatataccaataataatctcaactaccagtattacgacaaaacatatcgcatagaaaaaacttttattcatggtgtctttcgaattttatctttcacaggatatactgagaatacaaagttcgattgttgtttatcaataccattaaaaactttatgtattatatcaactttatgatgtcagtatttccgatagaaataatcttttgactgcgaatatacgttatttctaaaaaactattgtatctttaggtaatgaataaacgattgaaataaagatagaaaggaaatttacgtatgatgttgaacttcgactttgtattaagactgttagtcgccggaatcttaggtgccatcattggcttggacagagaatatcgtgccaaagaagcgggctatcgcacacactttctggtgtcattgggtagtgcactgattatgatcgtttctcaatacggctttcaagaaatcataaaagaaaatagtgttacactcgatccaagccgtgtagcggcacaagtagtcagtgggattggttttatcggtgccggaacgattatctttcaaaaacagatagtcagaggactgactacagcggcagggatctgggcaacagccggaataggcctggcagtaggcgcgggcatgtacgtcataggtattgctgccatggtactgacactgattggtcttgaagtgctaagttacctgtttaaaagcataggaatgaaaagctcaatgataactttttcgaccgataacaaacaagtactgaaaggagtggctgaccgatttaattccaaagattacctcatagtgtcgtatcagatggatacacagaagcacggaagcatagaaacctatcaagtgacaatgatcatcaaatccaaacggaacaatgacgaaggacatttgctatctttaatacaagaatttcctgaagtgacagtagaacgaattgaataagattatttctgtttttcggtgatatacttccaataacgcaccggcatatcctgtttatgtttacgaggattcagtcgttctttaattgtgatagatttaaaataagtcttccaaagttgttggaaaagtttttcgtccttatccatcaagctttcgtccagcattccggtaatcagatgtgctgcttgaccatcatcatcaaatgtcacctcctctaccgtgtgtagatcataataaaaaccataacggcgcttcatgtcataaatcagccaccgttgatcggcaaaacgatctttaaagtgacctaccgtcaaaggtaaagcattgtgctgtggttcaaaagcagcgaaaaaggtaccatccaccgctttctgaaaacgtacgaactgcaacatacgcaaacgctcccaatctacccgcttccatattttggaaagagcgagaacatccggatcaccgaaattagtctcaatggagacgggagagtcaatggcctttcggatgtatcggaacaaaagcatacctacttccgataactctgaaagccaacaccaggtgatagccgaaagggccgatgccgatatcttcttctgcaatccccgccagacacgtcctgccttctcttcatcagtgataaccgtaaagatgtcatcatagaaaagtggtaaagtatctcctttcgagagtaagacatcaggaaaggtcttgcgattataagcatcgaatagtgctgtcagcaagccatcaagtgttttatcgtagataaaaagaatcataacaatctcaatcgttaaaaacaaatgataactgattttcatccgtctttttcttagcagatttgggcagtaacaagctacgtacggtctgtggagtcatttcatttacagtccgcatgggtaattcgctgcaagtaataaaatattgtgcttttttcataaccacacctatttttttaagttgataatatcccaacttcgaataacgacgggaagctataattaattttgccgactttaccccaattcccggaatacgaagtatcatttcataatccgccttgttgatatcaacaggaaactgctcgggatgacgtaacgcccacgacaacttgggatctatttccagatcaagatcaggataggtgtcatccacaatttcattgactttgaactgatagaaccgcatcagccaatctgcctgataaagacgattctcacgtaccaaaggaggctgcttaagtgcaggtaaacgagtatcgtatgtatttactgatacgtaaccggaataatagacacgcttcatcgtgggacgctggtaaagggcggaagaaagaaagagaatatccttatcactttcagccgtagcaccgacaatcatctgtgtactctgacccgcaggagcaaagcggggcgcataccggaacttttttcgttcttcactactttccagtacgccctgttgaatataaagcatcggtgcaaatacactcttatgatctttttcaggagccagcagtttcaagttctcttctttggggatctccacgttcacactaagccggtcagcataacgcccggcttcgttcaccaattcccggctggctcccggaatacttttcaaatgaatgtacccgttaaagcggtgcacttcacgcagatctttcgccacacgtaccaaacgctccattgtataatcgggatttcgcaccacaccggaactcaaaaacaacccttcaatgtaatttcgacgataaaactcaatcgtcaagtctaccagttcggacacagataacgtagccctgggcaagtcattacttctccggttaatacaataggcacaatcgtatatgcaataattggtaagcatcactttcagtaacgaaatgcaacgtccgtcttccgcaaaactatggcaaataccccatccacccaccgtattacctaatgtaccgggcttgttggcacgcaccgtgccacttgaggcgcaggaaacatcgtacttggccgattctgccagtatcttcaatttttcgagaacatttgcattcataagcggtaaagagtttgcatgttttgtatctcggcttttatcttatcccgcagcgactggggcttcaacacctccactgccgctcctttggataataactcctgaataaaatcataagtatgcgaaatataaagttcaaaatcaacataactctctgtaacggcaatctccttttgactggaatgtaaaggaagatttctcaggtatggagcctgtgaaatagtggtcctgaggacagtgtgctgaggaagcagattttcatcacgaataataccaaaactatctctgaaatgatcctgaggagtaaacttacgtgggaaattgaatgtctcttccgaaagagcgattctcttgatccgatcgagagaataagaacgaaaagctttatattcccggtttattcctatcaaataccagcgatgacggaataatttcacgaaataaggctcaagtaacacatctttggagtgttcccagttgtacgcctgatattccatagcaagcacgcgtccgctacgcatagcatcaataacaagatccatgaattgcactcccgaaggtacttcctcaaatacaatccggttcttcatatccacattttcctgcaatacattgttcaacgaaaaactattcagtaaccacatcttcaacttatcacccaacattccttcggcgtctgctatataataggtattgttccgtttatcacattcaatgtttatgtcgaacatttcttcaatggcctgtcgatggttatggaaagtccgcaaaggtatatcagaacgattatcatctcccgctctccaacgacgattgatttcggcaaatgtcacaggagcattccggaagatagtatccaccagccagattagtttattgaattgttgttttgccatactaaacttgatttctgctgcaaagcaaggaaatgtttatgccaaaaataagcacaatcctccaaaagatcaaaagataatctctttttaaccacttcattgcaggatacaacagttcttaataatccgaaaacgatcttcgtttgttatttataaaagagactgaaaattatgaagaagaagtttactatatttgtcatgctattggccggtatcatttacactggccatgcacaaggcgtacaatggatttatcaacaaaaacaggagaaaaaaaacatgaagaatctgagtgaaatatattttgcaggcggttgtttctggggaacagaccatttcctgaaacagatcagaggagtaaaatcgactcaggtcggatatgccaacggaaacattgctaatccgacttaccaacaggtgtgtacaggaaaaaccaattttgcagaaaccgttaaggtggagtataatccacaagaagttcccctaaaactattgatcgaccttttttttaagacaatagatcctacaagtctgaatcgacaaggcaatgacaaaggttcgcaatatcgcaccggtatttattatactgatgaagctgacttgccgactatccggacagccatcgacgaattggctaaagagtattccaaacctatagtcatagaagtgaaacccttatccaatttctacaaagccgaggaatatcatcaggattacctggataagaatcccggaggatactgccatattaaccctgcactattcgagttggcaaaaaaagcaaatgcacaggctgagcagtcccagacaaattacaaaaaaccggatgacgccacacttcgtagtaaattgacgcccgagcaatatgcggtcacacaaaagaacgcaaccgaaccagcttttcataacgaatactgggatgaaaaacgagatggcatctacgtagatatcactaccggtgagcctctttttatatcaacagataagtttgattccggctgtggctggcccagtttcaccaaaccgatagaaaaagaagtgataaaagagaagatggatacatcacacggaatgatacgcacagaagtacggagtaaaacgggagatgcacatttaggacatgtcttcacggatggccctaaagaaaaaggaggattacgttattgcatcaacagtgcatccttacgcttcattccaaaagagaaaatgaaagaagaaggatatggagagtacttgaaacttctgcctcaaaaataagtcaccaacagatatcaaaatcattgtcggaatcccagtgtacacaaaaaaaggatatccacaagattatcgtttctgaaatatagacggattaaaattctgtaaaacaaaaaagccggtttcaaaattgagaccgacttttccattttttctattcgtaagattacttctttgattcttccaaagatactttacggaattctttcattgctttttcgatttccaatgaagctttacgggcacgagttcctgcagctttgttaccattttcaatctgagcatttgcatctttgttgaactcagctaccaaagtagcaatcttttctactaattctttcataatccttatttatttcttcgttaataatgatgggcaaaaatacatcctttcccgaaataaacgcataaaaacgatattttttttgaaattatcagctaaaaatcagcaaaaaaataaggtttagtcttttttatctacttttgcaggcatgaaaccgcttacagatactgattacatacacgcattgatagccgaaggggagcatcaacagcaagactttaaatttgaaatatccgatgcccgtaaaatcgccaaaacactgtcagcttttgccaataccgatggaggacggctgttgatcggcgttaaagacaatggaaaaatagccggtgtacgttcggatgaagaaaaatatatgatagaagcagctgcccaactttattgccggccggaagttgattattccatgcaaacatttcacgttgaaggacgttctgtattagtcgtacaaatagatgaaagtgaacacaagcccgtttttgcaaaagacgaaaacggtaaatcactggcatatattcggatcaaagatgaaaatatcctggctactccggtacatttgcgcgtctggcagcagagcggcagtccggcaggagaattgatccgctataccgaacgggaacaactgttgctggacttactggaagaaaatacttcgctttctcttaaccgctattgccgacaagcaggtatttcccgacgggctgcagagcatttactggctaaatttatccggtttgatatcgtggaaccgatattcgagaaccataaattctacttcaggctaaaataaaagaatttgcccctgataccaattaattaatagatatgaatctaattaacgatatattatggacctacatcctgattgcaatgctgttgggatgcgccatttggttcacgattaaaacccgtttcgtgtaattccgcatgatcggcgaaatgctacgtctgttgaaagactctgccggaaaaggagaacatggagagaaacatatttcttcgttccaggcctttgccatatcactggcaagccgtgtcggtacaggaaatctggctggcgtagctacggcaattgccatcggcggaccgggtgccatattttggatgtggatcattgctctattaggagcatcgagtgcttttgtagaatctaccctcgcacaattatataaggaaaaagggaaggaatcttttatcggaggccctgcctactacatgaagaaagggttaaaaaaaccatggatgggaattctgtttgccatactgattactgtcactttcggatttgccttcaactcagtacaaagcaataccatttgtgcagctgtagaacatgcgtttggcatcagccatgtgcctatgggcatcatcctgaccggactgactctattgattattttcggaggtatccagcgcattgctaaagtaagcagcatcatcgtccctgtcatggcactgggatatgtaggattggcattggtcattgtactcatcaatatcacacatctgccggatgttatcggaaccattgtcagtcatgcttttggttggcaacaggctttaggaggaggtgtagcagctgcattgatgcaaggcatcaaacgtgggctgttcagcaatgaagccggtatgggttcggcaccgaacgtagctgcaaccgcattcgtatcacacccggtgaaacaaggactgattcagaccttaggagttttcacagatactcttattatctgttcatgcacagcattcatcattcttttcagtggtgctccgctcgatggttcgaccaacggagtacaactcactcaacatgcgttgaacaacgaaataggaagcataggaggtatatttgtggcagttgcccttttcttttttgcgtttagcagcatcatcggcaattactattatggagaagcaaatatccgatacctcacccacaaacgatggatagtttacctttaccgtctattggtaggggggatggtatgggtgggagccatgtccactctcgattttgtatggggactggcagatatcaccatggggttaatggccatctgcaacctgatagcgatcgcctttctgggaaaatatgctttccgattgctgcaggactatagtgaacagaaaaagtcaggcatcaaaagcccggtattcaccaaaaacaagatgaaggatattgaaaaagatattgagtgttggtaaagggcctcaaaaagaatagatgttatccgtataatctgtagtaatttaacaacttatttagtaaatttgcaacctcaatctataattgacaaaatgacttatgagcatattcgctaacttatttaaaaaacaggccgacgctgacgcaaaagtagtaggcaatgtagaagatttcgtatcactgacacgtgtatattttcaatctgtaatcgcagtaaatttaggtatcacgaatatccgttttctgccggatgtagccaacttcaaacgtttattcaaagtagccacacaaggtggcaaattaggacttgccgagaaatcggcttcccgcaagatgttgatgcaggattacggcatcagtgaatcgttttttaaagagatagacacctctatcaagaaaaactgccgcacacaaaatgatgtacaggcatatcttttcatgtaccagggattctcaagtgacctgatgatgctgatgggtaacctgatgcaatggaagttccgtatgccggcgatattcaaaaaagccttgcgctccatgacagaaaaaactgtgcacgatgtatgtaccaaaacagtatggaaagctgatgacgtacacaaaacggctgccgcagtacgccagtacaaagaacgtctcggattttcggaacaatggatgtcagagtacgtatacaacattgttttactggctaaaaaagagccgaaacataaggacgaagaagcgaaagcaaaatgaaaagcggaatgttattaaacaaaaaagaatcgtaaagaatagcatgaatagcaaagcggaggttttctacctccgctttttttgttatatttatgcaaatatttcaattttaacaatctaaaaacaatcgcgtatgaaacaaaagaaaatgctttcactcacactttcccaaatacggcaactatactgtcaggagttacctgaactcacagcaatggctcaacaaagtcttgacgacaccgactttaaaaaccacctgcaagagttcctcactccttacatatccggagggaacaaagcgggtgagcaaattcgactccttatcagctacgacggaaagacagttcatgagctgtctaacgaacaggatatgcaaatacagaccttatccattctccgacgcttcttgaccgggaatttggaaaatgcagaaatacctactgacttgttcctggacctatactatctctttaaaagactggaagagccggaatccccactcccctctccacaacgaattaaaaaccgaaccgaacgctgggccaccggactggacgaagatgtgatagagttacgttccgagaatcaggaacggatgctgcatctactgatacaaaaaatagaaaaccggaaatccaaaccatcttcacgttttcactttgaagaaagaatgagttatgaagagaaatatcaacaggtctgtcagtggtggaacgactttcgcttccatctttcaatggccatcaaaactcctaccgagttgaaccgctttctcgggaactccctttccagcgaaacaatgtatttgttgtcacgggcccgcaaaaaaggaatgcctttttttgccactccttactatctttctttactcaataccagtggagaagggtataatgatgaagccatccgcagctatattctttactccccccgtctggtagaaacctatggtaacattcgtgcctgggaacgtgaagacattgtagaagccggtaaaccgaacgccgccggatggttattgccggatggacataacatccaccgtcgttatccggaagtagctatcttgatccccgatacaatgggacgggcttgtggaggattgtgcgcttcatgtcaacgcatgtacgacttccagagcgaacgattgaatttcgagttcgacgcacttcgtcctaaagaaagctgggacaaaaagctacgcagattaatgtcttattttgaagaagatacccaattacgagatatattgattaccggaggagatgctctgatgagtcagaacaaaaccctgaaaaatattcttgaggctgtttaccgcatggccgcacgtaaaagaaaagcaaatcaggaacgcccggaaggagaaaaatacgcagaattgcaacgtgtccgtctgggatcaagattattagcttacctacctatgcgtattaacgatgaattgatagagatcctaagagaatttaaagaaaaggcttctgtcatcggagtgaaacaatttattattcaaactcacttccaaagtcctttagaggttactccctacacccgggaagctatccggaaaattctttctgccggatggctgattacgaatcagttggtatataccgtagctgcatcccgacggggacacaccacaagactgagacaagtactcaattcgctgggagtagtttgttattataccttctccgtcaaaggattcaatgaaaattatgccgtattcactcccaacagccgatcgatgcaggagcaacatgaagaaaaagcatttggcaagttgacgcaggaacaggctgacgaactgtactctcttcttgaaacaggtgaggacatcgctactcgaatacatcatttcatgaagaaacatcatttacccttcatggcaacagaccgaagtgtacttaatctgcccgctatcggcaagagcatgacattcaacctagtgggaataacagaggaaggcagacgtatccttcgtttcgaccatgacagtacccgccgtcatagctctatcattgacaaactgggaaaaatatatatcgtagaaaataaatcactcgcagcttatctaaggcaattaagcaaaatgggggaagatccggaagattatgccagcatttggagctatacggaaggagaaacagaacctcgcttcaagttgtatgaataccctgaatttgaattccacacaacagaacggatgagcaatctggaagtattataaacaacaaacagtgaataataaacagcctcctaatatataatgcgtatcctgtttattattcacagttcatcactctttgccgagcatccgttattcctcgttttcctctttcacccgaattacgatattcgctatgatagcagtcaaaccaccggtcgtgatgccagacgaaaagatactacgaatagcttccggagcctggcttaacacatcgggcatcaattctactccaagtcccaatgaaagactgacagccaataccaatgtttccttccgtccgatattttgtgatgcaacaatgcggattccggctgctgcgacagttccgaacattaacaaagtagctccgcctaatacagggtccggcatcagtgagaaaacagctcccacaatcggaaatagccccaaaagaatcaacattgcagctatatagtaacccacataccgactggccactcctgtcaattgaatgattccattgttctgagcaaaaatagaattagggaaagagttaaatatacctgccagaaaagagttaaaaccatcggccatcacacctcccgaaactcgtttgagatagtcgtcaccctcgatcttcaaaccagaaatcatcgaattggccgttacgtctccggtcgcttcgatagctgtaatcatatatacgagcccgatggcaatgaaagaagacacattaaaatcgagtccgtatttaaaaggctggggaatattgaaactcatcagcatctctacattcaaagcactcatatctacttttcccaaaacaaaagcaaggccgtatcccaaacagagtcccaacacaatggaactcatgcgcaaatacttattcttgcaacggttaaaaaacagcacgctgagcaaaaccgcacctgcaatcgaaagattctcccaagaagcaaacgtaccattatccatcgcagtataaccacctccacaagagataatacctacttttatcaaacttaacccgataagcaacaccacgatacccgaaaccaacggagtaataatattacgcatatatttgaaagtgcggctgatgatcatttcaatgggagcagccgccatacagacaccaaaaataagaggaagtccaccgacaagtcccgtagcaatgataggaccgataaacgaaaaacttgttccctgaatacaaagcaactttgcccctataggtccaaaacggcgacactggataaaagtagatacccccgaagcaaagagagacatcgaaaccaagaaaccggttttctccacatccagtttcaaggcactggcgataatcaacggcggagtaataatagctacaaaaatagcaagcagatgctgcaatgccgcaaataatgcatctttaaaaggcggacggtcttcaataccgtatatcaagtctgttttcatcagtttttagtttattgtccatttcagtgccagtgtagggatgacataaaaaccatcgcgtccaccaaaattattactcagctcaacttctgagcccacactcagcttaaatttatcactgataccttttatacggttcagattcacccaaaactggggctcggtaagaaaaatagtcttcccataagcagtctcctcacgccaccagtcagcaaagccggaaaaagtgagcaagttattgctgaaattcatataccaggttccggtcagctgaaagttattgggagaatggtgtttctgaatatacttatacatggccgacaatgaaaagccacgcgagaaagcagtattattataagtataggtaactccccccaaataagcgttctgataagaaaaacctttggcaagacctccattatactccacatgtaccgagaacggattcttccagaatttcaattcacgggctatttcccaataagcagccgctactccgtcagaagtatagtccatgtccacaaagaaataagtactaccccacttatcaggatgaaacttctccacggtagaggttaatacaggacggtcctttaaatctttatcatacaaagaacgtccgaaatcatagtgcaactgaatgttttgtgcccttaatccgatgccaacggataacaaaaacaggcaaaaaagagcaatagcagtccttctcatgttgaatgtttttttattaaggcgcaaaagtaattaaaaatcgtgggagtacgtttctatcaaatagatattatcactatttttgctcccgatcaaatagtaaacaatggacatagaaatagaaaatcatccgttagagccctttctccccgccaatgcccgattgctgatgctgggaagttttccacctcaaaagaaacgatggtcgatggatttttactatccgaacctgaacaatgatatgtggagaatcgtgggattgctgttctttaacaacaaagactacttccttaacgaaacccggaaagctttctgccgcgaacgcattatcagctttctcaacgataaaggaatagctttattcgataccgcttcggccatccgacgcctacaggacaatgcctcagacaagttcctggaagtggtgcagcccactgatataagccgacttctcggacaactcccggaatgcaaagccatcgtcacaacagggcaaaaggcaacagatacactccgggcacaattcgaagtggaagaacccaaggtgggcgatttctctgagttcgtctttgatggacgcccgatgcgcttataccgcatgccttcttcttcacgagcctatccgttggcactcgacaaaaaagcggcagcataccgcaccatgtatcaagatttacaaatgcttaatatagaataaatatgaaaactctctttttgcaatatcccgcatgcagcacttgccagaaagctaaaaagtggctgacagaaaacaacattgagtatactaaccgccttattgtggacgataatcccacagtagaagaattgaaagcctggattccactaagcggactacccgttaagaagtttttcaacaccagtggtgtagtatataaagagctgaaactcagcagcaagcttcctacaatgactgaagaagaacagatcgcccttttagctaccaatggcaaattagtgaaacgcccgctggtagtgaccgagcgcttcgtattggtaggatttaaacccgaagaatgggaaaaattaaaataattagcaacttctttgcataaaagcttgcaaattcagaagtttattctacctttgcagccgcaaacacgggagtagctcagttggtagagcaccggtctccaaaaccgggtgtcgggagttcgagcctctcctcccgtgcagaaaaaatcccgcttaggtcacatgacttaggcgggatttttcattaatcaaaaacggatactgatttctaccggttcctcacccattgtccagtcaggtccttcctcgatcaagcgaatggcttcctcatcagccgaagcacaaagtccctttttaacagtaatgtcttgtggacgtccttccttatctacccgaaaagtaagaataacttttcccttggcacgcgcacagtctttatcagacggatgaaccagactctctttcagatatttccgaaatgcctttctacctatggtaggttggggagtaccggacattttcagactcgctacagctcccgttatactccctttcgactgcgaaccataccctaccactaccacctcatcaagcgtggcttgatcttcgttcatcgctatcaataagcttttagtcgtatcaaccggaagcgtaacggattcataaccaatataatcgactgcaagttcccgatttccacctgtcttcaatacaaaattaccatttacgtcggagatagttccctgattagtccctttcagcttaacggtagcaccgacaataggataaccgctggagtctgtcactctgccatgtactttacccccaaccgctacctgagcagtaaggctgctgtcattagccggaatagatttcatagccgaacttgtggtagcagccaaaggctcttcggcaatagtggtttccaatgcctcatcgatccattcctgtgtcatggcctgaggcacctctgtgtggggagatacaacaacttttttctctctattcccggttatcaatcccttctgaatagttgcggaatcttttctcaccgtcgccaccaaatcctctttcttttcttccttttgtacagacaaaggttccaagtgagatacttcttccattgctatccgtgcttcatccggtaaagtattctcctgaagcaggaaataagaaccgatacaaactccgatcagaaggctggcagccacactccaggcaatggtatgcctgcgtttttgcgttacgcgcatattcacccggcgacgcaacaactctatttgctcatcggctccactctccacccggctatacccttccaacgcatcggccaaaaaaggatcacgcatcgcttctttctccaatcgatgtgcttctttccccttgcggaatccccgtatgtaatccgatagtttcatcccttaagctgatttttaatgcaaatctttaaatttcgttttccattttggatatagctcttcacattgttcagagtaaatccggtttgttccacaatgtcggcatacgacatctcttcgagaaagaaacgcgtaatactggtccgttgttcttcgggcaacttttcgagacagtgatgtaatgccttcagttgttcctccgaactttcctcttcacttaatagatgcagaaattcgtcagattccataatattaaccgtataatctaacggaatttctttatttcccttccgtaaaagttgcaggcaatgattcttcgctacccggtagagccatggcttgaacacttttatctcataatttcccaacttaggtagtaaatcttcaaatagttgcatgactgcttcctgtgcccggtcttcatcatgcaggtatttcaggcaaagtccatacagtaacggtatatatcggttatataattcgccgaaatattccgtatcgccagacttcgtatagtgtatcagtaattcctcgtccgatagtctcgatatgtttcttttgaaaaacaacatctattcctcttcttcgtcgataacgacttgatatttttctttcattacttcaaaatcacctgtaatctggtctaatatttcatgtgtatctgtactctttaccaatgtgggtataccgtaatagacggatgctttgtagggtagcagtatcattttgcctttaggcagtgaacgtcccatgccggtcatgaacacgggaatatatttcacttcaggtcgcagagacaggatacgggctataccggattttatttttcccatttgttccgactttcctctggttccttccggaaaaagaatcagtgaatatccggcatcaatggcttcgagcatcttgcgaatcggatcatgttccgaatctttttccccttttctcctgattaaaagagtattgatgaaaaagttacttatcgaagcctgaaagcgagttttcccgaaataatcttctgccgctacaggtttgactttccataaaaggttaccgggcaaagaagatagcaaactgagggtatccaagtggctgttatgattggcaaggatgataaactgcttctcctttttgaggaactggcaatcggtgaactgaacccctacgattaatttcaggaaccagtggaaaacacctttatatataatccgcatggcaacagattgcatgaatcttttttccatcttttcctcttaataagcaatataataaactaaatgaaaaaatacgggggcagtgtaggccagagagtcgatccggtcgaacacccctccatgaccgggaatactgtttcccatatctttgattcctttgtctctcttgatcgcggagatgactacatctcccgagaatccggcaatcgcgataagggcacttaccaggatgacattaggagcggagaggggagtcaggaaaccgagaaagtaaccaatcacagtggtactgattacaccacccagaaaaccttcccatgttttgttcggacttattttcggaagtatcttatgccgtcccaagagtttaccccaaatgaactgcatgacatcatttatttcggtaaggaatacaaggaacaacagcagacctcgtcctcctgaactgaatcccggtagttcgggaagcgacaggagataagcaaggtgactgataccgaataccgaaagcatcagaatccattgcaacagggccatcgacttggtaattccatgcgtgtctccctttaaaaccagtcgtaaaggcaatacaaggaacatgactaccggaatgaatatgataaaggctccataccaggccaggtaggcaaggtaatattgaatgggaatggctagtatgccccagaacaatgctccgcgatccgcttctctgaatcccagtaccgaataaagttctctgaaggcgataaaagagagaaatgcaaggaagaaataagagatgttatagctgataaatacggcaccgataaacatgcccgccatgatccaccatgagcgtgtgcgtgcagcgagttcgctgatatttgttttcggaaatatcttctttacgagaaagagaataaggcttgccgtaacaagtagtccgatgataagcgagatgacaataatcagttcatcgcttaatgtggggaatattttatccagtagatctttcattttatttcagtgtttgtagtgtgtgatatgaggtacaagcggtgtatcagtgttgcgataagaccgatgttgataatgattagagctatgaaacataccatccggtcgtatcctgaataaatagtgcaagtggcgaccacgaaggtaagagtcaataatgccatacggtgctgcttggccatcgggccgttaaagaaatgctggtgtgtcttgtatgcccctatccagcggaaataggcagtcataacagcgagaagagcagccagccatcccaattcaatgccgaatccaccagctacataccccacgggaatgatgaacagagcatcggcaaagcggtcgggcatatcgttataaagatctccattggcacttttctttcctccttcaatggctaccatcccgtcgaacagattgcagagtaatcgcgactgcatacaaacgataaacagaatataggctacatatttattgaagccgggataaatgactgtgccaatcagcaggagacatcccaccatagcgaagaatacactcatcatggaaatttggttgggtgtgacaccccaatgagtaagtttacgggcaatgatattagcccaggccgtgtttcgtgaggctatttcccgccttccatcaacttcatttttcatatttgtgatatgtttatgattcgcaaatatacacatcatctgatgagttgcaaaggaatgagtgagaattttgaaatgaacctcttttgcagcaaaataaaaaaagtttgggttgtttatggaatctgtgtggaatctgcatctctatagtaaaagcgaactaatagtaacattttaaaataatgaagttatgaaaacaaatcaattcagagcgatggtgctcgcactgctaatggcagttatctctttggctacagtgagtgcacaagctattactgtgtcgggtactgtaacagatgcaaaagatggaactccgcttgtcggctgttcggtacagataaagggtactacgaaaggtacggtgacgaacatgaacggtcaatacacgattcagtctaagaagggagagacgttgttgtttcagtatatcggctataagcaagagaaaagggtggtaaaatcgtccacgctggatgtgaagatgaaagctgacgaacttgtattggaagaatgtgtggttgtaggatacggacacgaactaagggccactaaatcaatgtctactgcttatatggcagtatgtcccgcatcgggaatcatgtataatgctgtaaatgcggaagaatatggcgagattcaggaaaatggtttcaagaatgtgtcggatgctccactttctactttttctattgacgtggatgccgcttcttacagcaatatgcgtcgttttatcaataaaggtaaactgcctccagtcgatgcaatccgtacggaagaattagtgaactacttttcctatgattatccgaaaccgacgggaagtgatcctgtgaagattacgatggaagccggaacctgcccttggaacgcagatcaccgtcttgtccgtatcggactgaaggctaaagaaatcccgacggacaatctgcctgcatccaatcttgtctttctgatcgacgtctctggctctatgtggggagcgaaccggttggatttagtgaaatcctctcttaaactattggtaaacaacttacgtgataaagataaagtagctatcgtgacttatgcaggcaatgccagtgtgaaactggaagcaactccgggcagtgacaaacaaaagatacgtgaagccattgacgagctggaagcaagtggttctaccgcaggaggtgaagggatcatgctggcttataaaatagcccaaaagaactttatatcaggaggcaacaatcgtatcatactctgcaccgatggtgatttcaatgtgggcgtatcatcggacaaggaacttgaaaagctgattgaacaaaagcgtaaaagcggtatattcctcaccgtattgggatatggaatgggcaactacaaagacagcaagatgcagactctcgccgaaaaaggcaacggaaaccatgcctacatcgataacttacaagaagccaaccgggtattggtgaacgaattcggagcaactttacacactgttgccaaagacgtaaagttacaggtagagttcaatccggcacaagtgcaggcctaccgactgataggttacgagagccgtttgcttgcagacgaggattttaataacgatacaaaagatgccggagaaatgggagccggacatacagtgacagctttctatgaagtaattcccacgggagtaaagagtgattttgcaggaaaaatagacgatctcaaatatcagaaaaaacaaaaaccatctacgcctctcaatgaatctgacgagttattaaccattaagctacgttacaaagctccggacagtaacaccagcaagaagatagaattgccgttgattgaccataaaagcaaccgggtctctgccgatttccgctttgcagccgcagtagccatgttcggacaactactgagagactcggaattcaaaggaaacgccacttatgacaaagtgatctctttggcaaaaaccggattagaaaataatgaaaaaggatacaaaagagaattcatacggcttgcagaaactgccaaaagtctctgagattgtggaagttttccacggtatccacactccaaagtcccgttttccacagtttgaactttaggtcatcgttcataaacagctatatactaacactatagcacatccaccttcgttctggcacgaggcttgcaatattattatcgtaagcaagtggcttacagaaaaacaaacttcatttattaacttaaaacttacaattatgaaaaaggtattagtagcagtagcattggttatgggattaggtagctcagtagcattcgcacagaacgcagaaaacgctaacgcagtggtagcaaccgcacaagctccgcaagacgagtatacaaagattgaagtaaaggatctgcctgcagcagtaaccgaagctctcggaaaagcttatcctgaatcaaccatcaaggaagcatcggtaacaactaaagaagaaggtaaattttacaaagtagtcgttactcagaaagacggaacagacgtgactgtggtattgaacgaaaaaggggaagaagtaaaataaaagtgcacgtttaaagggcgaaaagcactgtttccaatcaggggagcagtgcttttcccatttatggaggaatgtggacttaccattacagtttatttgcctcctatcatctattgactgggctcctcctgtccggcaacgaatgatagggacaataaatataagcaaccgacttccggaacaaaattcagagtcactacttaaatcaactcgtagctgctgctctggatgggcatatcgagattgtgaagtaccttctccaacagaataccctcacgattgtcgtactcgtaaccgaaagtagcacgaatgccctgcaaaataaactgcgtagcacggtccagagcaatgggaagactgtctccctgcaataaagctccggtaatgacactcgtaaacgtatctcccgtacccggataatgggcgggcaaatagggacatgtgattttccagtaacggtttcctgtccgattgtaagcataaacagaagttttgtggggttcgtccaacaccggtacactggtgataatgaccacttccggccctttgtccgacaaacaacgcaaatactcttttagttcctgatcggtattactctctttatacggccggtcgagcagatagaaaagttccgtcagattgggagtgatcacatcggcatgtgtgactaaatgctgcatttccaccaccatcgattcattgaaattggaatagagcttaccattgtctcccaaaacgggatctattacagtcagactatcttttctgcgaaaatcacgaataaaatcagatacaatctgaatctgtcggggcgatcccagataaccggtataaatagcatcaaactccacttccaaccgtttccactcagcaatgatacgaggcatctcgtccgtcagatcaagaaaagtaaaatcaggatactgcgtgtggttagacaggatggccgtaggcaacggacatacctgaaaccccatcgatgacagaatgggaatgacgaccgtcagagagacccttcccataccggaaagatcgtgaatggccgccaccttctttactttatttgcaaacatacacttatatcaatcaaaaccaatattcatccaggcaacccgcagtcgcatctcctctgacactgcttcgttactttaatattaccaatacatctctcgctccatgagctcccatcaccaatgcctgttcaatgtcggcagtctttgagggtcccgagataaatgtaccgaatttatatttttcatcttttacccgttcgtaagcctgatgcatattgctcacaatacgatttttgtccagaacaatcaccagcttctcggcaataaaatagagtgccttgtatttcactgtctgaggaatccagacagccgcattctcggctactccgatttcacctttgacaacggctatatcggttccgttcagatcctgcgcacgacctaacaaatcaggattgaacgtagcacacgtgatttcctccaaatcggaagcaatgctgccggcatcagggtaagtacggcgaatgacagcattgatatcttctccctcaccgagcacaatagcctcaccaccgacggcaaaactcatttcacagaatttggcaaccacgtccggataaacagttgcattgatctgccaatcgggatattcgtagcggttcttcgtatttttacggatactcgctaatatgtcttctttactactcatttgttttcctcctttccctgcactttatttttcttccacatctcgttaaacgattcgcccgcgaatttaggaagttctcgtccttttccccacgcatccaaatcgttatacttcataaaacgtggcaaatggttaactaccggagcagcccaaagcgccgcattgaaaagcgtaggatgatccatcaacaccttcatgccaccggacattattttcttacccgtattagcttttccaatcttatccagatcctgcctccatttataaatctgttcggccaagtccacctttgccggacaaacatccgaacaagacatacagagagaacaggctgacagattatcgtaatacttttccggatcatgtgccattcccagattgataccgataggtccgggaataaagtaagtgtaagaatatcctccactccgacgatacaccggacacgtattcatgcaggcaccacatcggatacagttcaaagtcttgatatggtcgggatgggccagcagggcactccgtccattatctacaataataatatgatattcacctccttcacggggattccggtattgagaggtataagtagtgatcggctgtcccgttgccgaacgtgccaacagacgggtaaacactcccagagcctccatgtccggcacaatcttttccatgccgaaagcagcaatattcagtgtcgggcacgatgtacccatatcggcatttccttcattggtacaaaccacaatatctccggtagacgccacagcaaagttggctcccgtcatagcggcttctgcattcagaaagatatttcgtaagttctttcgggcggcatgggtcagataagtgggatcaaaattccctttctccgttcccatttctttctcaaaaagttctcctacctgctcacgcttgatgtggatagccggaagtacaatatgactcggtgccagattcatcaattgcaggatacgctcaccgagatcggactccaccacatcgattcctttctctatcagaaacgggttcagttcgcactcttctgccaacatcgatttgcttttcacaaaatgctttactccgtgactgctcaatatttcataaacgatggcacgatactcttccgcatcttttgcccagtgaacgatggctccattggctgtggcattcttctcaaactccagcaagagttcctcaaggtggctgttggagtagagtttcaacgcacatgccttatcacgcaattcttcccactcgggtacttccttgctcatcttgtctctcttggcacgaaccatccaaagggtctcgttgtgccatgctgccatcaccggattttccaggaatttttcggcagcttttgcatgcttggtactcataattgtgatgctaatatttctacaacatgaatcattcggataggcaggtgctcacgttcgatgataccctgcatatgcatcaggcaggagctatccgctccggtgatgtattcggcaccggtctccatgtgatgccgtatcttatcgcgtcccatacagactgaaacagcctgctcctcgaccgcaaacatacctccgaaaccacaacattcgtccacatgggagggctcaaaaacttcaattccttcgaccatctgaagtaaatcacgcaatttattaaaataaggtatattcagttcgctcggagctgacaggaaaagttcacgtacaccgtgacaactgttatggatactgactttatggggaaagcgggcaggaattttcgtaggttttatcacatcgtgaatgaaagcgcaaaggtcatatatcttacctgcgctctggcactgatggccttctttggccagaatgccgggatgattctctttcacaaaagccacacaactggcagagggaccgacaatgtaatcgtacttccggaataaatcatcgaaacgaatagccatttttaaagattcatcttgaaaaccggcgttcgccatgggctgtccgcaacaggtctggtcaagaggataatcaacatccacccctaagttcttcagtaatttatatgatgccacccctacctgcggataaatggcattgatataacaggggataaataaacctactttcataatatatcattaattagttacaagtcacgagtcacaagctacgagtcacaaacgatcaataacacacaagacacaatacggctgcctatatcttgcagcttatcacatatagcccgaatcagatcccacagctcatagaatatttatcagtttgtgcgtttgcaggctaagtctccatttaggatgtcgcatcacgcaatccaccgtttctgcggtgttattacaagaacaaggctgaaggaaaaaatgttcggcaggaagttgttcataaacgtcaatattttgtccttcgtaaacaactttaacttcatccatccggtttaaagctaaattgacaccctgcttgggagagcaggtcacccaatcgatagcagcgggcaagggtttcgtaccattggtttcgatacatacatacttgcctgcacggtgcaaaaggtctataaaagcatcgtcaatccacaaagaaggctctcctccggtaagaatcaccatgacagccggatacttcccgatttcattgacaatatcttcgtctgtcatcatttcaccctcttcgtgtcgggtatcacagaagtcacatttcagattacagcccgagaaacgtataaaaacagcaggggtacccgtatgatacccctctccctgtaaactataaaaaatttcgttaatctttctcataaatcaccgtatttgcttccgattcctgcacttcgaccttataacattgaggtatttgcttgcatacccaacgggcaatattttctgccgtgggattaaaaggaagtacctcattcagattcctgtgatccagtttctccttaacggcctgcttaatctgggtgaaatccactaccattccatctgcattgagccgctcagaacggcagtagacagtgataatccagttgtgaccatgaagactggcgcatttgctccggtacggaagaatcagcttatgtgcagccgatatctccattcttttgattactgtaaacattgttgtagatattattaatggttactgcacctaatgtcacctcggtgcgggcacaaagataatacaaaagatagttttcattcagcgagaaaagttatttttcctatttttgccgaatgaaaactatctgtattatattaggtaccatttcgctggggctcggcattcttggcatttttctgccattattgcccactaccccgtttctgctactcactgccgccctctatttcaagggatctccccggttataccagtggcttctgaatcacaaatactttggtacttatatacgcaactttcgggaaaataaagcgatcccgttacgcgccaaaatcatctcactgctgctcatgtggggcacaatgctttattgcattttcttcctgatcccgttggtctgggtcaagatactcctcttcctgatagccgcaggcgtaacttatcatatactttcttttaaaacattgaaaaagtgagataagcctgcacgggcatcttccaaacggtcttcccagtgcttcacagaattctgtccaatcacatccgaaacatacttaaccgaaataaaaggaatttctttggctctgcatacaaaagcctgcgcataagcctccatatcaaccacatctccctcaatatccgtcagctcagtcaggaagctatcaccggtattgcaggttgccgattcggtccagtgttggcaaaagcccctggcagcaagcaattccgacgaatcaatacggtattccattcccaatccggtcatcttatgcatatcccgatcgacaaaatgacggcagacaaaaacgtcccctacctgatgattaatagttccggctgttccctgattgatcacaatatcgggcttcacttgctggatagcctcggacaaatgaaaagccgatttcacttttccaataccggtccgcacataatatacctccacgtcgggccacttgatttctgtaaattcgccttgtacggcataagtcaccaatatctttaacatgattactttttttgaatttcatacatttatatcgctgcaaaagtaatcaattaaagccaaattgaccagatattatctttaattggtcagaatctacatatacccggctccttttcatcctatctttgcccgaaacttaaagcacaaatatcatgattcaaaactctatctccgacaatcgtatcgtctggctcgacgtcatccgctgtgttgcaatgataatggtcataggcgttcattgtatcgaccctttttacatttcgcccacaatgcgggctattccggaatacacgcattgggcagcgatctatggttcactgctccgtccgtcggtacctctgtttgttatgatgacgggactgcttctgctccccgtaaaaaaacaaccactgggtaaattctacaaaaagcgcatttaccgtgttttgttcccttttcttatatggtcggtgttgtatagcatgtttccttgggttacaggcgtactcggactaccgaaagagatcatcggtgacttcttttgctatacacaagggcaggaatcacaaagcctgatagactctcttaaagatgtggcaatgattccattcaacttcagccataaagagaaccacatgtggtatatctatctacttatcggtctgtatctctacatgccattcttctcggcatggatagaaaatgccgaccgaaagaccaaacgagcttttctcctgatatggattatctcactcttcatcccttatttgaaagagtatgttgccaattgtttgttcgaaagaagcggatatgtattcggcacggacacgtggaatgaattcgggctcttctattactttgccggattcaacggctatttattactggggcattatgtcaaaaaaggaaatgactggagccttatgaaaacattcatactctgcatactcatgtttgccgtcggatattatatcacttatacagggttcagcaccacagcgtcaaatcccaatgcgacggaaacggagatggaactcttctttaccttctgcagccccaatgtgctactaatgactttggctaccttcttactattacaaaaggttgtcatcaccaactctactgtcattaaagtattggccaatatgacccagtgtggtttcggcatctatatggtacactattttgtcgtaggtcccttcttccttttaataggaccttcgtcattgcccatccctttgcaggttccactgatggctatctgcatattcctttgcagttgggcatttactgcactaatttataagctgatgccacgaaaagccgtttggtttatgggataaagaacaagcatttacgggtgaatggaaagatattcggactccttccatccacccgtaaatccataatatgaagaaagctacaaaaaagtaccggggcccaatatatcatccatatagctcacattgcgagtacgcagcaatgtcccattcggactatagaacagttgatactggatgtctacattttgctgtcccaccttaatgacaataatcggttgccatttcggaaattctacgtaagtgacgtcctctacctgccagccggaatagggtccggaagcatacgcattatataccgtggcagaaagttcatcggtatctccccactctgtctgcgtcatctgccattgtccctgtgcattgaaccagacattcttttcataaccattcatcataaaatcggcacaatagtaaccaccgtcctgcgaccaggcgattccatcagccttgggatacatttttttcagggctgtctgcactttggcaggtgcattatccgcaaaaaccgacacagccactaccaacaaagccatcaacaagctgaatctcaattttatcatagctaaagcattttaatcgggtgaatacttttcgctaactaacagtttgcagggatggtttgtttcgaaaaaacggccgacacccattcgaaccggctcaaatactcttttaaagagaagaagtaatactctcaatcgtatctttcacgcgtttcactgtcgtcacgttccgctcatactcactgatgtggacagttcctcccatggataccgcctcattcttatactccattccgctcttaatgctttcacgagccgagaaatggaattcctgaataccggtctcttttgcaatccggcagatattcttttcgttcaccccacaacctgcaaggagagtaattctgccgttcgccctttcacggagttccttcaacaaaggtattccaagttccgccgttgcctgttgccccgaagtcaggatacggtcgcatcccagatcaattatctgttccaaagcttcagacgcatcacggcagacatcaaatgcccgatggaaagtgacagataagcctttcgaggcctccatcaattgtttcatcaccggtacgtctatcccgccatttgtagtcaggcagccaaacaccaccccgtcggctccaagttgacgagccatttctatatccttcagcatggtctttacctcgacaggagaataaagaaaatcgccgccgcgcggacgtatgatgacatgcagccgggtggtcgtcagtacctcacgtgccattgctatctcgccatacgacggagtagttccgccttcggggataccggcacaaagttccacacggtttgctccaccttcctgtgcagcaatgcaactctctacagagttggcacaaacctcaaataagtaattcttcatattttatccatattaaaaacaactgttgaatggagaattaaaaaagggcgaattgcttcgcccttatcctaaacattttctttttcaatctttactttgcaaagctcaccgcacgtgtttcgcggataacggttatcttcacctgtcccgggtaggtcatctcatcctgaatcttcttcgcaatttcacccgacagattctccgtctgcttatcgtctatcttatccgctccgacaatgacgcgaagttcacgtcctgcctgaatggcataagtcttggtcacacccggataagacatagccaattgttccagatcgttcagacgcttgatataagcttcaacaatttcacggcgtgcacccggacgtgctcctgaaatagcatcacacacctgtacgataggtgcaagcagactggtcatttctatttcatcatggtgagcaccgatagcattgcaaatatccggtttttccttaaacttctcagcaagcttcatacctaacaaagcatgtggcaattccggttcttcatcgggcaccttaccaatatcgtgcagcaatccggcacgttttgcctttttcggattcagtcccagttcggatgccatcacagcacaaagattagccgtttcgcgagcatgttgcaacaggttctgtccgtaagacgaacgatatttcattttaccgatgatacgaatcaactccggatgtaatccgtgtataccaaggtcgatagtggtgcgtttacctgtctcgataatctcttcttccacttgcttacgcactttggcaaccacctcttcgatgcgtgccgggtggatacgtccgtcagtaaccaactggtgcaatgccagacgggctatttcacggcgaacagggtcgaacgcagaaagaacgatagcctcgggggtatcgtctactacgatttcaacaccggtagcagcttcgagagcacggatattgcggccttcgcgtccgatgatgcgtcccttgatttcgtccgattcaatgtggaatacagttactgagttttcaatagctgtttctgtagccacacgctgtatagactgtatcacgatgcgtttagcctctttacttgcggtcaacttggcatcatccatgatatcattgatataagactgtgcctgggttttcgcttcttctttcagtgactctaccagacgttctttggcttcgtcggccgacaaaccggaaagtgcttccagcttctcaatctcctgatgctggagtttgtccagttcttctttcttcttgtctacaatacccaattgagcttccagattttctctgaccgcatcagcctcggctcttttacgctgaatctcttcctggcgctggctaagcaccatttcacgttgcttcaacttattttcggcctgttggatcttttggttacgtagagctacctctttctccaaatctgctttcttattgagaaacttctctttcacttccagcagtttgtttttcttaatcacttccgcttctgtctctgcttctttcaggacattatcatatttggcctttagtccgtatttaaacaatacgtacgataagattcctcctacgatgaagcatgcaatggatgctactattgttactaacattgtaatttaatttaaatataaataaaaacgcactgccaaatacccgagagcttcctctttcgggcatctttagcagtgcgtggattttctttataaaaatggaaacagttattcctcgttcctgaaatactcttccagcatttccgtaagttcttctatcttggccgtatacggttgggtatcattacgttgcagcaactgtagcttctccagtgaaaactgatatgccaccataactataatcttctccggagccacgttcctgtagtgctcccgatacgcattgagcctgatatttacctgctttgccgcttctcttacggtctcttcctcatcacggttaatggtgagaggataataagaatccgctatttgcaggtttatttttattttatcgttcatacatccttttttatgttattcattcaacaaagcgatgcatttatcgacttcacgcactaatttggacaatcgcagcttcgtctcttttacgtcgctgccgttaaggctgattgtcgtagctgtttttaggtctgtgtagcttgattctaacgctttgtattcagctctcgccttttcgagttcggacttctcttcttcgagaagttgctttaactcagcattttcgcgctttaattcatcgtgcagatagattaaatgccgcagccttgcttcaaaggtacttaatagcttcttttcttcttctgtcatcactacaccaaaattgtacacaaaaatacgattaactctgatattacaaaaacttttcggcggaaaatagtcatttatagtgaaaatagttatccgggggacttcctttacctcccccgactcctaattatataaaagcccgctacaagcacaattatccaaaatcgacaaccgatttgttataaatatgcaataagagcgcaaaaaaccggatacattttcatctttttgtggctttttgttattaatttaatagaatttatatcagatagactacgatttcgaacttttattcctacatttgcgggcaaatgataacctttattaaaacgcataatcatggctaaaataaccaaagaagccgcattgctctatcattcacagggcaaacccggtaaaattgaggtggtacctaccaaaccctacagtacacaaaccgacttatctctcgcttactctcccggcgtggcagaaccatgcctcgaaatagaaaagaacccacaagatgcttataaatatacagccaaaggcaatctggtagctgttatctcaaacggtacagctgttctgggattgggtgatatcggcgctcttagcggcaaaccggtaatggaaggtaaaggtttgcttttcaaaatctatgcaggaatcgatgtattcgatatcgaagtcaatgaaaaagaccccgacaaatttatcgaagccgtcaaagccatcgcccctactttcgggggtatcaacctggaagatatcaaagcacccgaatgctttgaaatagaacgccgcctgaaagaggaactcgacattcccgtaatgcatgacgaccagcacggaacggccatcatctccagtgcgggattggtcaatgccttgcaagtagccggtaaaaagattgaagatgtaaaaatcgtagtaaacggtgcaggtgcttcggccgtatcgtgtacgaagctttatgtatcattgggcgcacgccttgaaaacattgtcatgctcgatagcaaaggtgttatcagcaaggcacgcaccgacctgaacgaacagaagcgttatttcgcaaccgaccgtaccgatattcacacactggccgaagccatcaaagatgccgacgtattcttaggactctccaaaggaaacactttgtcgcaggatatggtgcgcagcatggctccgatgcctatcgtctttgccctggcaaacccgaccccggaaatctcttacgaagacgccatggcagcccgcccggacgtattgatggcaaccggacgttcggattatcccaatcagattaataatgtaatcggtttcccgtatatcttccgcggagctctcgacacgcaagcgaaagcgatcaatgaagagatgaaaattgccgctgtacacgccattgccaatctggccaaacagcccgtacccgatgtagtgaacgaagcctaccatgtgaacaacttcaccttcggtccggaatattttattccgaaaccggtagatccccgcctgatcacggaagtatccatcgccgtggcccgtgccgctatggagagtggtgttgcccgtaagaatatagagaactgggatgattataaaacacatctccgcgaattgatgggacaggaatctcagctgacccgccaactctacgacacggcccgtcgcaatccgcaacgtgtggtatttgccgaaggcggacaccccaacatgttgaaagctgctgtcgaagccaaatcggaaggaatctgccatcctattatattaggtaacgaagagcgcatcgagaaactggccaaagaactcgacctgagcctggacggaatcgaaatcatcaacctccgccacgaccgtgaagcggaacgccgtgagcgctatgcacacatcctctctcagaagcgtgcccgcgaaggtgctacatacgaagaggccaacgacaagatgttcgagcgcaactacttcggtatgatgatggttgaaaccggagacgcagacgctttcatcaccggactgtacaccaaatacagcaataccatcaaagtagcgaaagaagttatcggcatccgtccggaatacaaacatttcggaaccatgcacatcctgaactccaaaaagggaacttacttcctggctgacactttgatcaaccgtcatccggatacttccactttgatagatatagccaaactggccgatcaaactgtcagattcttcaatcatactccggtgatctccatgctgagctattccaacttcggttccgaccaggcaggaagcccgctgaaggtacacgaggcagtggcctatatgcaacaggaatatcccgaactggcaattgacggtgaaatgcaggtgaacttcgccatgaaccgcgagctccgtgactctaagtaccctttcacccgcctcaacggcaaggatgtcaatacattggtattccccaacctgagttctgccaacgcaggatatcagctgctgcaagccatggacccggataccgaattcatcggcccgatccagatgggactgaacaaacctatccactttacggatatagaaagctcggtacgcgacatcgtaaacatcacagccgtggctgtgatcgacgctattgtagaaaagaaaaaagctaataaatgaaacggccattatccaaatcacaaatagtttgtatcattctgctttgggtggcgctttgttacatagtattggtatacgccgaacgtattgacggtcctaccatacttatgcttatcatttcggcagcattagtgtttattcccgtctataaatcacttaaaaagaataaataatatctttttattccttttttgcggcataaaatatcaattttgatgttttatgccgtttttctttataaaatgcttgctagttcgatttttatgtttacttttgcaacgtcatcaacagagacgatagaatttaaaaacaatcatattaaaaagaaaaaagaattatgaatgcagctaaggtattagaagatttgaagagaaggttccccaacgaaccggagtatcatcaggcagtagaagaagttctttctaccattgaagaagaatacaacaaacatcctgaattcgacaaggccaatctgattgaacgtctttgcattccagacagagtataccagttccgtgtaacttgggtagacgataaaggcaacgtgcagaccaacatgggttaccgtgttcagcacaacaacgccatcggcccgtacaaaggaggtatccgcttccatgcttctgtaaaccttggtattctgaaattccttgctttcgaacaaacatttaaaaactcgctgaccacattgcctatgggtggcggtaaaggtggatcggacttctctccacgcggaaagtcaaatgccgaagtaatgcgtttcactcaagccttcatgctcgaactgtggcgccacatcggtcctgaaaccgacgtaccggccggtgacatcggtgtaggtggccgcgaagtaggcttcatgttcggtatgtacaagaagttatctcacgaatttaccggaacattcaccggtaagggacgcgaattcggcggttcactgatccgtccggaagctacaggttacggtaacatctacttcctgatggaaatgctgaaaaccaaaggaaccgacctgaaaggtaaagtatgcctgatctccggttcgggtaacgtggctcagtacactgccgaaaaagtattggaactcggtggtaaagtagttaccatgtccgactccgatggttacatctacgatccggacggaatcgaccgtgccaaactggattacatcatggagttgaagaacctctatcgtggacgtatccgcgaatatgccgaaacttatggttgtaaatatgttgaaggagcccgtccctggggtgaaaagggtgatatcgcactgccttcagccactcagaacgaacttaacggcgacgatgcacgcaagttggttgccaacggggtgatagccgtatcggaaggtgctaacatgccttctacacctgaagccatcaaagtgttccaggatgctaagatcttgtacgctccgggtaaagcagccaatgcaggcggtgtatctgtgtcaggattggaaatgactcaaaactctatcaaactgagctggagttcggaagaggtggatgaaaaactgaagagcatcatgaagaacattcacgaagcttgcgtacagtacggtaccgaaccggacggatacgtaaactatgtgaagggtgctaacgttgccggattcatgaaagtagccaaagcaatgatggcacaaggaatcgtataatcagcaaagaatccaataatgtcatagtaaaagaaagcccgtttctcctaaaaggaggacgggctttcattttaaacaatccacactacttctttacaataacctccggttcgaaactctccctatcgaactgctttcacacatatgtccccccctttcatacctccgcaaccaatcaggcagagccatccggcgttgcgagtacaactatccctcttctggttgcaaccatacgaaaatacgaatagaaaacggcttgacaggcattaccaactatattgaagagccagtagtacttttttaattcccttcacgcgtccaccattttaccgacctccgtccggtactcccaacgtcaccggaatatgtctccccattcagttcccaccgatattccgccaaccgttcagtcacaaaaaataatattaacaggcggttcaaacagatgccttatcagtttgctataaaagaagttgccggcatcacaaaaataaaaacaatcgtttcaatctttcataaaactaaaaagaggtctctttttttaatctattaaaaatttgcttgtttgttttaaaccatttacttttggaattttaaaaaccaaagccttatttttgaaaaaatcacaatcagccttatattctactaaatgattttaaataacgagtctaataagaagaagaaatttgagcaatttttcattatgacttatcccaaagtcaaagcgtttgcatggaaattgttgaagtcagaagaagatgcagaggatatagcccaggatatattcgcaaaactatggactaatcctgagatttgggaaaatcaggaaacttggaacagctacatatatactatggtccgcaaccatatctataactttctaaaacataaatcaatccggcagacctatcaggagcaatgcacaaaagaggagccggctatatccgaaactgacattcacgatcaactttatgctaaggaaagtgaacttctgataaaacttacgattgccaatatgcccgaacagaggaggaaaatcttccgaatgagccggacacaggaaaaaagtaatcaggaaatcgccgacgagctggatatttcgatccgcactgtagagcgccacatctatttggcactaatcgatttaaaaaaagtactcctcaccctattttttttctatctcggttgagtaatcagtcacacctaattgtcttatctatataaaggctataaaaatgaagaattatattcagagaatcatccgtttgtttgccacctccgaccccgacccaaagctcaccggagagatccaccgatggctgctcgatcaggagcatgccggggaaaaggagacggcactgcacgatttatggaacgaaacggaaggaaaggtggacaggactacctgggattctcttgcatcggtatataccaaagtcggagacaactccggggacagacatcagccacgtatccgtttcgcacattatgcggctgccatagcgttgctgatcgtatcagtttcggtcacttttcaaatgaccaaacagcactttgccgaagctccccttattgaaaacataacaccggacggacgactgagcagccttcgtcttccggacggcagcatagtacaaaccaactcgggcagtatcttgctctaccccgaaaagtttaaaggtgaaacccgcacagtttacctaatcggtgaggccaacttcaaagtaaagaaaaactccggtcagccattcattgtcagatcgggtaccatgtcggtgacagccttgggcactgagttcaatgtcgctgcttatccggaagagaacgaaatgattgcaactttgatccatggaaaaataaaagtggaatgcgacaatgggaaagagagttatatcgtcactcccggacaacaggtcacttatcgtaaaagtacgggagaaagccggctcgccgaagcaaacatcgaagacgtaacagcctggcaaaaagggatgtacgtattcagaggcgtcaccatgtcagaaatcctgaacgagctggaaagacgctatgcagtcaccttccagtataacgccaatttatttaatgatgataaattcaacttccgttttcgtgaaaaatccactttggaagatatcctgaacattatgcaggaagttgtgggaggattcagtcatgaactgaagggaaatatatgttatataaaaccggagacaaaaaaataaaatgatttaatatattgatttgtttaaccttaaaaacaattgtttagtatgtaaaaaagtatccggaaagaggcggccacctgattccggatatgaaatctgaattctttgcgttaaagcttatgctttactttttgggaaataaatattatgatttaacactaaaattcgttcaaatctatgaatttttatcgattaaagtctattttttttataatttttagctgttttattctacaaacggctgcctttgctcaaaacaacgtaaaaataacaatcaagaaaaagaatatcacgttgcaggaagcattgcgggaggttgagaaacaatctgattatctgatcgctttcaacgaatccaaacttgagaaaaccaagcgcgttaacctgaatattaatgctgaatctctggataagacactggcttctatcctgtccggaacggggctttcctacaaaatcaaagacaaatatatcatgattattccgcaatcaaaagtggaagtcgaaagcaaaaaactgtcggggatagtgaaagatgacaaaggagatcccttgatcggagtcaacgtctccttcaaaggcagccccacaggaaccgtcaccggtcttgacggacgattttccattctggctgccaaaggaaatatcattgaattctcctacgtaggctataccacccaatatattacagtgggcgatgcttcttcgctaactgtcgtattggaagaagacgccaaggcactggacgaagtagttgttaccgcactgggtatcaaacgtgcggaaaaggcattgagttatagtgttcagcaggtaaaatcggatgctatcaacgatgtgaaagatgccaacttcgtgaacggattgaccgggaaagttgcaggtgtatccatcaaccggagttcctcgggcatcggcggggcgacccgtgttgtcatgcgcggagccaagtctatcgtaggaaacaataatgtgctctacgtagtggacggtatgcctatcggcaacccttcaaaaggcgaaatcaacaatgactatagcactccgggaggaggtgaaggcatttccgacttcaacccggaggacatcgaaagtttatcgatactgacaggtccggccgccgcagccctgtatggttcatcggcagccaacggtgttatcctgattaacaccaagaaagggcaggaaggcaaactgaaaatctcgatctccaacaatacggagtttatgaccccgtatgtaatgccggaatttcaaaatcgatacggtaatgcaaaaggatcatacaagagttggggtgagatgctgcaacagccttcaacgttccgcccgaaagacttcttcaagacaggagccaatatcatgaatgccgccaatttttcagtaggaaacaaaaataatcaaacgttcgtatcggtggcaacaacaaactccaccggcatcattcccaacaacgaatactatcgttacaacttcacattacgcaacaccgcgagtatgctgaatgacaaactccatctcgacctgggagccagttatgttctgcagggagaccagaatatgctgtcggcagggcgttactttaatccgctggtacctctgtatctctttccgcggggtgaagatttcgaagcagtcaaagtgtacgagcgctatgacaccaaccgaaaattccccatacaggaatggtcttatggcgatcagggcctgaatctggaaaacccgtactggattgtgaaccgcgaaatgtttgtttccaaaaagaaacgttacatgttttatgccaatgtaaaatacgatattctcagttggctgaacatagcaggacgtatacgtgtggataacaccaacactacttccgagcgcaaattacacgcttcgacaatcaagctgcatgcccaatcggacaaaggagcctacaaccggagcatggaagaatatcagcagacctatgcggatattatgctgaatgtgaacaagaatttcggtaacttcaacctgacggcaaatgccggattcagttatgaagatcacctgaccaccggcatgggcatcggaggaaaactgtttaccgtccccaacctgttctctgcctataacttcgatccggcttccggacccggttcgcaatcgcacacccatacacgtaacaattcggtctttgtaagcaccgagctgggatataagagcatgctttacctcacacttaccggacgacaggaatgggcttcccagttagtcaactctgaccagcccacctatttctatccttctgtcggagtgtcgggcgtaatctctgagatggtaagtctgcctaaatttatttcattctggaagatgagagcttccttcgccgaagtaggaggaccgatcaactataccggattgactcccggaactgtcaccgatcccatgaaaggcggagtcatcaatccgatatctgtctatcctttcccgaacttcaaagcagaacaaaccaaatcgtatgagttgggaactaacctgagacttttcaacaacaaaatcaatatcgatgccacggtgtacctgacagatacctacaaccagaccttcctttccagcatgtctcctgcttcgggatactcgggcttctatgtacaggcgggtaaagtgcgcaacaaaggtatcgaactgtcattaggctataacgaccggttcggaaaagtgggatatgccaccaatctgacttatacagccaaccgaaataaaatcatgaagatggtgcatgactataagaacccttcggacggttcgctgttcagcatcactgaactgaccctgcaagataagggaggagtttacctgcgggaaaaggacgccatcggagacgtatatgtaaaaggcatccttgccaggggcaaagacggtaaactgatcgaagaagaaggaggatataaagtagaccgctcacaacgcatcaagataggatcggtcaatccggacttctcgatcggctggagacacaatgtcacctggaacaacattactctggacctgctgttcaacggacgtttcggaggtattgtcacctcttccacccaagcattccttgacgactacggtgtatcgaaagacacttataaagcgcgtcagaacggtggtgtatgggtgaacggaacccaatacgacgcggaaaaatattatacgaccatcggcggcgaacaactgatggcatattatgcatacaaagcaaccaatatccgtcttcaagaagccagcctgagctataccctaccgggcaaatggttcggaaatgtgatcaaccggctgacagtttccgccatcgggcgcaatttgtggatgatctataataaagccccattcgatccggaaatgacctcttcgacaggtacctataaccggggagatgtctttatgccacccagtttgcgtagtgtgggatttagcgtgaagattgaattataacctttaaaaaatgcaacactatgaaattaaataaagtaaagaatatgtggagaattctatcggtcatagccctcttgggttcaacactatgcacctcgtgtatatccgaagatatcaaccggaacccgttgctcccgacgaaagaagatgaaaagatggacggagttatttacggagcctacctgcccaatcttgaaaaaagtgtaatccccatcggcaccgcctcagaaagtacagaaccggtaaaccgctatcagatcggagtaaatctagccggtgacgcctgggcgggatacatgtctccccgagacaacaaattcaacggcagcaagaatttcaccaactatttcatgtacgaaaactgggtgaactatgtgtattcttttatggtgacggatgtatattcgccatggatgcagataaaacgcatctcgcaggatgaagggacaagaaatgacgagatttatgccctagcccagatcatcaagatcgcggcactgcaccgcactacggatatgttcggcccgattccctactcacaagtgggcaaaggttcttttaaagtggcatacgactctcaggaaagcgtataccgctcttttctgaaagaactggaagaggctgtccaaaccctggacgattactcgaataagagcaaagaagtattgcctgccttcgacattgtttataatggcgatgtcaataaatggatgcgctttgccaattcgctgatgctccgcctggccatccgtgtccgttttgccgatgcgggactcgccaaagaatatgcggagaaagccgtgaagcatcccgcaggcctgatcgacagtaaagaactggcagcccagatgggtaaaggagccggcctgcagatgaagaatccgctgaaagtgatcaacgaagaatacaatgacacccgtatgggggccaccatctattcttacctggcaggatacaatgacgcccgtgctgccgtatactttgtcaaaaacaatggtttcaaagccgtacgttgcgggatcgccaagtccggagacgcctataacggattcacacgcccgaacgtgcatgaagacgaccctctctattggatgaaagcatccgaagtatgcttcttgaaagccgaaggggcactggccggattcgatatgggcggcagtgccggcgacttctacaacgcaggcatccgcatgtcgttcagtgagaatggactggacaattcgtcggccgaaacctatctgaaagactccacccgcaaaccggccaactacaccgatacctccaacggcgagttgagcgccaatgctccgagcagcatcaccatccgttgggaaaacggagctacggaagaagaaaagctggaacgtatcatcactcaaaaatatctcgccatcttccccaacggacaagaggcatggaccgagtggagacgtaccggatatccccgccaaatagtcgttgccgaaaataaaacgaactccgcagtattgatcggaaacggatacgacctgggaggcgtaaggagactgccctatccccgcaccgaatatgaacaaaacggcgaaaacctccacaacgccatcagccagtatttgggaggagtagacaatgctgccaccaaagtatggtgggacaaaaaaagcaaatagtaatgaacctgaaaattaaagaaacatgaatatgagaaataccatttttacatttatcggagtagcattgttggtaggcttcgtcgcatgcgatgactggacctcaccggagaaactcgatgtagaaaacgaagcagtgggtgacctttactccaaacgcgactccatcaagtgggccgaagaagaaaaaaggcataaagagaacgaagctgcctacgaaaaatacctggagaacctgagagcttacaaaagcaccaagcaccccattatgttcgggtggttcaatgcctggcaaccggacggagcgggaaaatatccccgcctgtctcttttgccggacagcatggatgttgtttcgatatggggaaactggcactctctgagcgaagaaaaaatcaaagagttgcggagcgtacaggccaaaggaaccaaagtcattatcggctggattatagaagatataggcgaccagataaaatggggacgcgaccaatggcccgccgatgatactcaagccatcaaagagtatgcgcaagccatcgtagacacaatcaacaaatacggctacgacggattcgattatgactatgagccgtcatacgcatcaccgttcaagccgggcaatcattgcggcaatttgacttcttgctcacgcgattataataaagagaaagaaatcttgtttatgaagaccatgcgcgagctgctgggcccggacaaactgtttcatctgaacggctctatccattggctggacccgcgtgcggcacagtatttcgaccgttttgtcgttcaatcttacaacggatcggcttccagttttgagagatggaccaatgatatccaaaaccggttgaatatcaaacccgaacagctcgtatttacggaaagctttcagaacaagcccggtgcacgaagcagattcccgggtacatacgccggttacgtggcttccaaacaaggcaatgtgggaggaatcggagtctttcatattaatgaagacgcatttgaagacgaagcctatgttaacatcagaaaggccatctctatcatgaatcctcccgtaaaataattaacctaaaaacagtttgaaacatgaaatgtaacgtatcttacaaatatctgtttattgcgatcggcatactttgcccgctcttttccgcctgtgactatgccgacggagaaggttcaggctcggaaaacgcagtatacatggaaacacccgataataaaggcatcgtcaacttcactttagagcccgatggcggaataacctatctgacaccccgactggccaatatcagccaaagcccggtgactatacaagtgggttatgacaaagaggccttggataaatacaacaaggacaacggggcctcgtatgaaccccttcccccctccgcttttaaactggcagatgcagagggaaacgagctatccgcctccgaaggcatacgagtacccgccggtgacttttcagcaaaaataatggtgaaagtaggacaactgaattccaaggatttccccgccaataagaaatatgcaattcctcttagtatcacgggggcttccaactattcgctgattccctcacaacgcagcgcgatcttgctcctgaatcgttccatcctttcgtcggtagccaaagtcagcggtggagaaggcatccggataaaacctgtcggaatgcacacaaaggccgaatggaccattcaaatgagcgccatctattccagcctgacccgaagcaacctgaccacagcctatctaagcaacggaacaggaggagaattctatacccgcatttcatctactgccggcatacaagtgaaaaacggacgcgacggggacgacacatggactcaaatacccctgcaagcgggtaaatggctgcatatcacctatgtgcacaaggataagaaaacgacagtctatgtcaacggaaaggtccagaaggtctttgagaacagtgccatcacctttggcgagaacagcatgatcgtagtcggaaactccggttaccgtaacgactatcttcgcgagatacgtttatgggacaaggcgctgacagagtcggaaatcaacgattacttatacctcccgatggaccctgcaaccccgcatctcatttcgtatctgccactgagcaaagagatggagaccaaagacctgaaagcccccgccggtacggagaatgtaaccacgaaagcccgcattgaatatgtggaaaacgttaaattcccggcagatgaattagtaattgtaaatcaagaataaaaaggaattcaaaatgaaaagaagaataaaatccgcccaaagcattttatgggttctattactcattttgtcagcatcgtgcagtaaagacgaaatacagatcgtagatcaggatacaagttggcaaatggacaataagtatatcgaagaagatatccgtgagcaactcggcatcgatccgttcacagatctggtgtacctgggatattacggcaatccttatacacagttggaggcaatcaacgacctggtaaataccacactggtgggaaagaacgaactttcgttcaaagtaaaagtgacgaaaccttacaaagaagatatcaaagtcaatcttatgaaagaagacaaactggtaaccgattttccagagatggcggagggaatacctctttttccgagcgaaaactgcacctttgaaggcggtgtgctgaaagccggcgaactggaaacaacggtgaaactaacgattaaggatgttgagaagttaaacaacctatcgggttatgtgatggccataaagctgacgatggaaggatcgcatgaacatttggccatcgcccgaacccgctcggcatactttgtgaaactaaatctttctatacgcctggacaatatcgattcaagcaataaaaagatcgaaggaaaaggattcaacaaagaaatcagttttaaatcggacatacgcccggataaattaggttcgttaaacgatggcaacttcacagccaacaactggtatacctccaacgcgaacaattatctgacgataattctaccggaaaaacaatcgctcaaagggttcaggctggacaccaacacctctccaagcggctcgtatatgctcaaatcctgtagagtgatggttgaaacaccggatgggaattgggtgaaccatggagtattcgaccgcaagagtatggatggaattgcttatataagctttaaaaaaccggtggaatgtactaaagtgcgtttcgagaatatgatggccttcaatggcagattttccgttgatgtaaatgaagtcacagctttccggtaaagcaagatttcattactttttattcacgccgtgaaggggcgggactgttatttcataagtcccgccccttccttaaaaccatgtgacagcacattaatatacaaacaagtgaagcagtacccttctccatgttatgtctctgaacgcatttcatattccttactatctttagtgaaaatggtctgccattgatccggcctgatcgtccggctgagatagttctccttcgggaacagcctcagctacctcacgttcgataatctcctcgatccgttttctgtttttgcgcaacagatcataaatctcattttcatcaaagctgtcctcaaatataatgggatatttttccacatcttcgctgtcaccagcacaaacaagaatacgcagttcgctacaatgaccgtaagatattatggcactgtattcttttaaaagttcagccagtttggtgaggaaatcaagttctttagttgtcagtagtccgatcatagtgtgtaatagtattgttgttatttcaatagctgtaaaataagcgtaaaacagttgattctgcaagcatatacgtattccttatattctatttttaagcaaagtaatattcattttattcatcttattccattttttcgtatatttgcttcgaacggaacattttaacggaaatcgttgttcaaaaagcaaaaagaacatggaaacagaagaagaaatacagaatgtaaatgtccatcacggacataacataaggcgcacccggatcgagaaaaacatcaagcaggacgcattggcagcactcgtaaacatgacacaaccgaatgtatccaaatacgagaagatgcgggtgattgaggatgaaatgctaaatagattcgcaagggcactgaatgtgccggtagaatatctgaaaacgctggaagaggatgcaccttctgtggtatttgagaatatcacaaataatgtgcatgacaataaagacagctcaatgggatctacaggatataacaacgatagtataactaacacttttaatccgattgataaaatcaccgaactctacgagcgtcttctcaaagagaaagatgaaaaatatgctgcgcttgaaaaacggattcaaggtctggaacagcaaaataacaacggaaagtaattccgcaaacatatctctccatataaatgggtatagccatccgatgcttagggtgtagccctaccggggttagggtgtagctatcggtcccggatggctacaccctacttattatgtgcaagtttcatcgggacgggcatccctcacccgtttctccggacaaatcttcgatccgggtatattccacatgacattgcatacatgtatctgtttccgctaacacatcattaaatacataaaaaagcaatggaatatgcctggtgtatccaatcagaaacttctgccggcatgtggtctggaaagaaaaaaagagttttaatcagtttataactatatctggcgggcagctctgtcccttccccatccaaatccagaaaagagcgaattattcctctttttcaccaataagagaagggttttggtcgctatttgcaaactctcaatcaaatttcactcaattctattattccactaataaaataccaattaataggtatttttctgacaagaaaaaacttgtaaatttgcataaactgaactaattttaattatgaaaaaattttattccctttgtttgtcgctcgtacttgttgtctcatcccccaaagaaggacaatagaatcgttgaatgccgtgtattaacaagtgagcatatctaagcccttcgtaacgaaagcatttttgttaaatcccatttatagtataacggagaatgtttatatccgtcattaagaatatatttaatttaaaccgataagaataatgaaaaaattaagaattacgtggttgtgcctgatattggctggaatactactaggtgtatcatcatgttctaacgatgcagaggagttacaaggtaagctcgttataacattcgccaaaccgacaaagggactcaaagttgctatttgttcgatggagaatactaagtaccccattttagtagaatccccgaatgttaatggagtattgaaagtatcgttgaatatagggaattattatataaaaccctctgatgattcttctgatatgtattcggacatcggaatacaggttagaccggataaaacaacaacagtgacatatggcgaatctcgtcaggtcattggaagagaatgattataatatttaaacccagaatggttttgacagattcagcttgaacctgtcaaaaccatcttttaataaggaaagaagatatcccagacctttaatatgaagtggtaatatgtttctgcgctttattaaaaacatgaaatttctaaccagcaataaaagtataacttcctctaatctgcaaggacgactacaataccggaacatggttatctggatatattagacttactgacatagggttgtcatagaaagtgtgagagcaaatgtcaaagtgccaaaatgtcaaaatgataatccaatggctctatatcccgttctttcgggcacgtctctgatgaagttcggaaaaacggctcacagacgattccccgattatcatttcaacaggtcattcagctgcttccttatcaaatagaaacaataaaggagtattatccgccgtaatctctttgttagagtaaaacaccattcctttacacacttcggacaggatactttcctgcgagcaacgggaagaaaatccgtgctcttatcgcccgatttgcataacaatatatgtaatctgccaaaacattaggagatatttaaaaaagaagtaagcaaattaggaaaatgtaaccgtctttcaaggcaaatgcttacttgttttgaggtaaatgcttacttgttttgaggtaaatgcttacttgttttccggaaaagcaaggctctaccgactcaaaagagcggttcttcgccaaagaaaccagccatttctcacttctaccgtcctagttaatccggagaaagaaaagtacgagtctgtaaaaagaagaattttattgctttttatctgtattacagcagaaacgatataattttgatattccccttctacatcatcagatttatatcttttcagcaatagtgtatacgtctcttacttaaaaataatttctctaaccagattcaaacgaataccgtttttctgataaaatgatgtcattttgtccttatagctgaccctaaagttaggatgccttttattacatacaaatgcacgcttatatttatatctcgataaatcgtggttagccttgaaatgatcaatggtagtttgtaattgttcgtccaccgcatgaaagatccaatcggctgcttgtactttcagttcaacgaaaacaatattgtcatcattggttaacatggcatcacaacgaaagtccattgttccgtcacttcgattcatctctacgcaattatcgactgctgtaaagttgatagattgattcgtttggttctttaccacagcaacccatttatccggttgattcctatctacataagcaggggtctttttttcttcgtcttcatcatcgcaaatgccaaattccttatcaacgatgttctctgtctgacactttgctataaaaaaatcaatggacatagtcacttagtttttataatcaaactcttgttctatttcaagtaactgatcgaacaattcattagtcactcccaattggatattcaaaaagttctcgtcagaaggcaagccctcgtaagtacttaacctaaatactcctccgtctttcagttcgtaaatccggagtcgcgccggatctatcgcactgtccgcaggaactacctcttttattctctcttgcaaagtttcatttgcagatactttttgagtcagcaaaaaagcttttgcggctaaagtgagataattgatgacataaggactatgcgtagtaagcacaaggcggttcaactctatcttattggcataacttaataaatcgaaaagtacacttcgctgtgactccggatagagattcagttccatctcttcaacaatgttcacaaagcaggaatatttgaaccgggatgagatattgcgcaacatagcgaactttaccccatccgtaagtgatttatcattcataactttattcacttccttttcaatctgcttcttctctttaatgctcaagtcctctttattggcattgtccagcactaggtcggataggaatctggtaattaaagaaagaggtaaaacagactgataaccactggaagctgccgacaaacgaatcttgtaatcgctgcctttaatccacgatatcttattgagtgcgtcatattcaaaatcagtgtcattgaatggaagccgatatccggttttgaatgcctccttagccttatcaaactcttcaagcagggtttctaaagattccggcagacttttcaatccatccgtatcatcggctgtactcaaaaaatttcgttcagctggaacatacattaccttcgctaccttataagactccggaagtcctttggcttcgacatgaaacttttcattttcatagaagaagttataatgtaatccataaaaatggataaccgtttctctcttaaagtatgattccaaacggtgataggcacaatatattttctggaatcgtgaatattgggtaatgtatttttcactggtgatacggcgtgccagccctttctccaaccacgtaaacatggagtataatttggcaatggtactttttcccgatccctgttttcctatcaaaaccgtatatttgtcgaacacgacatccgcctcggatataggtccaaactgatatacagtaagattaactgtttcattcataaataaacccctattgatatttacattcaaatatactacaaaaatacattattaacccgttttctcacaaaagttaataaaataagatcgggcagccgcacaatcgtcgtttgatcgaagaccggcaacgaaggtaaatatgaatcaatagcagatataacacactccagaaagctcctaccctataataaaactttgcgtgcaaactattaactgtttatcgctaaaccattaaccgtttgcacgcaaagagtcatttttgggtagtggtcttaatgcccctattctttttttgatgttcctttactttgtcctcagacatcagatgcctgttcttttcatattcttcatggatctgcacttcccggctctccatgtccttcttcaattgcctgtctctattcatactttctacgttttaaagattggcaatatgacaaatccggaagaagaaagtttggaggtttaaggaagtttaggagtagccggactgcttttcatcgaccttccttactgaaccaggccgatccggactttataatttccggaagtaagttccgctcccgattcctgaaggatggaacgagcttcggaggtcatcacttctccatcagcattggtggcggtaagtgtataacttaaatgggttccaccggtcgggacattaaaataaagaaagtctgtcacattacctgtcaggcttgcctgacgtcctgcaggactacttacggtaatggagaagtctgtaaagtttgccataaattcatccgaatactcaacaccaaccccgatattaacttggggcgctttcaccgaaatcagagtaacatcctccgatacaatagcgaaaggatagtcgacgctgtagatgggtgtacccgattcattgtccggcgcctcggtctgatcgggagtaaaggccttcagggtatattcaccaaccggaagaacgatccttttggaaagttccgctgctcccggatcataactacgtacacactcagaaccttgccagatctcaagcttaagtccggcatcgacggcacgagtaatgggcagcgtttcggtatcacaactgaggatgatattttctacacggagataaccgacggaatgatcgggagcagtttgctcgctacaggaagccgtagcaagcaagaggagaaagaggtatatataggttttcatatttatttgtcgtaatgtaaagtgaatgaatcgagccagaactgtgaacctatgatataagcatcaccatatggaacttttgcatccctaaacttatcttccaagtgatcacgatcttctttagtaccggccttaaatataatcttcacatgagagatcggtaagtttctatgttcattattatactcaaaattcaaggtttgagtttgataggatgaatatgcagtaccggatttcaaataagctttgccaattatggtttctacttctcctgtaatattttccaaataggcttcaatcaaatactcatcatctttatatggagcagctttgtacacaaaactcatagacgttggacgaatataagccgctttaccattaactacatctccagcagcctcataatctcctacgcaaacgatacccgcactgatatgattaataacactatttccaagccaataatctttattaccgaaagaacaagtgtttcctgctccccaccctaatgtcatcatatgagcaacattacgttcaccatcaactaccggaagcgtacttgatttagatacatagaatgcgttagctccatcagtatgacaggtcaaaggatttcgcgtaccaatccaatcgcctttaaatgtgtataatggattctcactcttgggatatgtaacatcatatccagcattaaaatcagaattgggtatggatagcgcctcatacgttttcacctccactttctctcccggcacttctcccctatacttcgctctcacataataagaggttcccggactcagccctgcctttcgcaaatctccgggcatcgcctcccaactattaccatcggcactaaattcgtaagcaatatcggtaaacttatctaaattgccggttttcacgctatcggcagtgagtgtgttcaaagtaaactctttcgtccaaacattgcctggataataacccactttaaagacaggtttcacagtccggatggtatacataccggcatcactccaacggtcatttgcttttacccgaacggctattatattatccgtatcctgtcctccatcgtgagtcagcatgccggaagttactccggcaaagtcgataactccctcagtacttcctgcagtcagatcgggcaagacaatattcacagcagccaaagcccgccgatcttcttcggaaagttccgacagcagatacgtcttattcagatgttccaaatgcttatccgcaaagttaaaggcaaactccacatcctgaaccggacgcaaagctgtatacgcaatgccggctctcgacaaagcatctgccgtctcggtataagtcaacacatgattttcatcgaaatcctcactaaataccttagccttcggcaaccagctgtcgggtacggtttcgttgatagtaataggttcctgttgagtttccgtagtgacctctagacttacattggaagccttcatggagagcttataattatacttaacacccgctttcactgtctcgatcggattcaaagcataacttccctcctgccctgtctctacagaagtaccgatcaatgccattgtcacccggcctccggctttaaagtagggatgtgtggcgtctcccggtttccaagtaaccgactccccccctgcgctgacttccacataataatctttcagacgtttatcaaagacctcttgattcacaatctcaaaagtagccagcgcattggctaccttacagccgacagtaaccgtcgttgctttacccttctcgatggcaatgtcttgaacttctccataataatagggtgcatccaatgccagtgacggattctctccaagataagccttcagttgataactgcctaccttgaataccctttgatctccgaaatctctcaatgcacctttgtattcgggcacgattgtcccttctctgtcacgcagcaactcaatcgtgaactgttgccgcaattcatctgacaaagcctccggcaaagtccgggtaaccgccgcttcatccgtcaatacgatattcaaactgccgttaggcatcgtttctatttcttcctgacacgacaggaaaaagaacaaacaacacactaaagataaaacagatttatgcatagctctctttcttattcatacaataattcaaattcatcgacccacagttcactgcctacacctaccgaaccggtcaccttcatcccggtaaagtcaccgccataatggctcgaagtggcaacaatcgttatcttggcaggcttcgccgttttattggtataagtcacatcgaaccggaactgagtatattgggtcaccgtctcttttccgatgaactctccgtaaccgatctcgttatctttatcgtcccacagacggagatagatatggcattcatcatttttcagattatccggattaccgacataatccaccggtttagaagtatatttataccaccccttcaatccggtgggacgtgcccccgtaaacgaacgtccaaacttaggactatccttgggactttgggcattcgttttataatcaccgataaacagattgccggcagccacccctaccagcggcacactacctaaagtgaccatataagccgcctttccgttcacaacgctcttttcttccgggcgggtactcgaatcacggctgcccgccagtgaagaggtcactccatcatttccggttgcccagaaagaatttgagccatcggcattaggataccaactcttcttaaaggttcctgtgggattctgcgaccaggtatcgaagtttaagttaggtatttcctgtatcttttcggtagtaaatccggattccgtactaggaacttcctcgaccactacccgccaaacgtaatcggtaccatcttgcaatccggtcagtgtcgtactgaaagttgtaccactttccagtttcacatctgtttcgggtacaacggtccaggtatcttccgacttcttcctgtattccacacggggagtggttccttgcttcatacccccgttcaatgtggctcttgtagcccacacatcggcacttcccgtggtacctgtcgatgtggtacgtaccacatcaaccgtccatagctcttctttatcgaaacggttgacaacaaactcctgcggtctcctgaaattggttacagtggacggatcgggagtgatggtagccttactgcctcccagaatcatctttgttatcttgacagcagacaaatcctgtttctgcgagacatacaccaataccgtgtgattcttatcatcgatgatggcaggtaaggcctggttctcgacttcgactactctctcgattgtctgcttaacggttatcatccactgataatcctgataagtacgcaacagaacaggaacggtcttactgaaatcgacccgtgtatctgctcctgccggcaagtcggctaaagcagaaaagccggccgaaggaaatttattggggctgacgcagtattgttcgtctacgctgtaagtggcctcttcgttcacaacgaacctggtaatacgtaattcttctatatcgacttcatcacccacttccactacgatggtgcggctgttcttgtttatctcggcatcaccggtctgcccttctacttcgaaagctgtaatttcgcctttgatgtaagggtaaggaatgtcattctgtatgcaagcacccagagcaaagaccgacagaaacaggaatagataaatttgtaaactcttcatttctcaaaacactgcttaagttagaaatacatcgtcattccgagattaatcgagaataagtctatcttaaaattaccacttgcactatgacgggacgccttgtttacctgattgtgtatctgatcgacccatttataactgaatcccatcactcctaccgaaacttctaccgaagcaaaatcggatacgaatgctgccaatccgggagccgcaccgatctcaaacgtgtgagaacgctgatagtatcccgtcaagtcattacccgtaccattggaatgtttcccctgcccgtaagcataagtcagacgcacttcattgaagaaaccgaacactttactgctgcccagccccatataggtacgcagaaatccggatgcggagtagttatgctccagatacatatcgtctttgatgtggaacgaaagatcatcgcccagattaatgtctacgtttcctatattgaagtaggtacgggagtaggtgaacctgcctcccgctgccatattatcagcaaaaaagtatcctccgaaagggctcaaacggaatgtataacctttggcatcgatgtttgccaataccaaaaactgatattgatcagcactctgctccgaatacgaaactgtagaacccataaaccattgccctttcgggacaaacacactcttcacgattccacggtcaaacttcttctttgcctggaccagtaccggacaaagaagaagtagaaatatgattatttttttcattcgctatggattagttggcggtaacaggtgtaccgtacaccaattcaaaatcatcaatcaacatgacactgctttcactgccggtaaagaagtcaccatatttacttgcagaagcaacgacgataatatatttgggtttacgggtcaaatcacggtatttcaaatcaatcgtaaactgcttccagactacatttccgctttcatcgaaagaacctttagactcttcatcggtaatggaaccgtaagctataacatctttattggcttcagaaagatcaaccgtataacgcgtaggactgccttctttgttattgttgacttcataagccgtcttcactccattatcatcaaccaaaccttcattgtcagtcaaggcaatatagatagcacatttatcaccacccgagtttttcaattcctccacattatgatctccacgatctatactggttccacgagtgtatttgtaccatcccttcagctgcgtaggacgtgacgtaaactcacggccgaaacgtatacgtgctcccatcgggcttgtatacgtttccatataacgcccgatatagatgttaccggcagcaaattttccgataccaaacattcccacaaattgcgaagacaatttggccgatttaccacctacggtatgtacatcgttactttctccgatacttggatttttactcatggtagctgctcccacattaccggtatcccaatacgaattctttgcagaagcctcagccgcagttcccgggaaccaagtttttccattctgattccattcatcaaaacttccattttccagttgtttctggagttcggtggtcgcagtcgttatttttccgtttactccatttattgcaaaacagaaatcatactccgtaccgggaatcagaccggttatggttgcaacaagctttccatcggcctgttcaacattggacaccgtattccaatcttccgttccggaaatgcgatacttacactctttggtaacgacgccgtcaggaagaggaagagttacgtctgcaaaatcagaccagacatttacactcggattactttctttaggaatggctatattcacattatactctttggtagaaggatctaaggtgactgataccccaccaatagcaccattggccttcatagtatagttaatacgatagtgctgacgttcttttacatctgtaatcggttcggattcaaaaacaaaagaacgcccatccgtatttgtcaatgccaacgaaatattcaacttatccaccgcaaaatacccggagcgtgtctcgtccttaccaaaaaccagcttaccggaagaattacccacagaacagttcagtttcgaaaaatacttcttcacatcagcactgtaattgactgtcactttcacattggccaaacggcactctatgttaacactctgatttactttcggaacaaccgttacttcactttgcccccagtaataaggctcgtcaaatccggctgtccctacatcaaccccttttgagaaagcattaatggtataggaacctaatggcaattcaagaggagtagatgtccagttatgccaatcatcagtctcctttacaacggtcccggctctgtcaactacctgcaaggcaatcggcaactcttctgctcttgttgccggaactaaaatcgtacttgtattcttctccacggaaaactggagaaatccggtcttaccattggaagtctcctcttgttggcatgatgccatcacaagagtaaagacagagacgaacaaatatatatatcttttcattgaaaattcaaattagtttttcaccacttttactgtcaatttcttggctaactccttaccattattatcaatcagtttaatagtaaaatagtgttgctgaagcccaaacggcgataacataggcataaaaccggatacatcaaagataaactcttttttatctttaatcggatcattcgggtcaatcaggcctataccggatccgtcttctaaactacctccaagtttatcctccaaatcaccgggattagctaagtcgaacgtttcgcccaaccccatttgagaaattaaacctataaactcgttggaatctgaagttatcgtcacaagtaaattctgaattccagccggagctttcattgtaacctgaactgttggaggattattggtatccacttctaccacttcatccgccccgataatctccggtccgtctactgtcggctgatcgggatctgttggttgatccggttcgtccggtttcgattcttcaatcagttcagtcggtactttcactgtaatgccagtttcatccatggtcaagtcaatatccaactgtatccccaacttcggatcagaaggagttacgtcgggattgttcggatcttcaccttcttctaccggtttcaccgtgacattaaaagaatcaccgccttgcagaccttctgcatcgggcttcgtcactgtataaacagtctcaatgtctctaccactgtccttctccgttactttcgctacaattttgatcgaagtagagccgtcaggaatgctgagataaatcgaacttaaatcttccttctttacataaatgactccgccgattccgtttgaaacggtgaacacgtaatcatcggcaaacatattgagaaactcttctgatatattcaaactaaccttcacagttgccgatttacaaagaacttctgccttagactccattccttgcttcacttcgatagaagaacttccttcaaaatagggagtacgcgaagcatcttgcaaaacaccgcttttagccacaatcttatagtttcctaccggaacgaccaacggcaaagcttctttcaactttgcatagctggcaaatgaacggaccacggcttcagtggcattatcaacaatctccactttataggtattcacatccagttcatcagtaagtgatgtactttcagcctttgtagtaggcgtagcctgagtcttgttcaccagatccaatgtcagaagtccctcgtcattcttcaaattatatttgccttccaattcattcttcatctcgcaggaactcaaacaaagtgctatcaatgccagcaccgcatatatgttttttatcgcattcatatataccaatctttttatatttacttacttgcattacccggccaatactcttccggaatctcgatattcacatccttatcttctgtaccggtatccactgttacgtccaacgacgccgtacccgtggaaatagtaataacttccggatcgactgtaatagtaaggtgtgttttgggagccacttttttctcagcaaccaaagcttccatcaccacctcattgccttctttatctctgaaacctcctacagtgatcgataccttctcgccatcggcatttgctttcagataagcatccttgccggaatcttttttcatattcacttcaaaaggagcagtcaggtgtgaagtagagagcgatacggtacaatccgaataatatttcagaaaatcttcggtatagacaaccgatactttgacattagccggtttgcagtacaaaataacattcttttgttcgccttcactgaccgtgaactcctgactaccttccacatatagcttgtcgaagcctgcgttcacattctcaccatagaaagcttttacggtataccccttaccggcagtcagatcaatggacaagggcatgtctttgtacaaaccattgtataaagaggcaccgtcggcatccttgaccgtcacttgataattatcggcttttttatattccgcttcgttgacggaacgggttttcgtggaaaaagaaggattggcagagagcccgaggctcaatgttcctacaccgtatgaaacagcatcactgccggaatcacacgaggcaacacatgaaattagcatcgccatactaaccataaaagagagtcttttcataatgataactactaattattactcataagttgtaaaaaccgaacgcaaagttatagttttcctttattataataaatgcacaacatgcgattccttacaaaatctgaaaaaagagccacaaaaagttgtttaatcataaaaacagaccacaaaaaggaggtaaaacaagaaagtcctgcatttcttatgaaaaacaggactttttttatacaacgttattcaattatttatcgggcataaggactactccaagtttctttttgccatccattttcacaacaatcggcctttcaaagcgtacatgacggagatattcggtttcaaatacggcaggttgcgtattcaggaattcctgattgtatactccatcattcataaacgcgttaatcgtgaaatatcccacaccaaaagaagtcaggttctggaagaaatgtgttccctgactgggatctacccgatagttagtaagtccggcctccacaatgacacgcgcggcagaaatatgtggccacttcaccggaatacccaaccaagtatcactgcttccccatcgtccggggccgacaagcacatagttcttgccttcattcagaaattgctggttgattttctctatttcccaagctatattctgattgttcgatgcactgtaatgatcggttttgacatacacaatatcgtgtatctcgttcataatgccatgccccaaagagttgttggaacgaagcaacacgtcttcgtcaggaatagtcgtaagatcctcgtccaacatatctttactgtccacaataggacgcacctgaagcagatagaatgtaccggtcttatcacggtcgtgattgagcgtcacggcaaattcgatctctaccggacggcgcatctcctgctgaccataacgaagtacccagcgcaggatgcgtgccaacggaaatacatcgtgctgcaggatgttggcaaacgtgatcactttgcgccctccgggatacaaaccgtcccgaatcacctgatcgtaaggatcgtaagtagaggcaatataacgcaacgaaccgtctttttcggcttccttcacatgtaacttcaaaagattgaagccatcgtcaatcgagaagttatcaccggcattcttcaggtcgagggcataaaaacgggtctgcgtctctttcaaggcaatatccaattcactggtctgtagcactttcgaaggatgggcaggcgagaaacgcaaagtcatgcctccatctacgatatacttgcccaaaccgagagccagatttaccgtaccttcttcagccttttcgtcaccaatgggataataattgagagagcgggctacaccggacatggaaggataataacggtcaccatactgattgccgactacctgttgcaggataacggccatcttttcctgatcgatcacattcgaagtggcttgcatatatgccttactgtcacgaaaatagactgatgcatatactcccttaatagcatcggacaacatgcgaagcatctcatatttatcgtccagataaggaatcatataagtgttatagatgcctgcaaaaggctgataatgggaatcttcaagcagagaagaagaacggatggcaataggggacttcactacatcgaagaaagtaaaaaagtcctcaaccaagcggtcgggtaactttgctttcaggaaatatctcagaatcgtatcgtcatcagcatcggaaagggcaacctgatacagattgttcgtatccataaactcgtcgaatacatcggtacagagcactactgttttcgggatagctacacgggcattctcaaattcttcaaattccggatggcgcttcaccatattgtcaataaacgccagtccgcgcccttttcctcccaacgaaccgtctccgatacgggcaaagtttgaataacggtcgaaacggtcgcgcttgaatacggctaccactccctggtttttcatctttcgatatttcacgatggcctcaaagatgattttgcggtgtgcatcgacatcctgcagactatgccaggtgatgggacgaagaaattcggctaccggaaacatggcgcgtgaatacaaccaacgtgagacatggttacggctgatatgataaaggaaagattcggcaggaacggcaaaaaggatattttgcaactctttcagattccgtacgcgggctatctcgactcccgtttcgggattacggaacacaaagtcaccaaaaccgaaattatcggaaacaatccggcgaagatcgacatccatcttcttggaattcttatcgataaacgtggccccgtattttgccgcataggccgcattctccgtctcggacgactggatgattaaaggaacaaacgggtctttctttcttacctcggcacacaacttgatacctgccataccgtccttttctcccttatccacacgaggaaaacggacatcggtaataactcccaatatattgttagtatacttattatatatatccatcgcttcctcgtaagtacgagccaatacaattttgggacgaccacgcatacggagtgtacgttgatgggcattcaaggcctcggtagaaaactcctgactctgcttcaatacaaatttataaagattgggaagtacggaagaatagaagcggatactgtcttccaccaacagaatcaactgcacgcccacctcttttacgtcatgctccagattcatcttgtcttcgatcagcttaatgatagacaccagcaaatcggtatttcccaaccaacagaacacatagtcgaatgcactcagatcttcgtttgcaatccgtttggtaataccatgactgaacggtgtcaggatgacaatcggtatctgttcgtacttctccttaatatgacgcccgatatcaaaactatcgttatctcccgtacccggcatgcaaatcaccagatcgaacgatacactttcaagctgcctcaacgcctcttcttcggtggaaacttgtgaaaaacgggggggataacggagagaaagtgaggtatattcattgaaaatcttttcatcgatacgcccgtcatcctccagcataaaagcatcataaggattagctatcagtaagacgttaaaaattcgccttgtcatcaggttagcaaactgggtatctttaaagtagagctggtttaatttaaatttgctgagcatgggcttcccgtagttttaaaattcaacagacaaaagtcgctgtttttattgggaaaaacaagaaaaaacaattcactttattgctgactatccatatatgcacagattgctttctcgttttcggcttaaaatctctcctactctcatacgtatcgaccacaagggcggacatggttccaacaaagccacaacaaagttagtaaaggagcaagcagacatctatgcatttatcatgtataacctggggatgaaaatgaaatactgacataaatatccgaatgggtatttttgtcattttatcattatttaatcaaaataatacgccattccgaatgacatcagaaaacttttcttatatttgcatatgaaacaagttacattttatcagaatcaacctttttaaaacatactattatgaacatcgaaaaaatcatgtcctctcttgaggcaaaacatcccggtgaatctgaatatcttcaggccgtaaaagaagtattactctctatcgaagatatctacaaccaacacccagaatttgaaaaggccaaaatcatcgaaagactggtagagcccgaccgtattttcacattccgtgtaacatgggtggatgataaaggtgaagttcagaccaacctgggatatcgtgttcagttcaacaacgctatcggcccatacaaaggcggtatccgtttccacgcttctgtcaacctctcgatcctgaaattcttgggattcgaacagactttcaaaaatgcactgacaactttacctatgggcggtggcaaaggaggttccgacttctctccacgaggaaaaagtgatgcggaaatcatgcgtttctgtcaggcattcatgcttgaattgtggcgtcatctagggccggatatggatgtgcctgccggtgatatcggtgtaggaggacgtgaagtcggctatatgttcggtatgtacaagaaactgacccgtgagtttacaggaactttcacgggtaaaggacttgaatttggcggttcactgattcgcccggaagccaccggattcggcggattgtatttcgtcaaccaaatgttgcagaccaagggtatcgacataaaaggtaaaactgtggctatctccggattcggaaacgttgcctggggagctgctaccaaagctaccgaactgggagccaaagtagttaccatctccggaccggacggatatatctatgatccgaatggaatcagtggagagaagatcgattatatgcttgagttgcgtgcttcgggcaacgatattgtggctccgtatgcagatgaatttccgggttctacattcgtagccggtaaacgcccatgggaagtaaaagcagacatagcgcttccttgcgccactcaaaacgaattgaatggcgaagatgccaagaacctgatcgacaacaacgttctttgtgtcggagagatctccaatatgggttgtacacccgaagctatcgatctctttatcgaacacaaaacaatgtacgctcccggcaaagctgtcaatgcaggcggtgtggcaacatccggactcgaaatgtcacaaaatgcaatgcacttgagttggagtgcagccgaggtagacgaaaaactgcattctatcatgcacggcattcatgcacaatgtgtgaagtatggtacagagcccgacggatatatcaattatgtaaaaggtgccaatattgcaggttttatgaaagtagcccatgcaatgatgggacaaggaatcatctgattattacttgtccactaacataaaaactttgtttagttgtatttgtatttatggtttgcgttatccatctcctgagacaggacatgggtaacgctacttttttataaaaaggtttcattttcaactaaaatcgcctaactttgcatctcgaaaccaaataataatacaaaatgttacaacccgaattaaagatgcgccgcgataaaattcgtgtgcttatggctcagcaaaatattgaagccgcacttatcacttgtaatgtaaatttgctctatacttacggccgtatcgtcagcggatacctctacttacctctccactcaccggctttattattcatcaaacgccccaacaatatcaccggcgaacatgtatttcccatccgtaaaccggaacagattccagacttgatcaaagaaaacaatctgccgatgccacaaaagttgatgttggaaggcgacgaactttcgtttacagaatacaatcgccttgctgctattttccctgaatcggaaattgtaaacggtactcctctgatccgtgaagcgcgcagcgttaagactcctgtagagatagaattattccgtcgttcgggtgtagctcatgccaaagcctacgaccagattccttcggtatatcgcccgggaatgactgatctggaattctccattgaaatagagaggctgatgcgtctgcaaggtaacttaggtatcttccgcgtattcggtcaaagtatggagatttttatgggtagcgtactgacgggtgacaatgcagcttatccttcaccttacgatttcgctttgggaggcgaagggttggatccggctttgccaggcggactgaataagactcctttaaaagaaggacaaagtgttatggtagatttaggcggaaatttcaatggatatatgggagatatgagtcgtgtattctctgtcggaaagctaagtgacgaggcttatacagctcatcaggtctgtcttgacattcaggaagccgtttcatcgatggctcaacccggcgttgtatgcgaagacttatataatgcagcgatcaacatagtaaccaaagccggttttgccgacaaatttatgggtatcagtcaacaagccaaattcattggccacggtatcggcctggaaatcaacgaggcccctgtacttgctccccgtatgaaacaagaattggaaccgggaatggttttcgctctcgaaccgaaaatcgtcattccgggtgtaggtcccgtaggtatcgaaaactcttgggcagtaactcccgaaggtgttgagaaactgactatctgcaacgaagagattattgagttgcaataagacagctctctctacggatactgataaccgagggatggttcacacaattgatgaacctgaagtgtaaattaaagccgcaacaataaaaagaatcgggagagcacttttttgaaagtgctctcccgattcttttttataccactaccggctgttatgctactaaggcgtcacaaccggagtttccagttttatatcttcccagcctatccacgtaggagaagccatacattgaggttcctgaattttatcgatcaatgcggttgcacgtttcacggcagcactggttctgtcaaacagttctttcatggagatattcccttttgcgtcccgaatggtcttaatcaggaagtaagtataatatccctgtttcttttcatgataaacgcttgaagtctggtcaccgctactggacgagaagctcaatgtgtttccttgtggtaaacccacctttggtaccacacgcacccctttctgtgccaataacggagcagcactcttataaccaccgctaaagcaagcatcgaggaatacataagcccctttcaccggatatgtagccagttttttatacaagtcactcaacgagatacccaaacgaatattcttaccggtaatatctaccggcaacagataaggttctttggtagcctcgtcgttatttccatgtcctgaatagtagaatatcaattccgcctgcggatccgtacttgccatattcaccagccagtcgagttgctcgtgcatcataccggctgtggcattcggcactaccttgatttgtccgtcgggcaccccaaaagtacgcacgcaatactcacggaacaacacagcgtcattgaccgcataaggtacgtttatttccgcattagcccctgtcatgctataatcctcgttaccgataatcaatgcataccgatggcgattgacagctcccacaggcacatcctccatcagttcactcttaaagccgagtgagaagtctttcacattcactttacgtgcagctacatttccactcaggttcatcgaagcggaagcactcaggtactctccgactttcaccttataagcttcattcagagaagccgaacgagtagattccgtgacagccagcataactgcaatcgaatctccatcaaaacgtttattcaccaaaaaaccatagtcgagtatagctacatctcccggggcaatgctatcgacaataatttccggcgtatcagtcgtatatacattcttcggcaaagtaaagttcactttcaccttgcgtgcagtctgcgtaccgaaattctgtaaggcaacagtcagcttaccgttcttacccaaagtgatggaagaaccctcggaagcgaagaattggtgatcggcaacacgcagacgaggcattgcatattcctgagtgttcacaatcagctcggaaggatccgcatcaaatccattcgcctcgaacgcataaatattaatcttggccagacttgtcggcaactccttcttggctatataacggaaagtgtattccttagacttcccggcagcaatattaccaccgtccagttcacgagggccgtcaaaatactgatcatagccctgctgttcagccaggcgaagccgtacattgtaggcatctcccttaccctgattctctatggtgaaccgtatagcaaaactttcgccggcatcgatcaccttattgttattagcatccgtaaactggtctactttgataaccagcatagccggttcaataggcacgggaaccgcttgttgctcttgagccacattctccgtttttttcaatgcctctttataggccgcaagacgagacggaaaggcggtataagaagccccatcctgaacaattttgttcagcacctcatattccggtttcatatccatatactgatacaccccggccagtccctgcatatacattttggaagaaggatctttctgcaaaattttcaggaagaggtctttggcatccatcagataacccgatgcacgttgacgtaccaaagcatattccgtatcgttggcaatagtggcaccattgttcacaatctccgtagcacagttaaagttggcacgtgccactcccgtcatcaattcaaaactctcagggtgcagtgcatagagacgtttataaatatccaatgcctccacattctttccctgacgctccaggatgcgtgccttgataggcaacactttatcattattcgggtcgacagccagaatacggtctattgctccaatcagcttctccatattattggtagcaatatgtacattcaccagattgtataggaaatcaagcgaaacgggatacttggcaatagcctgttccagcacacgttcctggtccgcatacttcttctgcttctgataaatcatattcatataaacatagcagtctttctgctgggcctccgtaccggtattaagatattcctgaaaatatctcaaagctttttcgttcttctccagattgaaggccgctacagctgcgtaatacaccaccgaagcatatcggttatctttcggcaacaattcactacggaacagtttcagctgcggcatatcgatataagcagcagcaaaatccaatgctttggacggttgtttctgttccgaatagtacactgccccgttcagcagataaggatacaacgctctcagtcgattcttggcgcctccaatatactgactgttatccggtgcctctacaaccttcatgaaattttcgtaactatccatcaaataatcatacatggccgttacgttcgttcccttatcccgctcactttcaaaaagcacatactgttggttagcacgttttgaagcggaggcagcttcttgtgcccccactttacctgttacaacaacagtaagaatgattgtcagtaaaaaaaatctcttcattgtttattgttgaaatgcatccataattacaaactctacgttgatcttgcggaattctccaccacgctctttggctacttccacatgatattcgtattcgttctttgtattacccaatgttgtcacgttcttctcaatataagtctttacgcctgctgcacgcatcagggccaactgttcattctgagtgattcctccagccttggtgactgtgatattatcgaggttgccatccttataataaggttcgtccacaaattctccataacgtccgtcataagccagacgtccgcgaatcggggctgcgtctgccgatcccgtaataatcaccttcacctgcttaccttcagaaagatatttggcaaagtcaccttcaaacgcattcttgataatcttcatcaatgacatggctgcattcgaacgttcgatattataacctcccgacgggaagtcttccttagccgaaaactctttattgatcacttcatattggtaacccaccttgtagttcagaatctttttaccattcgcatccactcccgggattacctctgtcttcacattgatctgcgtattatcagtgatcagtttatcttgttttttctcctcgatgacctgttctttgatctcggccaattgtgcttcctcacgggtagcctgctgcataatttccagaggaacaaagttttcatctgcttccagagcagtcagttttgtacgtccgatattatcataaatataaaccttgttcgtcgtttcgttggtaacttcaacataggccaactcaaattcatctttatcattcagcacatatacggcattcgagaatttcatcttaccgtctttaaagtcgcccgcttcattggagggaacttccagtccgatagacggcagtcccttaaaaccgatattcaacatattattcgaagcatcataaccatctataaaaggattatccatagaaatacggtcacccgccaatgccgtagcaacttcctgagcaaacagctgttgctgtttgatacgggtttcatcgtttacacgaatcgcataatcttccatcgattccccctgcatcatcttcacccattcgttcatcttggcatccacttccctacccataatcttaccatagaacgggttcagtccgtttgcatcccagaagaccatttgtttcgtacgattggtcagcagaaatacctcgctgttctggttgttcttaaagaaacgcccaccggtaacaccgcctgtaggatcaacgatatcttgttccacaacaccattcttcaggttgatgatctctatattctttccatctttcaccacactgatatattttccttccggatggaatgacggagaactgagtgttccacccagcttatcaaatatatctaccttatcccagtttttcgtatcgataatggtcaagtgattgtcatctgtagttacagccagcaatgcagcatccggagagaaagtcacctctttaacgactgccggcataggaatcgcttttctcaactcctttgtctggaaattccagatattaatattctgtcctaccgctgcggcgataaaataattgttcgagctcatggccagggcagtggccggagcctccccctgaatataagctaacggcatatattctttcgtatcataaatcacaatttctcccaacgagttacccacaataaaactacgggcgtcagcagaatagcacatcgacaccggcatcggtttagccttcaatttcttacgtttctccttcagttcgaaaagcttcttattcctgtcgcgaaaagagtaaatacttatcggattcttcgccctcaacagagcgatggagcttcccgtcgggttaaacacaatacgctcaatttttcgcacatcattaatagcgatatcgcgcatggtatacagggctccgtcagacaaataagcagtacaaaaagtcgtgttatcaaatgcattaatctttttctgagagtcgaatccccttttttctacaacctgtgccattgtttgtccgcagaacatcgcggctacaaaacaaaaagcaatacctctgtaagtgtaaaatccacatttcatcctattcataccttaaaatgatttagtttatgtttaatagtgttttgcaaaataagcacttattccgcaatctatcactaacagaaactcctttttttttattttctcgaaagtttggttgtttatacacagaaatgaaaaaagaatagacagaaagagtagataaaaaaagcagttttgtaacggaaaaccgttacaaaactgctctatggcatatataatcctttccggcatgaatccccggagatcactaaaaacaaaaacttattgcatctaaacctctttgttttgtacgggtttcaatcccattttttcggctttttgaagcataaatgcataggcggcttcgtattcattgggaatcactccgtccaaaatagcgtcttttatagcactttttaacgagcccacttgcctgcaaggtcccagattgaacacctccataatctcttccccactcacaggtggctggaagttacggacacggtctttttcctccagatctttcaatttctgcctcaccaattgaaaattattcaggaagcgctgtttacgttccatatttttcgaggttatatccgcttcacaaagcgtcatcagatcgtctatatcatctccggcttcaaaaagcagacgccgtacagccgaatccgtcaccacatcatccgctatcacaatgggacgcatgtgcaggctcaccatcttctgtacatacttcatcttctcgttcatcggcaacttcatcttccggaagatattcggaatcatcttttcaccgatgaaattatgattatggaaggtccatcccgctttcggctcccaacgtttagtcaccggtttagcaatgtcatgcaacagagcactccaacggagccaaaggttatccgtcactctgctgatattgtcgagcacttccagcgtatgatagaaattatccttatgggcacgcccgttccgggtctctactccctgtaaagccactaattcaggaaaaatcaattccaacagcccgctcctgtccagatcgataaaacccttcgaaggtataggtgaaagcatgatcttattcaattcgtcggcaatgcgttcacgtgaaatgatctcaatccgttctctgttacggcaaagagattcaaatgtatcatcatcgatgtaaaaattcagctgggtagcaaaacggatacagcgcatcatgcgcaaggggtcgtcactgaacgttatgtccggatcgagaggagtacgaatgatcttctccttcaaatcattcatgccgccgaacggatcgaccagttctccaaaccgccctttgttcaggcagacagccagtgcattgatcgtaaagtcccggcgattctgatcgtcttccaacgtcccgtcctccacaatcggtttacgggaatcccgttgatacgactctttccgggcacctacaaactccacctccgtaccgtgacacttcacctgggccgtaccgaaattcttaaaaacagagacatgcgcaccgcgtcccaaacgttttcccaacgcttcggccatcgcaatgccactccccaccactactacatctatatctttagaaggacgttgcagaaaaatgtcacggacataaccgcctaccacataacactccaatcccaacgcatcagccgtctctgagatctgaccgaaaatgggctcactgaaatgctgcttcaattcctcctgagtcaactctatcatcttttatttatcttttttacagttattgaaaaaggcctgcctaagccctctgacgcttttggcataccctctttatagctaatcagtctgcaaaggtacaacttttcgctcttcactttccactcttcactctaaatttgtatttttgccctctataacaaagaacaacaaaatgaagaaactgattgtcctgacatgtacattgtcactactgacagcttgtggtgacagcatcgaaaagaaagcgggtgaaaagcttgccgctgcccgtgcagcctttgagcataacgactacaacgaagccaagttgcagatcgacagtattaaaattctctatcctaaagctttcgacacccgtaaagagggcatcaagttgatgcaacaagtcgaactgaaagagcaacaggaaagcctggtttatctcgacagcatgcttcaggtcaaacagaaagaattcgaagcgatcaagaacaaatatactttcgagaaaaacgaagaataccaaaaaatcggtaactacttctggcctacccagaccgtagagaagaacctgcatcgctctttcctccgttttcaggtgaacgaacagggagtaatgacactgacgtctatctactgcggaccaagcaacatccaccacgtagccgtcaaagtgatagcaccggacggaagttttgccgaaaccccagcctccaacgacagctacgagactaccgatctgggagaaaaaatcgaaaaagccgactacaaaatgggagaagacggcaacgtcctcagtttcctctacatgaaccgcgataagaaaaatatccgtgtcgagtatctcggcgagcggaaattctccactaccatgactccttccgaccgtgaagcactcgtcggtacttacgagttggccaaattactttcatccatacgtcagattcagcaagagaaagaagaagccaacctgaaaatcgaatttgtgaaaagaaaaatggaacagaaagcccaagaagaggctgcggaaaaataaagataataaagcaccccaactgtctgtttcaccacggattaacggatcacacaaaatacagctcacaagctatcgtatttatttgtcccatccgtcaatctgtggtgaactctttctgtcctatctatttttatcccctccgaaaaggccgtcccgattattccccactatcctgtcgctatcaatgatcgaccgcctctccatgctctcactcttcatctcatgaatttccccaataatacggagttcaaattaaaataaagatagcaatttttaggtattttcagaaacaagttcattatgtgtagcgattacacagactattcatagtatctatctttgtcccccgaaacatttgagtacatatgatagaacgctaatatgaaagcagtaatcatttctttttttatcaccctttccacccttactagtcatgctcagcaaagagatattgtattgacaggaacagttacggatcatcaaaacgaaccgcttcccggcgccaccatccgcattaagggtacccaattcggtacagtaacagataccgacgggcactatctgttacgtggcaaatggaaagaaaacgatctaattcttttctctttcataggaatgaaagagatacgtgtgaaatataccggtcagaaggtacaagatgcagctatgcaagaagatcccaaagcactggacgaagtaatcatcgttgcccggcagaatatcaatgaattggatattcgtgccaaatccggtgttgtacaacgggtcgacgtagaacgtctcaacagtaaacccatgatcgatatgtccctcgctctacaaggaaccgttcccgggctgatcattaccaacaccggcgacctgggctccaaaccggaaattcgtattcgaggcaattcatctttccgtaaaggagatatggctaacgaacccctctacgtcatggacggcaaagtaatatcatctgatgccttcatgactcttaatcccgccgatattcaggaaataaaggttctgaaagatgctgtggcttgtgccttatacggaataaaagcagccaatggtgtaatagaaatcacctcccagcgtggcaatcccgacggaagactaaccaccagttacagtttcaatataggtatcaccacccgtggacgcagaggagtcaagatgatggatagcgaagaaaagttagaattagaaagacgtttacagaatatatcgactccgggatatcgatacagtgaagattactatcggaaatattatgctaccgcccccaacctcgacgagctgatcgcagaaggacaacaagtactcgactcattaaagaatatccataccgactggtttgatgaactgatacatcgtagcatctaccagcgtcataaccttagcataaaaggaggaacaaataagacatcttattatatatccaccaattatgccaagcagggaggacgagtaccgggtaatgacactcaacgtttcaccgcccgtatgagcctcgatcagaaactgggaaactggggatatttttccttaagcaccgatgcaggttattcggcaaccgatactcccaacggcagcacccattcccctacagatctgatttatcaacttaatccttatgaaaccaaaaccggtaaattaatctcctactccgaaaaatcatccgaatatacattaaatgatttgatgagccaataccatagtaaatctaccgataagcgtggcggagtaagcggaagtttcaacttaaggccactcgaaggtttggagatagatgcagtaaccggcatcgatttccttctgaacgaagcccttacgcttgttccttccacgtctatagcagagcgggaaatgggaatagcgatagccgaacgtggaaaattaacaaaagaaaaaaatacaacgaccaatatttcctccaatatacgtatcacttacaacaagacattcgccgggagacacgacctgacaatcggtggaaacatggactactatctgacccagacagacaacatgtctgccaccggatacggagtagggacacaaatgtcactaaacgcaatcaaccactccatcaccggagcccggaagccgacagccagttcgcttctggacaaaacagctcagttaggattcgggatagtcatgggctacagttttgattccacctatgacctttttgctacttacaaagccgatgcttcttctgttctccctccggacaagcgctggaatgcagcatgggcagtaggcttggggtggaccctcagccgatactctttcctgaaaaacagtaaggtcatcactctcctgaacctgaaaggttcccatggacgtatggcaaacctatccggagtatctgcctccgccacaatcggcaccttcagctactccaccaattattacggaaatgcccgtctgctacagttactcggattttataataccgatctgaaaccggaacagacttccacaacagacttcagtctatccatcgaattcttcaaacggctgacattgggtctcaatctataccgccgcgaaacgagtgatgcactgctggacgtccccatccccctttccaacggtttcaataccatgaaacgtaacatcggtgtattacgcaatgaaggctacgagctgaccgccgcactaaaagtgctcgatacaccggactggcgtgtatctttacgcggttcactggcctacaaccgtaataaggtaatcagcctgtactataccgaccgtttatacaccagcgaaaccgccctgactcccgactatgaagtcggaaaagcctataatatgctttatggactgaagtcattaggcataaaccctatcaccggtcttccggtatttcaaggagccgatggaagtgagatttccccgacacaaaatccggccagagaaaacttcatcgttttggggcatagcactcctccctacagcggtacattcaacctgaatttctcctatcggaatttcgatttggatatggacttttactatgtgttcggcggcattaaaccctacaattattcttatgtccgttcagccgacagtgccaataagaatgccattcaaaagcaattagaaaacatgtggttccaccgaggagatgaaggaaaaatataccattctccattttacatatctcctgccaatgcttcactccaacagcccaatacagaaaccgtcgggaaaagcgattatctgaaattggccatgttgtcgctacgctaccgggttccacacacctttctggagaaaaactgtcatttcataaaatatgccaatatcgcctttcaggcatccaacctttttatgattactccttataaagagtccgatcccgaaacaggttcattagccggagctatgcaacccgtattaaccatcaatcttagtttgactttctaaatacaagtaatatatgaacctaaacccaataataaataatttccaacgctcaatacgcaaagtacaaatctgttgcatattcatactcagttgtacagcctgttcgctcaatatcccctacgagaatcagtattcagatccggatgtcattaccacagtaaccgccgcacgcgaactattggcatcggcctatgatgcaattcccaagccggaattcagtttatccgtattgagcgacgacttccagcctacttttttaataaacttgaatgccgacctgaataacctatataaatggcatcctaaaccgatggaggacttatcgaactctctgtgggaaaaatactactcagccataggcatagccaatacggtactggagcgcatccattatgtatcccctatttcagacagtgacaagcaagagttgcaatgcatcgttagcgaagcaaaaacgttaaaagcatattgttacttcaatctgctcagactttttgcccccacctatccggaaggtcccgaaaaagacggaatcatcttaaaggagcggttcgaacttgcctttctaaaacgctcgagcatcagtgaatgtgtgaatgctatccgccaattactgaccgaagcagttactgtagacaaccgaccttcacaggtctactggttttcccggcaaagtgcttattatctattggcagctttagaactctatgccgcaaattacgataaagccgaagaatatgccttaaaaatcctgtcttcaaccaatgcatacgatgtcctggcccccgtacattataaaaaactatgggaacaagaaccatgcgatgaatgtattttttctctgcataccaccaattcatattataccgatatgaattacgaaaggaagaaaggcgactacttcacgatcaactccacactcacccaattatatgctgccgatgacatccgttacgaagcaacggtctatccccaagaaatgcctggtgaaagcatcggcgagaccttaccggtactatatctgggaaaatacaacaaacagaactggaattataaacctatacaatatatcaacaaacttcgtgtatccggcatctgctttattcttgccgaagcctattgtcaagaccagaaaggtcacgatgcattggccttggaagtgataaacaactacctggcccaacgtgaagctcccttgctcgacacatcactttcaggcgctcccctattgaaagctatccttcaggaaaagtggaaagaatttgccggtgaaggtgaacgttactttgatttaaagcgctatcgaaaaagtctgctttccgattggaatctctctgccacaatgaaaagtaaatcaatcaaatcagacgactaccgttggcttttccccattccgaaaggcgaatatctatataacgaaaatatatcacaaaatgcaggatggactaaaatcgaaaaataaataaaatactaaactaaatgaaaactataatgaaaaagctgtttatctacgcagtaggcatctgcctactgcctgccttcacgtcatgcaaagacgatagagaagaaaataaatatacaggaatcaacaaaatctacctgtctgccgaaaccccggttattaccgagtccgaaaacattccattaacagtaaatgtagatttaacattgacctgtgaacaggacctcgtactcaactttgaattgcccgatgataaaaacggagttctaaaattagagaacaatcccgtcacgattaaagccggaaaacgttctgcaacattcgaagtagtttccaaccaaaagaatttattaaccgaagatacatactttcaagtcggaatttctcaattccctaccgataatttaatgttaaacgaaacattgcaggtacgtgtcaagcccaaccctaaaattccggaattgtcccctcagcaaaaagcgttaatcaaaggttataagaccaaatacggcattgacctgaataaatggctcggagtcctctcttgccataccactgtgcaaagccctgcagatgggtatcttcaaccctttgcagcagcatttacgaaagaatatgatggcaagaccgtcatcactctcagtgagcaggccacagaagacatgccggtattaaaaatgacagacaatccattcggactgaccgaatatttatactttgtactccgttccgagaccgtagcagatccggaattctggactcaacagccggaaccgcaaaaactgatgaaactactcaactggaataaagaaagtaaagagacatttgccgtatcattggatgcaatcagactcaaagacatcacttccacttcaacccggctggaatatctgggtccgggaaaaaactattatggagctcctattaccatcgttccatttacctaccaattcagtgctttagaccgtcaaaacaagctcctggaaagtggaaacgcagaaattaaagagatcaatgaccagggagcttccgcagatccggcttactacctcaactgctacgatcttgtcaattccgacaactatgatacccccgaaaactttatcaaatccaccggaaacatagactttgccacagataaaatgacttatcaatttctcctgagccatgctaacgccggaggatatacacgcataaccgtagtttatgaaaagaaataataaaaacagatatttatacatagcagctatattcatagctgctatgctcccatatacagcctgcccgcaatccactccaatccttcttccacccggaacggtagagggacgccttcccaacggactgcactatcttatcctgcacaatgcttctccggcatccagagtagagttcaggctgatcatgcgggtaggttccgtacaagaaacagagcaagagaaaggttgtgcccacttcctcgaacacatcactttcggcggtacccgtcattttcctaaacgctctttagtagagtacctcgagtccttaggaatgaagtacggacaagatatcaacgctttcaccggttacgaccgtacaatctatatgttcgcagttcccaccgattttgccaaagacgaagctctcgatcgttcattactaatcctgcacgattggttggacggtgtcactatagatccggaaaaagtagagaatgaaaaaggaatcattcttgaagaactacgcggattcgacccggaagacgatttctatccgctcaaaatcggacaaggcatattcagtcaccgtatgcctttgggcacaacagacgatatccgcaaggtcaccccgcaggtgctcaaaaattattatcataaatggtatgtgccctctttggcaacattggtcattgtaggcgacatatctcccctggagatcgaatctaaaatcaaagaacgtttcaaatccttgcccggacgtccggtcaatgacttccggaactacccgttagagtacacccggggaattcatctggcctccatacgagactctctgcaaccccgtacaaaggtcgaactaatgattccacacccttgcacagtagagcgtaccatggaagacgccatagcaaaggagaaagggcgcctgctcgtcagtgccatttcttcacgattccgtgcacgaaaactaaagaccgatgttacagaccaatggtatttaagtgacaagaaccattttgttctgacagtggaaggagaaaacagaaaagaaatacttacatctatttctacaaccgtatctctgttgaatgatctgatacgcaacggatggcaagaggacgaattacaagatattaaaaacaatttttgccgccggatgaaattgtccaccgatgccccgtcacgtccttcctccatgtggtgtgacgattttgccgattacgttatatcgggagaccgctatctgaccgatccatcccaacagcagcaactcaaagaagccatgtcccgtgtctccggccaatctttgcaaacattgctcaaggagtggatgtcttaccgtgaagaaactctattagtagcctgttcaacccatccgggactgggagccccgttatcggaaaccgaaatagcgtcggcatgggcccaaggcgagcaagtcgaatgcactccctttctttatttccgtcctgaaaaacaagaagagatcgacattgagactcctccatgtctggcagcccgttttcctttcgatcctgcatccgtattacgacaaacagaatatccgcaaaacaggattcgtgaagtagaactgaagaacggcatacggttagtcctcaaacctaccctcgaagcagattccatcctgctaatcacttcttttgcccctttcggcacttcttccctatccgatgaagaatatcctttattagagggatttgccggatacatagatatgggagatatcgcaaaagtagatggacaagttttgtccgattacctcttccggaaagaaatctcactttccatggcagtcgaaaatcactggcatggcttcataggcatgtctcccactgcaaatgctcccgagctattcaatctgatttatgaaaagatattcgatcccgaattaaaatatgacgaatttgaggaaatacgccaggaccttttagaaaatcaagacaaagaaacgatattggagaaaatgcttcaacgaagtcctgaccggttattatctgcccgcataaacgagttgaccggaaccggtttcgcccgctcttcccaaaagctttcgtccgaacaaatcaaaaatctgaatctggattccatcgcagctttttataaaaagctctatacgaatccccaaggaaccacctatgtcatttgcggcaatttcaatgcggacactctcatgcagcagtttgtctccgttttcggacgtattcctgtttcgtcacatttgtcccgattttcttatccgcatttcaattttccagtcagaaagcatatagaaggctttcccaatgataatgacactcagacactgttcgactatcttctccccggccactatcaaccgggattaaaaaacacactcactttaaaattgatgcgtgaccttattcgcaaccgtttgatctccgtcctcagagaacaaaaatcccttgtctactctccttacatttcattaatgtatgaaggcatcccacaaggaattttctactttgacatcaatgcatccgccgataacgataacatgcctcaaatagaacagttgctgaaagagattctccaccaattaaaacagcaagaagtggataatgaagaactgaatacccttaaacgttcatttctgatagccaaacgcgaagcgttaaacgaagaatcaccttctgcctggcgaaccgccctggtcggtttactaaaaaacggtgaaaccatcagcgacttcgatcactacgaacaatgtctcgacagcatcactcccgccatgctccgcgaagcattccgtcgctatctggataccgagaattatatccttttatatttaagcaaaaacaaactgaaaaatgatacttcaaaccattaaacagatttcatgcctgctctgcctgtgctgtttccttcagcagtcagccttctctcaggatgataaggacaaaccggcctataccctgttcgacaacacaggaaaacaaatcagctacggagaattaatcaaacgactctccggctatgatgttatcttcctcggggaactgcataactgccccatcacccattggctggaattcgaaataacccgttccatctataacattcataaagatcaactgatgctgggagccgaaatgttcgaaagtgacaatcaactgatttttgacgaatacatgcagcaaaagatctcttacgaccgctttgaggccgaagcccgtctatgggataattaccggactgactattatccggttgttttctttgccaaagaacatcacattccgttcattgcaaccaatatcccgagacgctacgccaacattgtaaaaaataaagggttcgaagcactcgactcgttatccgaggaagccaaacgatatatagctcctttaccgatcgatttcgaatatgatgaagcccaaagcgcagcagctttcagtatgatgaatatgatgggaggacgccgggccggcgacaatcggaagttggcacaggcacaagccataaaagatgctacaatgggatggttcatagcccgtaatatcaaaaataaattcctgcatatcaacggcagttatcattccaaccgacagggaggcatcatcccttatctgctccgttaccgccccaatacgagtatagtgacggtaacctcggtacgtcaagagtccatccggaaactggatgacgaccataaaggcttggcagacttttacatctgcgtacccgaagacatggtaaacagttactaactaccgaagccttcgtccccccctggataaaatatctgcctcttcttcggcatcaatatcgtttttttaaatcactatatcgataccggagaagaggatcatcgctttggtatttcattttttgtataacctaagttcaaacaaaattcttataaagcgttcatttcaagcaaaattcaacatcaaggtgcgattttggtctggaaataaagctacggaaagttcttgctattcagtcactattgatattcgtacagcgttcattccacgcataccgcgctctatttcaaatgtcactctatcaccttccgcaattgtcgtaggggcagaagagatatggaagaaatacttttcgccattatccgcatccttcacaaagccatagcctttcgcggcattaaaatactcgatacgtcccataaggggagccacttccacatcctcttgtttgggtacagaaacctcgatatgagatgcatccacttcttcctcaagtctttcctgcggcactgaatgcaaaacaccgaactggtcgacatatgcaatcatatcctcaaaagaactcggaccgttactttggcgttcctctttacgttgttgcttctccttacgtttctgctcctttagcttctcccggtcacgtttacttattgttatcttttttaccattcaataattttatgtcagaatcaatactgcctgtttcccttcatgttgattgtcaataggcagttttatgtcacgcacaccaataaataaacgatttcattattatatccagactacacaccacgctgaatgcttgtaacacataggcgcaattactattatcctgaacaaaacagcaaataatgatgtcgactggagaatgccatagtccgcagaataaagcggaaaacaatcatgcacaaagaagatttcagtataaactcaatgttagtaacggcaaatatacacattttattcggttattcctaattctccggccccaatcgtgatggaaccggaattgccagatagcgcaatcacttaacggcactatccaaatcgaccttctctatcagttcctgatcctaccaataagatattacctttagatgttgcagccttcctactattatggcagggtgagtacagaacttctcaatattatttcaaattttcccaataaggttttagtttgacttggaggtaatccattacttcaaaaaaagtaagttgagttggaatcttaagtttcttcatgaatgcattccaccttatgttcaaattcgagttctttgcaaaggcaagactaaatgcaacgtgattttccatgtagttagtttggcgattcttgaatgttgcctttatagcttcatctaatatttccgcattatattttcctccttgcaagatcgtatagagatcataaaaatctttcattcgactatttgtttctgctcttgaaatcatagtctgaaatttctctgccacaactgtctccaaagaataagccatgatgtcagtattggggaatccgtcaagtaagttcggataatctaattcagatggactgggagttatcacatctccaaatcctatatccatagaaacatactggcgaatcgtatcaagagaggctgtcaacgtcaatcttacacccggatatttcttctcaattgcaatctcatcagtacgcagtgtatcaatgtaaaatattacactatcttgttcgtaagagatggagcaaatttctgcaaatatcttttttatattttctttgttattgtcgatgtgataccccatgaagtcaatatccaatgttggcctcgccaaaaaacgctcatgaacatatagcaatgctccacctttcaaaaagaaatggtcataaaaacggctgattgataaacgatagagcaaacgctcttggaggtatcgggttacaagcatttgatagctttgtccatttctccgtgaaatattcaacaacctagctttcactgagtccccatagttatatatttcttttatagccatgcctcaagataatgattaagtgtattacgtattcttagtttagaggcataatccatcaatagagatatattcttatcgggacgtttcagataggcttgaaggacttctgccatcacatcaattcccgctttatttcgatacttgaccacatcacaaaccgaacgttccacatcaaagatcggcacatcgtatccttgtatttctttccgagtagcaccgatagatagtaatttgtcagattgatatatcagttgaaattcgggatattcaggcagaactacttttcgactacgcttaatggccacatagtaagcattcggaatctgagtagtgagattataaaccgaccatgccgaccaaagacagagaatgccattaggaacaatcaggtgaatatccaccattgtacctgccaatgcgtcaatatgagcgtatacgccattttttaagcgcatagcctctcctttgcgaactgaggcctgcaattgctgttcctgccagtcagtcaaaccttgtgtagagacaaagccattttttttaagttgatcttcaatgcacatattccctataactattccttgcaaatatactgcaaatattcaaatatgcagtatactttaaagggaaaaatacagaagttatcacaatcttttatttttataccgatatacaatcagaattatcaaactaaccgccattaaaacatcgataatattccaaagtagtcgtcctaaagtaactttcataaatgcttggaacattacatatcagtaatattgacttctcaacagattcaaagatattatataaaaacagccggaatcacctgttacggtaatcccggctgccgcctaaaacacgaataaccgccgttacccgttttccgtagcagaccacaacagcctgctgtttctttctatctcctgcaatttcatcgccaaatcatcatcatcctctatcgaaaaagattcaccatagcgcatcactttcgtatcctccctacccgaacagagatatgtataccactcctttctcaacaacatacggctgtaattcaatgctccgtcaccattataaccgaacaaggaatatagattcagcatcagcctgcatcccgattcccgcaagtgcagatagtcttccgttccccaataaagcgaacgttccggttgcatcaggacagggatataacccgaccggtagatagcatgaatcatctcactgagtcctttcggctgttgtaaaggagacacatctaccagtaactccttcccccctcctatcgtcaacaaatctcccttctccaacaaagccggaaatccttcatccaaacgatatcttgccgacaaacgcagagagatattaccggagtattgctgctgtaaatattgaaaggcatctttcagaaaagaaaaagcattcccttcattttccacctttaccggaggtacacagtagatctgcctgacaccttgctgttcaagataaaccaacaattccaacgccttatccccaggcaaagcccatgcatccgtattaggaagtaaataaggctgaaaatcggtatgtaccaaagaagagagaatcataaatttaaatctttcaaccggggatgcctgctgtccttctccgagagaatcacacgatctgccggaatacgccagtcaatacccaaatccggatcatcccaggtaatggcaccctcactatgcggagcataaaaattatcacacttatactgaaaaacgacttcctcgctcaatacactgaatccatgtgccaacccacggggaatgaaaaattgacgatgattatcctccgtcaactctactgccacatgttgtccaaatgtaggagatcctttacggatatcaacagctacatccaataccgctcctttcactacacgcaccaatttactctgagcaaaaggggcctgttgaaaatgtaaaccacggagtacaccataacttgatttactttcattatcttggacaaatgtagtcttgcatactttttcctcaaactccctctgattaaaagattcaaagaaatatccccggtcatctttaaaaatacggggttcaaggataacaaccccatcgatagcagtctttattacattcatttcaaaccaagttcctgtatcactttcaacaaatactgtccgtactggttcttcagcatgggctttgccaattcacgcatcttatcggcactgatccaaccttgtctcaaagcaattccttccaaacaagctactttcaatccctgacgtttttctatcacttcaataaaagtagatgcttcacttaaagaatcatgcgtaccggtatccaaccaggcaaaaccacgacctagcaactggactttcagtacctgatctttgagaaattcctgattcactgtcgttatctccaattctccgcgtgcagagggctctattttttttgctacttccaccaccttattcggatagaaataaagccctaccactgcataattagacttcggttcctcaggcttctcttccagactcaagacatttccttctttgtcaaattcagccactccataacgttccggatcacttacccaataaccgaacaccgttgccttttgctccacctctgccatacgtacagcttcattcagcatacgggtaaaactctgcccatagaagatattatctccaagcaccaaacagaccgaatcactcccaatgaattc

SEQ ID NO: 5094 - DNA, 6054 bp, Unknown
  gut microbiota DNA sequence
tccacgacctagcaactggactttcagttcctgatctttgagaaattcctgattcactgtcgttatctccaattctccgcgtgcagagggctctattttttttgctacttccaccaccttattcggatagaaataaagccctaccactgcataattagacttcggttcctcaggcttctcttccagactcaagacatttccttctttgtcaaattcagccactccataacgttccggatcacttacccaataaccgaacaccgttgccttttgctccacttctgccatgcgtacagcttcattcagcatacgggtaaaactctgcccatagaagatattatctccaagcaccaaacagaccgaatcactcccaatgaattcctcaccgataatgaatgcctgagccaaaccatccggagaaggttgttccgcatactctaaacgtattccataatcagaaccatctcccagtaaacgtcggaaagcaggaagatcatccggagtagatataatcaagatttcacggataccggcaagcatcaacaccgaaatcggataataaatcatcggtttatcaaagataggaagaagctgtttactaactcctttggtgatgggatacaaacgagtaccggaaccaccggctaaaacaatgcctttcataatatattatttattttccagataattcaaacattttttattgatatccttcctataagaatcaaaaaaccatccccatttattgaaatatttaaaaacagaaaatatatgaaatctcaaaagcttccagcttttataagaccctttatcatatccgtgcataactattatattaggattaaatattgtgtcagaaatagtccctatcctacgtgataaatccaaatcttctgcatacataaaaaaacgctcgtcaaatccacctatttttcttaaaacatcaactctcataaacataaagcaaccagacaaagaaggcacccacattattttatcatagccagaaaagattaattcatatttataatttctatttctattatattttttcaatggaagaaagcgacgtccgaacaaatcccatggagttggtagcaatttacataaatattgaatatctccattagggtatacaactttaggcataaccaagccacaattatgattttcacccatatacatagccaatgacttaaaaataccttttgaaaatgatatatccggatttatcactacatgataatcgactttttcttcaatagctttttttattccaatgttatgtgctgcaccatatcctaaattggtaccattaaaaagataaactattttgtctgaaattacactaatagaagttccgagttcatcggatggagaattatctattacatataatttatgtattatctcaccacaaattaatcggcagatattttcaacatctaccttctcatttttatacagcactaaactggctgttattcggacattaagcataatctatattagaactaaaaagatcaatctaaataaaaggaatacatcaaaatcattttaatagaagaagcataagatcgtagtaacttacgacgtagggagaagctacctttttataagggacagtagaaaactttatataattatcatttattgcatcaatcatcaattccgctaacatttgagggctattaacatcaaaaaaagcagtacataaactaccctcagatgtttcatgtgcatactcaagatccgcaattatcataggttttcgatactctttaaattctgatataggaagtccccaagtctccagtttactaggaaacagtaatacatcagtttttaaatacatatcatgcatctgttccatccttaaaagtcctacaaactcaatattaagtacagatttatacttttctaaaatatgattggaatagctattctctgtaccatcaatagttagtaccactctaaaattttttatattcaatttattcaaaatgataacagcttcacatataacctcaaagtttttaaaaggacgggccaatgcaggaaagaagaaagtaaaaggaagtgtactaacgctattcctttcttttgaatctatttcttcatggtaaggtctggctacaataatttttttctgatcaaccttaaacatctcaccaaaagctttacgtaaccactcttgttgaacaatcaaataatcattttgatgaatgttaattcgatacgcccatttataaaacattgcaaagaagacgtatttttttgacaaaaaaacatctttcactttccatctaaaaaaaggggatggattatgcatatagacagctcttcgccgagcttttacattaggcgacatgtcatgtaaagaaagccacaaatagacatcaaattgatttgatatttttttgaaataaaaatattcataataaatacggtatagccaccttttttttgcttttggcaactctatatactctatattcggataaagaattttatccttattattaacaagtgcaataaccctataaatattacttaactcggacatactaagagcctgcaagaagctctttaaaatactcaaggttcctccctctgtcaaattaacagcagagataattatagtgttcattttttatttttttgaagaatagataaaagaaccagaatagtaataaagaaaagcccaaaaaataaatccatatctaacataatgtcctccacgtattagcagtgttagtatcagaaagaagacggaaatatttattatattattcaaattataatttctatatatcacccataaacataatattagacctaatacgccaaattccgaatacaaacgatttaacaaagaatagccatcttgagcattaagaccataaaaaatataatctgatttatattctcgatagtaatttaattcatgtgtccccaatccggtacccattattctattaggagcatttaatgcgacccacacattaaccatagtagcataagaactcatattcaacgtttcaaatacatctggatccatagcaataaaaccttcataagtgtcttgaagcttcattactattgcactaaaagcagtttcttcacccgattgttccagtcttttaaaattccctcccaataaaaacaatagcaataaaataataaaaatggaataacaggcgtatttgtttcgtaaataaacgtatttataaaataaaaggataccgacaacaacaaatgtgatcgtactaaaagtcagaaagatagctaatatcacaataagctttcttttattcagaggaaataatcctgtaaataaataataggagaaagccggagttaatattgtactcaaataacttggttcatcaataattgaggacaccctcaatatgcctggaagtacttcaaccgatgcccgtccataaacccagcaaaatatatcgattccacaaatataataaacagcaaattggataatacccaaatatgcaacaacatgtgcaatacaaagatatttagcaaataatgcaggaatatccccacgaaaatatctaaaaatcaccgcataacacattacaaaataagtcaataaaaaaaattgctgaataaacttattatacgcataattagataatgttatgcatgaaaaagaatatataccaagtattaataaaaaaaacaaaatatttctactaaaattcaacttcttctgaagttgatttataacaagtagagccaagaatagaatgaccatttcatagtatctttccatgaaaataccacatactattaaccatcctgcacattcttttaaattgagcttattttttctatacaatgtcatttatagcaaatagctttatacatttctacatacatattagctatattatcccaagagtaatttgatatcatttgtttagtatcaacaggtttatcaatcatttcaataattccggcttttatttcctgcatatttctccaatccacataataagccttatcttcaaaatatagattagtaccaccatttcgagtaataacaataggtacattataaaaagcagcctccattgctgcaataccgggagtctctagtgttgaaggtagtgcaaaaacagaacacgatttgtatgcactaaacaatagcttccgattataaattggcccaagaaaatagcactccttatatccaatattaagaatctcttcatagtacttcttatcccaaattttgccaactacaacgactggcatatctaactctttacaagcctgaaccaataatttctgattctttctgcgttccactctcgccacatttaaaacaaatttccgattcttcaaaaaaggatattcagtctcaaataagtctttggaaacatctgtcatctcatataagtcaagcccattaggaacaactttaacaaaattatttttcgttacatttgatataaatttagcttcgtcaatcgtattaggaaataatgcagaagctttatcccacaattggactctccgcgaaatgctcaataaactttttaattttttaggaaatatcctagtcaggttatatgccagcacttcaagtctaaagtttttaggatatataattgtagaaacaacataaggaatctccttttctgctaaagttatggcaacaggagtatattcaaaactagacttaaaaaaatgaattaaatcaaactttgataaatcagttgtttcatgtgttatatattcaacagataccaaacctgttttttgtaaagcggcaattgtattttcaacttgtgcttcagcacctccacgctgcaaatttccaaactgatcacaaataactcctaatctaattacttcattcatgacataaaagtgtttataattctaaaacatgcatttccgtcaccataaggattcacagctttactcatgctattatagtactcttgatcatcaagaagtttagatacttcttttatgattttatcataatcagttccaacaagttttaccgtgccggctttcagagcttcgggtctttctgtcgtttcacgcataactaaaacaggtttaccaaagccaggtgcctcttcttgtatacctccactatcagtcaaaacaatggtagctttttccatcaagaaaacaaaagataaatattccaaaggctcaataaaaaaaacattagagagcttttctcctgcaaaaatatcatgaatgggttttctcacattaggattcaaatgcattggataaacaaaatcaacatccagatacatctgtgccaattgtttaatagctcggcatatgttaacaaaaccagcaccaaagttttcacgcctatgtccggttatcaaaaccaattttcgtcctatggaagtgcgtaaaggatcatatccttttattttcaataaatcaataaggtttgattctatttttatatcagacttgattctattggtaacaatatggagagcatcaattaccgtattacctgtcacaaatattttatcttcatttattccttccaatatcaaattctgcttactaagctctgtcggagcaaaatgataggctgcaacccgtcctgttatctgcctattcaattcttcaggccaaggattatatatatcaaaagtacgaagccctgcctctacatgtgctacagcaattcttttataatatgcagccaaagaaacaaccatcgaagtcgtagtgtccccatgtacaaacacaatctctggacctacttcatctaagacttcacgcatgcccatcagaacacgagctgtcacatcatatagatcttgtccagcttgcataatgttcaaatcataatctggagttatatcaaaaatcttaagaacttgatctagcatttcacgatgctgcccagtcacacaaacaattgtttcaaactcacataaatgtttctgaaactccttgaccaaaggagccatctttatagcttctggccgagtgccaaaaacaagtaaaatttttctcataataatatttccaaaaaac

SEQ ID NO: 5095 - DNA, 31745 bp, Unknown
  gut microbiota DNA sequence
actaccacccaatacagtcacatcctgtgaattagtgactgcagtctgcgctgaacctgttggagcaagtgcatttattaccccatcatccacatgaatatagcagttcactaacgaaatcgtatccgtatcaagcgttgttttattcttcacaacaatctgaccatctccataacaagtatcaaaatcatccggcttaatcgtcgaagtacgtgtaaagttaactgtggtatttccttttaccccattctgtatgtctgaagtcgctttgggactactacctaagaatatccagtcacctccaatactcttaacttccaccgaacgtttttcgtgtactttaggacaaaagataagtttatgttcactaactttaatcgtacctctatccggtctttgtgttaccggtattttcttggtcacattattggctttaatggtaatatacgaagtacgcggatgattatccacatagctatccaagtcggcagtaatttccaccgcattcccatccaactttttcaccgaagtaatccacgtggcctcaggtgccttctccactgtatattcgcgagcattggtatttacatgtattgtatctttaaatgccatccccaccgaagctttatccgtataaagttgggtctgtgacaaatcagcttccaactgtgtatcctgccagttcaatatctcagtggagacatcgagctttccaccaaggaaaatgcgtaccaacaaaattccgtttactcgtggaacccgagggattaccacatccgtcttctcaaaacgtgttcctccttcactggccagatcgacactcagtttaagatgactggtagttgtgtcggtcggaagtgcattcagataatcagttcctttatgagccggcacaataaaccgaagcgtatcactgtactgatgaccggccattgcagtattattatgtatagtaaaagtaccggtcataggctccgcactcacagtaggattgtttttattgggatataaccctccttcccagttaagagtcgtaggcacattagtcaatttcatcgtgtgagtgccattaatatccagtcctccggcatcggctatcacgactttgaccaatgcaacgttccgtgaaagcaatgctgtttcggaagcgacattatcctgaccggcaataacctgctgtccggtaatataagccgtacgcagctcaggcatagacggcaaactcccaccggcagaacgtgtttcccacattttcagtgacgaacgtgcctgtccacggacaggttgtatcaatccactgtttacatctccgtcagcactaaccaatgtaatatcccatgtccccgccgcaaccggcatagtgaggcggtctgcagcgtaagtcacatccggcactttctgcctgaattgtccggcagtagctccatctccatcaaacagatagacttgcgtattattgataatgtctgctgaagctcttgtcatcctgaaaaccaacgaaggattaccattggttccccccggcgattccctgtcatccgtacaagcaaacgccagaaaaagcagcaagcccatcaaccctgtatatattctttttcctgtcatagttcttttttcatccattttcttctgagcggacaagaataccttacactcgagatgcaaggcattcttctccccaagaatcattttatttccggatcgtaaactctgccgtacgttctgcatccgatacactgatcggctgtgcacctgtaggttggtttacagatttgattttcagtttcacctgtttttccaaagtatccgtgctgaacaataccactccattcacattggcggagctatggttaccgtctccactgatacgtaggtcatgcaggttggtaaagacaaagtcttttccttcttttgccgtagcatcgggcaatgtcacacagttaacaatgatatcactacctgtggcattggtcaataaagctccgtctgaagcacgcaacagcgaaacagtgaagaagcccgacaccacattattattcactctgtggtcacccagtgaagcaatggccagacgtgccggctgatcgacgacaattccactgcaactcaacagttcaccatcaaaagcaacattagaaccactcaggctatgtactttattaaaattcactaccacggttttaggaagttcatagcgggtgtcctccaatgtcctgacattaaaagatgatttttgcgaaccattggcaaatatcactctaggagtcaatcccatatcgaaatcgagcgcatcggctgtgccttctccatatataccatctactataatatttgcccccgtagcattggtcaaaggagttccgtcggttttaaataatcccagttcatataaaatatctttggatccctcttctccacgctcggtacgtaccaacttcacaactgcctgctgatcttcgataaccgctttccctacaggcttcaccagataactctgctgaacatccgacaatagcagttcaaagtctttcacgccttcgatcagatcattcgcttttaccggaacctcgatatcctgtttcaccagatagcgatccgccgtcccgcgtgaaggggtgaaagacagttttccctttaccggagtaaaattattagctgttgtagcagatgcttcacgagtggcatatcctacacttacaggaacaggagccccttcctttgtagtggcatatcctgtcagcgtgacagtaaataccgcagtagccgttccgtttaccggcttggttattttcacatccgaaacatagagtccatgtcccagtttgacaaggcgactaccactgcccagaaaaagtaactcaccggacgatgcagtcaatgcctgacgataaacagtaggtttattgtccgtcacataacggtcaaactctttttcacccgtagcagaatacatacaaacccgaccttcatccgaagacagcagtaacacttcaccgttattagttaccttaaccttatcaaaattaccatcaatagtgcggtcaaactcagctttacccgtcggcaatatacggacaaacgttcctctgcgtgcattgacatcataagttgttaccaccgattcacccgtagtccggttcatacccacacctctcacacctccattcgaggtaccggaatataaagctgttccgtcatttctcaacaaggcatagtatcctttactgccacttccacctaccaatatattaccattgcgagccacctgaagctgattaagcatcaccgatccctggttggcgggtatcagtgttttggcaaaaacaatatcaccttccggccgtattttataaatgatgcctccatcagtcgatgaattaccggtaacaatcaccgaaccgtcattgatattggcattcatacctgtcacgatgaaccgcttagccggaataacagttacataataaggcttccctttatcatctaaccggaccactgttgtctgttctttctctttgtctccggagaaagccgcacatatatattcagtcgtattgcccagcacctcgaattgatcacaataaccacttccggcattcttgtactgataaatcactctacccgatttatccactttcataagaataccttgccggctatttcctcctttcggctccatgccggaaagtatcaatgacccgctacgcagcaaagctcccttcattagttcactcccttgtcctcctgcataaatattggtaacaatatgaccgctacgatccaatatgaccgcccgtccgcttagtgtcacattgtcttttctgccttttgtattcatcacagcagattgcccgacaagcaggatacggttatcctccaactctgtcaactcgttaacagcggtaaatccggccagcggcaatgaaaagagcacttctccctctctgcctatccaggtaaggttatacttctgtccctctttacccaccatggccacttcgtcaccggctaaggggcaaaccagctgaatctgattcttatcgccatacttcttatcgaaaaccaccggcatatattgggctctcacttgcagacaggccatgatgcccagcaggaacagtatccacactctatgaattcttgtcttcttcatatatcgtttacttttttatatttctacctcttattatatatttcgacacgccttgccctacggttcacctgtatccaatcgatacctccctccggccagcgatgatactcaatttcctctttcacctcttccggagaaagctttatccttccatgagcctctatgccgaaacgtacgtttaaaccatgattgcgcagaaactccgcaacactttccgcccttcgctctgacaatgaatagttataactgtcactacctatctcatcggcaaaaccatcaaacctaagttcggaaaattggtaagtacccatttcattgataaattgctcgagtctccgtacagattcatcggtcaactcatccgaatcgaaatcaaaatagagagtcatcagcaatccttccggcgcatactgcttcaatgtgacagactccggagaaacagtttccgtagtgccgttcaacaacaaagcgccacctaaaattgcattttcctcactcatcccgtaaaaaggcatcccttgctgggttcccagatcctctactgtacggaggtaatagatatcgtctcttgaagccatttcacgatcggatacaaaataggctgttcgcaagtcaagcggacacatataataatcgttgaagacggaatttaccggataaggaaaatggctgatactgcccggaatcactccatctttatcataataagcactgaacagatcataaccaccgaatcccggcaatccgttagacgaaaagataagacgtcctttatagattacaggaaagatctcatcgccttccgtgttgacatccggtcccagattaacaggagtcccccatgcctgagcctcttcatcccaatggacaacatacaggtcgaacccaccgtatcctccgggcatgtcagaggtgaacaacaatgatttgccttcattaaacaggtaagggtgggcatacgaagacatctcttcctgtggaaaagccggaacatacttcgtaaatcgtttcttcttgttctttagcacagagtaaaacaactttgtacggaaaggacgtagcttccggtttgccatctctacggttgtcttctctttatcatactcgataaccgtagctaccatcgacttcatatccggtgaaaaggtcaccggaccattctgtaagtcagcaggtattttccggaaataaccataatatcttggaggtttctgagtctcaacaccggtttcaccgggttcgtcaagtgcataatagtgagtacgatggaagaataatttccccggatcattgaatttactgtaactaatggcataaaacggttgttccccataattaccaacccaaaattcagcgttcgatgtattcagtaataagcgttttgccgaaaacccgggatcttcctgaaccgaatggcgcatggcaagtgcctccaatgtattctgatagcgctgatagcggctatatatgtctttataggcattatccaggcaaatggcttctgctttgcgggcttgtccctgaaaacgcagagcatccacataatcacagacatcatctaccccgagcaaatccggacgcaagctcattgctttatcataatgctccgaggcgcgaccatattcccttaccatgaaatacaaacgcgctgttttgagatgaagcgcagcctgaccggcctcatctttttcacgcctgatagccgtttcatactgagccatcgctttatcaaatttctgcctgataaaattacggtctgcccgccgttctacccgccctatcttccgctcctgcgcaacggaaggcatagtccctcccatcagaaaaaggaatgcggcagccgacaggagaatctgtatcttcttctttctcatttcagcaactttttatcagtaacattatcggaatatattataggtgagatttataccgaacttagtcggacctatccacctcttcgtctttttacgttccaaagggaaattcacatattctccacccaaataatatttattgtattggaggtgcgcatatcccaggccaatattcagatccagcccccaacgagagttgaaagcaaatttatacccggtcgagatacctcccgatactccccaacctttacgacgatagctctgcaacggatcgttatgctttaataaaccgatattaaaattaccgtacatagcataggggccaatataaaatccatcccatgagtcgttagtataaaagttacgaggattcacataatagcgcaattcaacactgctctggagtgcccgaaacacttcttcatgtttcttgaataaatacggcatccatagcacttcaccgttcaccgtgagttgcctcgtcaatgtatactcaaagccgacgttaggcgaaccggtcagccaaaaaggaatattcactttgacactttgtgcctgtactccgctgattaagcaaaataaaacggcgacactcaaaatatgtcgtataactgatttcattctaattctcttttatatgtatatatgtatcattccatgtccgtatctccactctcgatatcttcgttccatcctacaaccgatatcttaataacggtataagattcgatctcaataattatacgtttaccatgcaataaccgtaacggcagtcctgtctccctttccgtaacttccacgggcagatggttgacaactgctccattttcatcgagaaatgtataattcaacctcatcggttcattctccacagaaggaataaaacgatgatctacctctaatacatcggctttctcctgtacgggtaatgttccgaaatgaaacattttgtcctcgggagtcaatcggccggtcagagtatcatttttgaggtattgcatcacaggtgctccttccgcaagcaattgtaccttctttatatgcgatacatcaccgggaaatttcttaaaccgaaccgttatacgtccggtatagcgttccagtgctgcggtatcggtctgtaaaatgcccggatgtacaattgcgggtacgaacttctggaataatatatccgaaggttgtacatatctgttcggtccggtagagctgcttttcagaataaaagcagaagcatccagatgttgcccgtccacaaacgtaagactgtccgtattggtataacagtatactttatattcgccgggagttaacctaaaactaaacaagcccgcctccatgcgcggatctttatcccatggagaggttgcataacgtgcaccgaccaatgttccggcatcgttatagaccagcactcgacaatcactgacagtcttgttcagaacttcgggtacaaaaacctgataattcgtttcatcttcaaaataatcatatgtacacgacgcaagcgaaagtaagactgctacaccagtaaataatactatgagaagtctgttttttctcatgttctataatttatttcattaatcacccccgaggtcctcgggagcagcaagcatttctgcttattctctgctcccggaccatgattccgaggggagtaaaaagaaagtttttacattataatatctgaatttacaatattgctatcccaagctgtaggagctcctacagtaattgtcaggccaccatattccgtaggagttacaggcacagtcgtgcttccgccggtacgtaaagtcaggtttacttcacgaatcacgttcggcacaaaattttctttaaccactccggaccaataaacagtagcttcatcgggaagagcagtaccatctcccaaaatatgtccggctttaccacgtcctgataccactataaaatactgacgctgtctgtcagccgtaccggtagttgcagaatcattaatgcgtccaccgttattggggaatacaaccacatctctccacatcgtgaagtttccgctcaaaatcgttcctccaggattataaccggatacgggctcagccgttttaaagacttcaccatccgagatagacaatatattagtagcagtcgaggtagcacttactcctccgtcattccctgccatcactttcagataatccggcaagcgataaatcataatagaagcgtcttgtgtaaagtcaacccctttggcggtattctcattattcgtatttccttctttatcctttacgttcagacggacacgcatcaaagagacttcacgtttcaaagcaatcggagatggagttgcagtagcatccgaagaaatgactacacccggaacagctcccataaaaatctcggcaggttccgtataggctgtattgccagccaaggcagtagcacaaaaagcagggaatgtacccgttttatacttcatcaccatgttctgtacctgtttctgacgtacgttccacatcccccactctacaggagttgtacctccatccaaataggtattgatagcatccgctgaacttttcgcatttgctatggctaccattgtataagttccagcaggcacatctgtataagtaaaagtagtattcccgtctgttggattaactacatctgaaaaccgcacgatattgcttgcgtcatacagcaaaatctgcacctgacggattttactccacgatgtttccggtactgcagtagattgtgcggctctcgtcttaccgccctgttccatacttgttccttcaaagttcaacttgactataaagttagccttcgagttccctccgggaacttctcctgaaggcagttcattgtgctccgaacaagcactcatagtcattgcagcaagcaaagaccataaaaacatagatttttttctcataaacaattcactttagtttctacttaatagttgattcagacagaatgttagtttcttatccatttggcctgcccgttacttcgtaggtaacgggattacacaaattccgagataaagaagtgtctttaaaggagttgtttttactaaaatgaatctttacggtcttaaaaaagacaataaaatcctttcccatctttcaacctgaaaaatggaaatatcttttgttgccttttccgaaagacaacccgctaaaaatgttcagctatttaatatctattgcaaaaataattgttttattatgcgtaattcaaaaaatatatttaaatttgccgccgatatcatctcccgttacctacgaagtaacggatattttttcaattagcaatcaagctattatcttcttatttttttatctgtcccccttttcttcttcgataaaatatatgtaataagagagctattcatccggtttacctcatcgtctctgtagggttgaaaataggtttcggttactttaaccgaagaatgtcccatagcgtcacaaatcaagcttgaattataattctgccggagggccgttgtcgcccaggtatgacgggcggtataagtactgagtcggtctctgattcccaatatgtttgccacttgtgtcaaccgatagttctgaaggcgtaacattcgggcatattgtccatattcatctttaccgggattctgtataatagggaaaagataaggtgagtccggaattgcatacatatatttctgtataatttccatggcttccttacccaccaccacagtcagtttacgactggtcttgcgccggtgatacgtgatcacatttccctgcaaatcacacctgcgcaagaaagcaagatccacaaacggcatccctcgaagcaggaacaaaagcacaaacagatcacggctgaaagccaattttccaggcaacggttttcggtctgtcatcagtctgcatataacttccggcgaaacagctcttttcaccgggcaatcaataccggtatgtactttattgaaaagacgtggcacgtaagttgccacgccccgttccaaagcctgattatatacagatctcaacatacgcatgtaagtagaaatggtattccacttaagctggtcagccaatagtttctgctcaaacaaagccagccattccggagtcagttggctaaaggtgatttcacgtccattcataaaatttttcagtcgattcaaagtactctgatatacatgggcagtaccattgcgttgttcttttttcagttcgactattcgcttctccataaatcgagtcaaaagttcttttttcattttaagtctgtttagattacaaattaaattatcgcatgcttttgcttatcatttcatatatcggactgatatttcaacaaatcgcaaaaagcgtagtgccataacaaaccaactgcatgattatctcttttttttagataactttgcagccttcgaaaaacttttaaccacaattggaatagaccgaaccggctcttctcaagacaccgcttcaatcatttctcagtatccacagtctcaggcttcacaacctgacttgtcacaagtgtatctttctcagtagtattacaagtaccattaaacctggctttcgattctatttcaagtttacatgtataaacatcaccattcattgtacatcccgatttcattatcaaatcttctgccacctgaatatctccctgtaacatcccgtgtaacacagcaccggtgcacgtcacatttcctttgatccttccttgaggaccaatcaccactttccctctacaggaaacatttccctctattattccatctaaacgtaaatccccttctaccgtgattgttcctttcaccattgttcccaatgctattgtagtcagtttatcaacaccgactttcacagtctttacagaataatcttcattcttcttttttccaaacatattaaaatctgaattatgtaaataaaaaaaggacgaacattcttctgataccaaatattaagtagattacaaatataagttaattataagacaggcagaaaaaaagacgggaaaatgatcgtatataaccataaaaaaggggaaaaaccgtttatcggtttctcccctctctcctattatttaattgttgcaaatagaattatttatattcctgccagctctttatctgaatatcttccagtttcagatcgcagaatgcctcgataaacgcacttgccagacgagcattagtgatcaacggaatattgtgatctatcgcaccgcgacggatacggtaaccgtttgtcaattcacgcttcgaatgattcttcggaatatttacgatcaaatcaaatttatgatcggcaatcatcttcatcacattattctcagctcccggtttctcatccggccagtaaaccggagtagtatctaccccatgtgcattcaggaaagcagcagtaccggctgttgcataaatcttatacccttggttgaacaacatgcggcttgcctccaacaaatcgactttcgacttcattgcacctgaagagaacataactccctttcctggaatcttaaagcctgtagcgatcatcgcattcagcaatgcttccgaaaaatcatcaccgatacaacccacttcaccggtagacgacatatctacgcccagaaccggatcggccttatgcagacgcgagaaggagaactgagacgcttttactccgatccaatcaatgtcaaatgcggacttatcaggacgactgtatggggcatcaagcataatgcgggtagctgtttcgataaagttgcgtttcaacaccttcgaaacaaacgggaaactgcgtgaagcacgcaagttacattcaatcactttgacttcgttgttacgagccaggaactgaatattgaacggccccgaaatattgagctcttttgcaatctgacgactgattttcttaatacggcgtgctgttgcaaaatagattttctgtgcagggaataccaaagtagcatcaccggagtgtacaccggcaaattcaatatgttcagagatggcatattctactacttctccgttctgagctactgcatcaaactcgatttccttggtattctcaaggaattgagaaacaaccaccggatactctttggatacctcagcagccatcttcaagaagttctccaattcttcgtcgtcatagcaaacgttcattgcagcacccgacaacacataagacgggcgaaccagtaccggataacctactttctccacaaatcccttcacatcttccagactggtcagctcctgccatgccggttggtctatccccagttgatcgagcattgcagagaacttattacgattctcggcgcggtcgatagaaataggagaagtacccaataccggaacagactgacgatagagtttcatagccaggttattcggaatttgtccacctacagatacaatcacaccgcgaggttgctccaggtcaatgacatcgagtacacgttcgaacgaaagttcatcaaagtacagacggtcacacatatcatagtcagtagacaccgtttcggggttataattaatcataatcgatttatatcccagcttacgggcagtctgcacagcatttaccgaacaccagtcgaactcaaccgaactacctatacgataagcgcctgaacccagaacaactactgatttttcattcttataatagttcacatcatagccctgaaccgcataagtcatatacagatagtttgtcaattcaggatgttcggaagcgattgtattaatgcgtttcactgccggaagaatacccagttctttacggcgtgcacgtaccatcagattctctttctccatatttcccaccggattcagcacaaatcgtgcaatctggaagtcggagaagcccagaaccttagcctcacgcaacacatcggccgggatatcctctactttatcataggcagacagcttagccttatagtcaacaatatttttaagtttacccaagaaccacggatcgatctttgtcagttcgtgaatacgctctatggtataaccttcctccatagcctgagccaatgcgaagatacgcagatctgtcgggtgagaaagttccttgtccagatcctcaaaatgtacgtcatcgttaccgacaaacccatgcatgccttgtccgatcatacggagccctttctggataatctcttcaaacgaacgtccgattgacataatctcacctaccgacttcatgctcgatccgatctcacgggatacaccggcaaacttggtcaggtcccaacgaggaatcttgcaaatataataatcaagctgtggagccacataagcggaattcggagttcccatctcaccgatctgatcgagtgtgtaacccaatgccacttttgcagccacaaatgccaacggataaccggtagccttcgaagccaatgccgacgaacggctcaaacgtgcattcacctcgatcacacgataatcatccgtatccgaattgaacgcatactgaatgttacactcaccgacaatacccaggtgacggatacatttggttgacagttcctgcaacattttcaactctttgtcgtccaatgaacaagtcggagctactacgatcgattcaccggtatgaatgcccagcggatcaaaattctccatgcttgccactgtaaagcagtgatcgttcgcatcgcggatcacctcaaactcaatctctttccagccctttagcgactcttctaccaaaatctgtttagagaaagcaaacgaactttcggccagtttcaggaactcttcttcattggcacaaataccgctgccgagtcctcccaatgcataagccgaacgaaccatcaccggatagccaatgcgtcgcgcagcagcgatagcatcttccatgctctccaccgcctggctgatcggagttttcatctcgatttcatcgagtttcttcacaaacaagtcacggtcttccgtatacataatagcctcaaccgaagtacctaatactttcacgccatatttatccagaatcccctttgtataaagttccgcaccacaattcagggcagtctgtccgccgaatgcgagcagaataccgtcggggcgttctttcttaataatctcttctacgaaataagtagtcacgggcaggaaatacaccttatcagcaattccctcggaagtctgaatggttgcgatattcgggttaaccaataccgaattgataccttcttctttcaaggccttcaatgcctgtgaaccggaataatcaaactctccggcttgtccgattttgagtgcgcctgaacccaaaacaagaacttttttcatttccttttccatttcttttattgtcattataagttgttatttctaagtgtccgcataaaaaaaatgcgttgccctcaataaaggactaacgcattaccaaagaactaaatatcgtttttggagaaaagagaagaagtagaccgattccgggtgaaatacactcgaatggagataatacttacttctgatttcctgttgattcattgttgtttcaaagtttgtgcaaagtaacgacttatttctataattacaaaggaatctggtaagaatattcgttttatttgttacttctgccgattctgactatctttgcccttcgattaaaaacaaaagtaatgggaaaagaaaaaatcatattaacaggcgaccgtcctaccggaaagctccacatcggacactacgtaggctcgctgaaacggagagtcgaactgcaaaactccggctcgtttgacaaaactttcatcttcattgccgatgcacaggcactgaccgataatatcgacaaccccgaaaaagtacgtcagaacgtaattgaagtagctctcgattatctggcttgcggactcgacccggaaaaatcaaccatcttcatccagtcccagattccggaactgtgcgaactgactttctattatatggatctcgtcaccgtatcgcgcctgcaacgtaatcccactgtgaaaacagaaatccagatgcgtaactttgaaaccagtattccggtaggtttcttcacttaccccatcagtcaggctgccgacatcactgccttccgtgccacaaccgtaccggttggtgaagaccaggagcccatgattgagcaagccagagagattgtccgccgtttcaattatatctatggagaaaccctggtagaaccggagatccttttaccggataatgcagcctgcctgcgcctgcccggtaccgatggaaaagccaagatgagtaaatcgttaggcaactgcatttatctggccgaagaagctgatgaaatccaaaagaaagtgatgagcatgttcaccgaccccgatcatctgcgcgtgcaagatccgggtaaaatcgagggtaacaccgtatttacatacttggatgcattctgccgtcccgaacacttcgaacgttacctgcccgactatccgaatctgaacgagttgaaagcccactatcagcgcggcggtttgggtgatgtaaaggtaaaacgtttcctcaactccattatgcaagaagagttggagcctatccgcaaccgtcggaaagaattcgaaaaagatattcccgccatctatgaaatgctgagaaaaggctgtgaagtagcaagagctgccgctgccgataccttgtcggatgttcgcaaagccatgaagataaactacttcgatgatgccgaactgatcaacgaacaagtgaagcgattcaacaaatagaagttagatacataagtaagcccagatacttatctataaaaaaagaacgccctgttaccggatcgataacagggcgatttcttttaaagaaagtcaagtccgaacttatttaacagactctactaatacaactcggtttaggtaaataggtttaccgaatttatccacaccaccaccggcatcaaccttcaagcggctggaatctactccgtatttcttaaccaatgcattgacaacagcctgagcacgtttctggctcaactccttattgaatgcaggagtaccggttgctgagtcagcatatccgtatacggtatattgtgtatccgggaattctttcatcttggcagcaagataagacaagttcatctcttcacgtggtgacagttcagaagatccgattgtgaagaatacggtacgcggagcaatgttagcatccgtaacgactacctgttcggcaacttctgccaccggctgattctgtgcgtcaaccaactgctgttgcagtgactggttagcagcagccatgtcattcatttgacgacgcatattagccagttcgatttcagaaataatctgtggcatcggacgggcaaatccgcgagccgggaaacgataagtcaaaccggcagtcaggctggcaacaccgtcatatccatgttttccgccaatttctccgtcaaacttatcttcggccagcataccaccgatttcgatattgatatctaccgcactcgaaacgcggaaacggttgataatacctgcgttcatagcaaacgcctcacgatgaggtttcgaatatgaatgagtaaaaccggctcccaaataagggataatttcatatacacggtgagagttgtatccgccaaacagtgcattcaagttgaacatcacgtccccgtgaagattcatatagttgaatttctgtttataatacccattagccagtttaccactcttcacaaaatcagctgtttccgaaccggcaaagccgcgtccctgtaagccactgtactgcaatcgcaaccccaatcccggagtaaaccatttaccgacagccacattcaatgtcggactgatacggtccctgaatttcccgacatggtcattatcgccgaacagtgcttcagcacctccgccgatagagaaaaaccaattatcccagaaagggttagtgatcacttgatatttgtcttgtacctggataacttcgtatcccgtaattgtagtctgctgcgcagaagcaacagatgtaacgccggctaaggccagcagcattagaatctttttcatataccttaatagttaaagtggttattacaaatcttcctatttattattgaaactatttaaataacaccaacgaaactaaaaggttttggataaatagaaatttccgaggcattttctacaaagttcgggggatacaccttattatatatagtcctaaagctactttgacctatttttgttccatgaaaatttttcgtaacggcataatcaatctttccagcaggcgaagatcatccgtgataatttccgcacttcccttcatctcacgagtcaacggcaaggtcttcccataattggttgtcagtccgtccggtaaggcaatatcgaccacatacatgccttccgccgtcggcaggggcgatacacttttcaccttcccctttacatagccgaactcctgatccggatagttgttcaaacgcagatttacccgctgtccggctttcactttacccgacccctgcaaaggcagcaacgccgtccccacaggcaaagattcttcttcgggagcaaccacaaatactgtagcccccgattccacgtactgattcacactccatacattcaggaaagtaacctttcccccaaccggacttcgaagcagataacgctgctcccaggcggtgagctgactctgcaactgatccgtagcatttctcagattcacggcctgtgtctgcttctcctcaaacgcctgtttctccagatcgagcaatgtctcttccgattgttctatctgcatatccacctgagttaactgcatgcgggccgactcccttgactgaagactttgcaggtagcgactcccagactgttcaaactccgtaataatcatcgcctggcgatgatagagaattgaatctcgcgtatacgaagcatgagccagggcatactctttctctatcagaaaatactggctccgaacctgaccataatatttcttctgagtctccaaaagttccctctgcgactgtaacttctttgcataataccccaattcattcatacgcaccatttcggagagagtactcacaaacgccgcataggccgactgtatctctcccagccgccagcgatctgtttccgaatgtagaaaaagccctttacccgactcaggcgtatatccttcctgtttccacttccgcatccgctcttgcaaggagaatacatccgacgcacaagctgtattctctattgtccccagattcgtgtcgggttccacctcctgaccgttttgtacatacagattctccagtcttccggctgctcgggccactacgtaagccggaggatcttgtgtgcttaccgtcacctccgcagcaatcacatccggatatttaaaccaatagcttccggcaaccaatgccaccactatgacaaacagcaccgtaatgccactgcgaagaatccatgccggaacacgattcatcacttcctgcacctcttcgctacgaagctcgatctctttatgtgtgtgctccttttccatatctaacttcctaattccaactgattcttcaccaactgataatacaatcctttcttttccgtcagttcccggtgggttccctcttcggctacagcacccctatccagcaccacgatcttatccgcatcacgaaccgtactcaaacggtgcgccactaccacaaccgtcttaccacgatagaacgtgtgcagatgctccataatctcgcgttcattgttggcatccaatgcattcgtcgcctcatcgaaaaacaggaactcaggatttttataaacagcgcgggctatcagcaggcgttgacgctgtccctggctgatgccgtttccctccatgccgatcttcgtattataccccaaaggaagagaatcgatgaagtcacgaatgttggccactgtcaccgcatggcgaaggcgctccacatccacctgttcctcccccacggcaatattatttgcaatcgtgtcagagaagataaagccatcctgcatcaccgaaccgctcttcgcacgccagaggtgcggatttaccacatccagaggggtctcacctatcttgatatcccccttattcggagtataaaagccaagcatcagcttgatcagcgtagtcttgccgctaccgctcgcacccacaatcgccgtcaccttgtgttcgggtatgttcaggttcacatcattcagcacatagtcacgatccgcaccgtcataactgaacgagagattctcgatacgtatatcacgccgttccggaagaaccgtcagcttagaggcaatatcctgctcttcatccttctgcccatgaatctcgttcaggcgctccagactgatcttcgcatcctgcaactgctgtgcaaaaccgataaaagaaccgatcggaccgcttaactgaccgataatatacgtcagtgacatcatcatacccaacgtcatatttccctccacaaccgatttagcagcaataaaagagatgacaatattcgtagtctgattaaaaaagacagaacccacctgttgcacctgtcccagtgccagaccttttacgctgatcttgaaaagtttcacctgaatacgttcccactgccagcgtttttgtttttcactgttgttcagtttgatctcctgcatggcagtcaccaactgtatcaaactactctgttcgcccgccgcctgggcaaaacggcggatatccaattcgcgccggtacttcataaacacaagaatccagcagatatagagtgaattgcccaccagaaagatagcaagaatacccagattgtaataagccagcacaaaagcaaagataaagaagttcacaaaagagaaaagcgtactgatggacgatcccgtcagaaaactctcgatacgtccgtgatcgcctatacgttgcataatgtcaccaatcatcttcgtatcgaaataatggagcggaagcttcatcaacttcgccaggaagtcagagatcagcgaaatattgatacgcgtattcatgtgaagcataatccagctacggataaactcgaccgaaagttgtgaaacggaaatcaccagttgtgaaatcaggatcagagtgataaagttcaggttaccgtcgcgaatacccacatccaccaatgactgtgtcagaaaagggaaaataagctgcaacaagctcgctgtcagcatccccagaatcagttgaatcagttgtttacgataaggagacaaatatttaagaaagaaacgaagactgcgactgccggattcttcttcgtcgccctgcccttggaattccggacccggttcaagcgcaagtgcagcccctttctcctctccattcaccttagtagacaaccagcatttcttaaactcctcctcactgtacgaaatcaactgacgggcggggtcggcgatatagaaacggtagccgctacgtttcttctttatatcataacagaccacgaagtgattctggttccaatgcagaatgcaaggcaacggtacatccttcttcagttgctccaaagagatgcgcacccccgaagtacggaaaccgatcgattccgccgcatcgctgatgcccagcatggaaactccttcacgggtaataaaagagcgtgcacggagagtttgcagggagtagctcttaccataatacttcgcaatcatgcgaagacaggaaggaccgcaatccatagcatccaactggaggtaatgaggaaaagaatttaatttcattgattcataatattagtctacgtaacaaaaatacatcacatatccggaatataatgcgcttctcccggaatttgtgaaaaaaactccccgaaaggataatttgcccttttcccattcagaaaatccagtaacagaagtatcccctcataccgccctttttttaaagctttctcacaagcacttttcaaatcagacagatagttttttgcccctatccttacacctttatctcccgaagagagtctaagcaatacataccatgaaattccttccaatcctgtagctaaagagtaatcgcccaagcgcctgacatcatactccatcactttctcatcaatcttattgcgcccttcattatcatcatcttccacaaatcccttccggaccagatattccaccccccaacctataccacaccatccgaaagacagaccgaccggcatccctaagcagacactctccatcacttcatccagcaattctccggccagttcctcaaacgccctcaattcagtgacacgtgaataatcaaaaaagaaaaggcaacgtcccatctttccataaaatagccctatatcaaattgtttgcaagagaagtaaagcgattttgctatttgttctatatgtgcatccatcttattctttttttaacaaccaacaggtatttcataatcaagacgatatagttcttttatctttgctatctgtttttcatccttcagttcaaaccggacagatgtggcatttgccttttcttccggcatatccactcccctttcggctaaaaaacggttcaacttgctgagaggtacaatacagtccacatcagcagaagtataaaaatcagattgcctgcgtatatgttcatcctgccacaacggatttgccttccccaattcaaactcaacgaacgaaagaaagcgttcaaaagaacaatcctgatacagattacacatgtacatgtattgattgaaggtacgttcaagtataaaatatttataagcagaaaccagcctttctaccggatccctccaaaccgctaccttcaaatacgatttatgctccctttcataaccagacatctcagaaaccggtaccaaaaaacgttctggttttacccgggcgatataaaaatgagtctgatcttcggtatcaggaatcatacctgctgacgcataaatagctatgttttccaaaaaagtaagtccacatttcgaaataaggacaaaagccatacgatgcttctctacaagacaaaagttgcatccgaagaagtctaatggtggtttggttagcattgcaatatctttcatgacatactatgattttcaaggtctaacatacataaaatgaagttgttcagctccctgccatcccccctcatccttccatcgtttggagccggtcataatacagtttcatcctgttgaggatttcctcactataccatctaccaagagactcttgccgcctgagttcctcacaaacacgaagcatctctcccgccctatcgtacaaagttgtataagttccgtccggatgcaatgtacaggcagtagaatatatctgcaacagccttacatagagtgcttcctttgcctctctatattttttctcaaacaagtgcttacggctatattccagtaacttctcaataatcaattgaatggaagcaatccgcctgcccgctgccgtcgccgtcataatcgatccttcccgttgccggtaataataaaaatcaatatcggcaaccgttattttttgagcggttgtcagcacctgaggagtccataattcatcttcatgaaccaaccccggttcaaagcgaaatccattctgttcaataaaatccctcctatataaataattgtataccatggggacataacacctgcaatccatcactcttgaaaaatatgtactaccggacactacggtgcctgtcgcaaacaactctctgccccttctttcccaactttgcacctgtccatcggcatgcaccgccagtgtgtttcccgaaacaatatcagtacgggtcttcgctgcaatagcacataacacctgcaaagcattctctgccaaccagtcatcactgtccagaaatgccagataatgcccggaagcatgttccattccggtatttcgtgcagcagagagcccttgattctcctgttccacataaacgaaacgagcatccttacccgcatactcccgcagcaacctcccggaattatccgtcgatccgtcgttcaccaaaatgatctcaatatccgttaaagtctgcttctctaaagagtgcagacattccgccagaaaaggttccgtattatagaccggaaccaccaccgaaactaccggtctttttacctctttcatatccctcccaattttagttcgtgtattttttggcaaagcctgattaacggattgctccggacttgctctaacttttttgtaaacgacaataataaaggccgtttcctccatgcataaaaacgttcatacaatgcctcgtcatcatagcattgattcataaaagcggctactccctcgggagaatcgaaagtacaaatatccagaaaacaattttctcccggagcaaattcccgaatattgggagctcccagatagaccggaacagtaccggccaacaaaggattgaaaaacttttctgtcacataatccttccctatcgcattctcaaaacttatcacaaactgataatccccgatcacactaagaagtgtatcccgtccccgatcctcaacaggtaattcacaattacggtatagtttcccatacgaatcgatgtcggtatactgcatcaattccttaagatactcttgtcggtgactccggttcatatcactcgaaataaacatacatgccttcttcttataaggcttttccctccgtgccgtaaccagcatcttcccataatccggtccataataaggatacacaatatcatcctcctgatgataccccatccataagtcaaaactctctctgaactcgggatccttcgtccaactataattctcttcacattccagactccatcccacccaaagctgtccttcccgcttatcgatttcatcctccatcaccgaaggcaagtcgggcaaatggaaaaccacggcatccgcctttgcaaggaggtttcgatcaatcgttatcacacagcccccaggtaaatcttcctttcggaactcgagtggaaatccccacatcgtattataaaaaagaatcaatatatccatctaccatctatcttttatcaagctgcgaaacacatttatctgccactattcattctatctctttcaactttttccacggaatcctccctttacccgtcatgaagaaataagcgaataccggttccgcccaacgtacggcaacaaaaggtttatatctttgttgtaaatttctatacgacagcttcacaaaggtccctaaaggtataaacctctccggatgtttccggtaagactgccgatagccctcttcatgctccttcatcagggcacgcaaatgaaaccaacaaaagccgacatccaatatttcattcggacaacgcatcacctccaccccccgatgacggccatccggcttcgtttccgtcacatacctgaatatccggtccgcagacacctcaaaaaagaaagtatcacgcacgccattgaacggagggagtatctctttgctatcaggctccggatgttcctgccccaaccctaccatccactcccggtctttccggaacaagttaatgcccgacatcgagacaggcactttataccggatgatcatcttctccagataagaagcatacgacgcatgtgtccacaacgcaattcgttccagccacctgaacggtcgcatctctatacggttgaaagagtccacataagcccgatacaggttgtaagagatacattctgccacgttgaaccgcacttttttatcagaacggtaagcatcacagatatgtttcagccgatccgtaaaataaacctgatcggcatcgatcttcactgcgtaccgatagcttgctttcgacaatgcatagttgcaatagcctgccaacgtatggatagagtcgggcggcaacagctttgccttctccaactcctcctcatccagatcgatcggatatacagacggccgatactcaaagaccctgattttatccggatattgtgctgccttctgcctgagaatctccggcgtacgatccgtacaatcatgatagacagctatcaactcatccaatccatcgatacacgaatcaatgcacatctccaaaaaatcctcacaattcttacagcgtaatacccccgacaccccgacgggccgttcgcgtgtcaacgtatccgtatcaaccacataaatctccttcaaagtaacaggaggcattttttctttaataaaccctaccatattccggagagtttcttctcctgttgcctgaagccacagaggttgttccttctctatcctctgtttaaaatcttcataattccccaaaatccgggacaaaccgccggtcaactcctctttcgttttcgctatcatccccagcccctcggcttccacatccggagaataccgcgatccctcagtcggatcgtacaccaacgggacagcaccgtgtgccactccctccatcaaagaagaagaatagtgtgccacccctacccgtgtgcgggcaaatacctctgccagctttccatccgttaccatttctatattgggaatctgctcccattccatgcgtacctcctcacctatcctgaactcgggatgttcacgcaccagaaaccgccgggcgggaaattccacggcaaccgtccctatcagacggatcatctcttgaagataccttttgtcactcagaaaaaaaggtccctgcaagaaaaaagtaacacactcctttttcgtctcattacgtggttccacctgatacatataacccgtcgggacaaagtccggcaacggattatgcttctcccacaaagtccggaaaccttccccccacatcagatagtaccggtaaggcatcctcctgaaagctgtgtgcatcaatgacggccatccctgctgaatacacaaggtcggtactccataatcacgccctatggtggcaagcaataactgctggtaatggcagccttccagaaaaatcaatcctttaggttgcaagatcctcatcaatatatcaaatgtattcgcatattgaaaaatcaaagggaaccactctttcaggaatggattaaccaatggagctgttttggtaaattcaagagtaatggccgttacaaagtccggcaactccgtttcatccggaatctcatattccgacaagagcaacaccggttcttccagacgttcaatcaacggagtcagataaaccaattgacgggcattataaatatagatcaccaactgcccgccataaggtgccagtgcttcataccattcatggtcgtagattttgtattcctcttcctgtcgctcccattcttccacctgcttatctgccagtatctcctttacgctacccaatgcttccccacagctctttccttctttacgtaaccggtcgtactcctctctatgccatgtgaactgccagaatagtaaattgatcaaaggcacgcccacatcatgcctccccattttcagccaatgttccctcttttcccgcaactgattcacgtagtcagacagcaccctatccagcacctcataatactccacataatagtcccgtctatccatatctttttttattaaagcccggtttcaatataatgttcagccagtctccagtccgcttcttcatcgacatctatcatccctgcaggaccgacctccaccaccttcacaactcccgaaagaagctgcccggagtccagtattcttcccaccgtagaagcatagaaagctcccgactctatcagaaaacctttgtactcctgtcggcgaggtttagtttcgaatgaatagtccaaaggtctcccctcatcactccaacgaaacttcttcaaacggcaacaggcaacataggaatccgcttccccccttttcatctcttctacaagcccccttagttcttgtgcagtcgtaaaaggagaagtagcctgtaacaaaataaaatcatcattccggtccggcttacgataattaagatattcctgtacaacttccaggctggaagcctcatcccttgcactccactcactgcgcctgaatatctgtacaactcctttgtaacggcctcgtatcagactctccatttcatcacaatttgtcgctacacatacctcgtccgctatgccggaagcaaggatggtatcgataatccaacataccagaggtttatcccccagcagacgcaggttcttaccgggaatacctctactccctttgcgaaccggaacaaaacagaaagtacgattcataagctattatcatttatggtttcacatgacagaggttcggttttccaatagccaattcataattagagggcgaaggacacagccattggtaaatgcagtcacagcaaggtttttgatcgcggatgcgaagccaggaatgaccttcggtcatctctttatacaatacagatgctattgtatctttctccataactccaatctcagcatggttaacatttgcatatattttatcatcaggtaaaacagttaatcgcccaaaatcattcttatttattttctgactgacataaaaatctctcttctccaaacaagtattacaaatatcagtctcttccaagtatacagcatctttaaaaaaagaaaggttatcttccttataaacaggtcttattgatctactctctaacgagtacttgcttaccaattgctcagcaagttcatactcattatccgatgtaatcaggaataaccaccgtttattctgttctatgccttctaccgtacggctcagagaagaaaatagttcctcatcaaatttccacatcggtaccacaaaagttaactgcccgattgtagcattcaaaagttttttatggttttctgtaaaaaggtcgtatcgataataaagctgaatactcatagatttttgctccagcattccccatatttcatttaagtctttatacatcaacacatctccacccaataaatagacttgacttatttgcttatctatacaaccatctaaccattgcaggagttttctgctatccatctctttatcgctacataaatatgaagggatctgtttccagattgaatcgtcctcttcctcacaaccattcaaataaagatatatttcttctaagtaattcataacttgattatccttctctacccattcataagtattcaatctttcaaaatccctctgattatttatgaaaggaggaaagatggcgggaggaacgctcccgtctgaaaatggaagaatatcaccattaaacgtttctctaagtctattcacccaaaaagataccgtttgagtttgaagattttcgtctgataatatagtgtatttatctgtttccagtttatccagaataaaatacatatcattagatacatctattttcaataccttcttatttaaagtattatagaaaaggcattcacccttttttcgaaaaaaaagagtataaggttctatatataagtaataattcattgcattaaatattaagtactaaaaaataaaaatctctttcatcacttttgaatatgcccaacgattatgctccaaataatctacattcatcgctaaatatccggcaaacatttctcggtttttaaaattccggcaaacaactttatctgccaacacattggtataatacatacactgagaacaagattcctgcatataacattgtttacactgtgacaaaagcttagaacaatattttctgtgattctcagcaacatgggcaaaattcagttccacaccttcatcagtcacatgcccaacagcaaagtcatgatcaatacgctcacaaactaatattttcccatgtaccgttacatacattttacgattaaaaggtatgcaagtccccgtaggcaataatttaaaattccttttcccataaaacatcgatcgataatctctgaagacctcattcgataaatgatgcaaaaagtaagtcacagtagaaatatccggtgcattatacatcaactgctgatctatttccttcctacgaggagaaagagcaatactttgaaaaacactttttctcatttcggcatatttcccttcttgggcgatactggaattgttcaactctgacagagaagtctgtttatcaaattccgcccgaaaaaaatccacaattctttcaatattgctttcagaatgaattacactgttaaagcttacatactttttaaagtactcaggataacaaaattgtaaattctttatttgctcgaaaacttgtgcaaacgaacttttaccattcactgttacccgatggcagtcatcagcttcagtaccatccaaactaaccaaaagatgaaacttatgctcaaccaaaaaatcttgatatacacgcaataacatggcattggttgtcatattatatgcaaatttcataccttcaggtttatgttcgtcaatataagaaacaatctgctttatcagatccatattcataagtggttcaccaccataaaaaccaacagtaagagtgcgagcaactgataagtgaggtattttctcccaaatgccaaataaaaaatcaagtatttgttttgcctttggaaaatctaaattctcacctttccgctcatcgtatccataatataaatcaccaaaagcacaatagcggcaacgaagattacaacgttctgtaacctcgaaagtaagaactgtcaggttctcaacttctcttcggaccatagtttcagtgatctctccaaactccgtcttcactttttcaccaataaattcgttttccttcagaaatttatatttttgtaaatagtgaagtatctgctctttaggataacatttcagttcttcatcttcctcaatatttttcttttcttccacaaccgtataaatccttttcaagatcggatgaagaggcaaatattccttatgccgaaacgaataaacataagcatgaaacggagtagaaaatgcaatatcatttttcatatatctatgtatttacttgcttcctgatttgcctcgaaagcaatagatctaacataattacaaatactattatttcctccacaaaatacatatatcttgtgatctgccaaatttctttaactaaggctattcaactttatttcgtcttaatgctctcataatatttaaaatttagttattgtttcagttttccaatgataagaatgtcattatcattctcgtgcagactatttcgtaaatcggtggcccgtttacgtacgtcaagctccaaatctgtttgggtaaggactttatctaaagcatccatcagttcaagaggatcataagagatacaaatatatccattattcatcatcaaaaaaagatgagataaacctaaaagaggatcagtaaagcgatcaatgcgccgtacattgccatcctttttcgaaacgcaaacattaaatgtagtcagacggacagaaaaagcacttgaagaaatatcattcggatataaagtgacatatgcccaatagctccttgaagtttcatataaaacagtagaagcactttgattttcagaaacaacatgatctattgtaaagcatggagttattatattctttaccgcatcatagtgatacaaagtatcaggacgagtacgcaacatgggtatttcagaaatagaaaaagaaatcgcatccacattccgacgtgccactaaagcattactgtaatctccaactaaaccgtaatgatttacaggaatccgatgcacgatatcaccatccctattttgcacccagcacacattcttattaattgcaaagttcgagttcacattagcagaaaagggtaaagtaaccacaactacgttttttttatcatagtccacccatatctgagacttatgtactatttccccgaaacgaataacctcatccggcagataattcccctttaaatcatagacaagcaccttgtcggctcttcccggacctaaataaatacgattttctttctcatccaccaaccatgaaaataaatataaatactctcccgggccttgacctactccgccaatatcagccacatatcgtcccttgcgcgtaaatagcttaacaggagatacaacgtcagcaggtcgcaacaaaatataattatccgtcacatatacaccatatggataggttttaataagcgcctcatccctattgtccaatctaatgatttcgtatgattccattaaatcacccaaagacatcactgtccctttggtcttctctattatacgcaaatcaactgagtaaaaagaattatcctcactttttacattaaccttatcagctgaacacgaccataaagttacaaaaaaaataaagtataaatattttttcatatactctctttagctattatcaatgacaagcaataatcaaccgcttgtcattgataaaatacattcatgactcaacgaatatcaaattaatccctcaaagaaattataatttgaaattagcccaatttgcctaaggcatgccaggaactttacttccgccataaacggccatatcagaaccactgccccctacccagttacaaataatattaccttcaggagaatacttatcatcagctacattagcactatagttagtagctttaaattctgctcctttaatacaagcacatccacaagtatgccccccgcgaagcgcattcatttcacgatccgccaaatcttcctgagaaagattggtcaatttaatcttactaagttttttcatggtcacaaaattttaaattaa

SEQ ID NO: 5096 - DNA, 41632 bp, Unknown
  gut microbiota DNA sequence
gtatctcactaactcgagttacaaattcaaatagatagagaatatacttgattcgtaaaagtatatcttctcctcaacaactccctaactttatatccccgctcctttattagcttcctgattagctgctaaagcataaggtccagtacagccacatgtacaagataaagggtatccgcaatccttattaccctctaaattacttgccttagaactaacacccatacagccacaagaacagttactcccaccacgaagcatattcatttcacggtctgccaaatcttcttgacttaaactattcaatttaatacgtctcaatgttttcatgatatttaaaatttagttattgtttcagttttccaatgataagaatgtcattatcattctcgtgcagactatttcgtaaatcggtggcccgtttacgtacgtcaggctttaaatcggtttgggcaagaactttatccaaagcttccatcaattcaagaggttcataagtaatacaaacatagccattgcgcatagttaagaaaggataagaaagtcccaaaaagtcatttgtaaaacgatcaatgcgcttcacactaccatcttttttagaaacacgaacattaaatacagtcatacgaacaggagctccatctgatagcactttagctggtccaatagttactctactccaataatattccggagtctcatacaatgacgttacaatatatttatcctcctgcattacattatctaaagtaaaataaggtttcaatagattattagcaatatcatagtgatatagagtgtcagggcgtgtacgcccgacaacctgacaaagggagaaagaataggcatcaacattccggggagccaatacttcattactataatccggcacaattgcataatttatagcagatattttttgcaagatattccccttaaaatcttgtacccagcatagattcttactgatcggtgcttttggatttcctatatcagcaaagggaagaacgaccactacagctttttcattttccaaatctatccaaatggaactcttcgttatcgtttccggcaatgaaatactctcttccgataaaaattggcctttgagatcaaaaaataatatttttttattttcggcaatagccacacgtccctgcttttcatcaagaaatctattcacagcatatttatactctccagggccttgaccaactccacctatatcagccacatatcgtcccttacgagtaaataatttcaaagcagaaacgccatctggctctattaagatataattgcttgaaacatcgataccaaagggataagtagcaatcaatgcctcttctctgttatccaacttaataatttccaatgattctatcaaatcagaaagcaatatttcttcccctttcattttctccatttccagtaaatcgacagaataaaaggatatattattctgcttgacttcttgtttacatgaatgaaaaaaaactcctataaatacgatccatgtaccccaatatttattcatccgcatatttattaaattgtatacatcaaagataagtgttgatcagacatttatctttgatgtaagattcatacctttaagtaaagtaccacaaagacacacactatacaacaggtgtatttctacctaatagagagataatatctcaattaaggcataccgggagctttgcttccaccgtatactgagatatcagaccctgctcctcctacccaagtgcaaatgacattaccttctggagaatgtaaatcacgatcttcattcgatgaatgattcgttgccttagaagtagacgaacatgcacatccacagttatgtcctccacgaagtgcattcatttcacgatccgccaaatcttcctgagaaagattggtcaatttaatcttactaagttttttcatggtcacaaaattttaaattaataatttaattatatatctcactaactcgagttacaaattcaaatagatagaaaacatattctctgacatcttccgtaaagtatatcgttcctcaaatcgcctcctatacttctccgaccgtagatgctcttgatcttcgattaaccactgcaccaataaatcaataggtagatctacactatcatcttcttctttcaatggtaaacaatgcatcccttctaccatttcttttaaaccggtagagcctgttcctattaaaggcagtccatgcattagcatttcaatggctacatagctacattgctcatgaaaagaaggcaaaactccaacatcagctatctgataaaaagtatacagcacctctttctctaccttccctgtaagaacgacataagaccatataccagcacattgtttcagatatttatcataatcaccatccccaacaatcactaaccgactattcggattctttctgatgacttgccgaaaagcttcaatcaaatattgaactcctttaatccgatctaagcgccctacaaaaagaataatcttatccgtctccctaaatcctaatgcagatctcttttccaaacgctcctccttactcagtttaatcgcttcatcctttaagccgttataaaccacaaccagtttttctttttccactccatagtcttcacgcagcaaattctgagtatattggctcaaacatatcactttatccgaatgctgaaacaatcgtttgtctcgctcataactattccgtattttcttgccccactcattcgactgctcttccttatgaataatcgaacgaaacaatcgagtatttccctttaacatgaaacaccaatccaaataatgaatagtcacaagtaaatagaattccactcctatcttcttcagccagtctgctaaaggggcatgatgcaaataattcagatgcaacacgttttgctcatccttcaagaaatgcagcgcaagcaaataagctatattccgataacaatgcgcaacatctccttttcttccctcactcttttgagcaggaattttcaaatagcacacttttcccgaattatcacactcttccgtcacctcttttacctccgagttcagttcaacaatagttaatctcacagaagaagtctgcctgaaaaattcaagcatttgccgaatataagtcccaactccatactgagcggcacggcttccattccctattaaataaatatgtttcataaagctatcatctttaatccatatttccaggatacttcttcttctatattccctatatcaatcactctcacaaatacatcgtccaattctaacctcatcctcagtcccttttgctgaacagccatttccaattcgcttaggtagacttgatcaaaaggcatccgattccggacagtagattttaaacgggaagaggcataacaagcgactccctctaaccccgactcaaatgaaagatctgtagctctccgaggatcccattccattattttttgatctaaatcttccaatatctcatctgaatcccctgctataaaagcattctgaatcaggtactcaaccccccagccaatcccacataaaccatcggaaaaacgaatcggcaaatcgctgtgaagttcctgaattacttcctccagcatttccccggcaaagtcctcataaagtacacgccccgtataacgggcataatggaaaaagaacaatacaattcccattttgccattcagtactcccagatctctgcggaaactcccatgcaacatctggtgatcggctattcgttttaataatgcttcgtccactttacccattgtttttccaggattttatatattcacgcaattcgttacgctccatgctacacacttttataaactccatccggttttgaaacgccaactcctctgtagcgtacccggagttttctcctcgaggatgccataaatgatataaagggccctcttttacccaatgcacaggatatcccaatatctctattcgccggatacgttcggcatcttccggtccccaactgacaaaacgttcgttatctcctccccaatgcaaatacttctcccgatcaacaacaaatactccaccacacgaagggcgtctcatcaaacgggcgtatgtagcggcgaacattgtcagatagtcgcatccttgcccggaatattcaaacgcctcactctgagcctccgaaagcattttcacgactccgtcatacggaatgcttaacaaatagccttgctcaataatcgcaagtacagaagcctctatttgcgataaagggagtagtatatcagcatcccagattgcaacaacaggtgtagaagcggcctttagcaatcgattgacatacaatgttttatgataaaccaaactttcatctctttcgtaagtataggtgtctttattactggcaaagccggacaattcacttcttacatcaccggcttcccatacatgtatttttattcccgacaaagacaaatgacgaagtaagacctgaagatttctcattcttgccggactatctatccgcacagggatgccaattgttatttgttcggagtacttcatagtctttttatttattcatacaatattttatcaagtcagaaactttggtctgataaaaccctgtaggatataggtcaaataaaaaatcaagcaaatcatcaacaggctcatctacacgcttcaattcctcttccagccaatctatcaaatagataaaatactctttcagcaaagcactggaaaaagtatcaccaaataagaaggttggagtgatccggattaagatgtagcgccccaatccaacaattccatttcgcaacgagaggcctgacaatccataaatatgaatacaccttatcagatacagatcaatatctctcaatatctcatcgccatcggcatctacatagccatgctgtatcagatattcaataccccaaccgatcccgcataatccatcattaaaggagatcggcattgaatagttcaagttctggcaaacatcatcgagcaactcactggcaacttcttcataagctaactcaccggaaaggcgaccatagcagaaaagagcaatggcaatccccatttttccgttggtgagtccgaggcaggacgtagaacgtcctgcctgaactaactccctaaccaagaaatgcttattcccaattaatagtgaaccaaccatagacgtatcctcctgctggcgttgtcaactccagcttatagtctcccctttcaaaatcttctacagaaatagctaaggagttttgctgatccgaatttatacaagaagaatacaatatccccttctctgaaagaatacgtacagtaacctctccggaatgaactacaaaagatatattaagaagagtattatctacaagagacgcttccacaggtgtcaaagggagtgattttgtatgagtactactgaatattcctttcaagtccagattaattacactattaatttcattaggagaaggaaaggaataagattcagcattacctttaagaatgacagcaaatagaaaaataatcgtacttaataagtgtttcatagcaattttttttagttaaacattaataaacttatgctacaaaactacaggttccgaaaatgaaaagcaaatttgaagatggacaatatctcaatatatatcacataaaatcagcaacttacatcaactcctttttatttgatggacaaactggtttgactacccgtccgacagaagccatatcaggaactccaagttcaattttaagtctctgtttacgtttactcaaagcttgagctgaaactctcaaaatagcagcttgacgagcatgcttcactttgatatattcaaaataacaaatggcaaccactcttctatccaactcttcatcatgttgcttttggtactgatctataaattttctcaaagaattaccatagagcaaatcaatacattggaacaatccttcccaatcgtccacttttaaagttttaatttctgaaagatcacatgttaatattctgaccaacaaattaattgatgcatataagccaggagtattctccatatcagaatcttttaatgactttatcttataagacaaatccttatttcgagctctcaaatcaatatttatagacaattgatttttccatttctttttcagctcttccaattgttgactaattttgcaggaatgttctttttcctgttccaaaagtgcatttgtcttttcttgcacctccaaagagctctgtttctgttcgctctttaattgttcaagtttctctacatgcaatttagagtcactcaactctgccaataaccttgctcgctcttgttcatgcgccttcatatttctattgaattcctccttttcaatctgtcttctacgcctttctttcatatagaacacatagataaccgaggttatactcaataataacagaattaccgataagtaagatatggtggaatgaagtctttcattttccaatttaaaagtgtgggcttgcaacgcagcattattatatttttcctgaatctctttcactgcataagctaaattctgtcgctccaaagaatcaagagcttgttcatattgatcccaataaatcaaatctaaatttcgtgtttcaagatgccccaaatatttatatgcagaaacacgggtatatggtcgcgaagaagcagctgctttcaacaaatatccttctgctttagaatagagtttattagacaaataataaattccaaggctaagacatactggggttttatctaagactaagtctgattccaaatttgacaaaagcatttgttctgctgaaggagacatctctaaatacattgaaatctgtccccactcagaaacaatatccttgtatatatccgatttagaataactgagagcatcgttgatagcctgctgataataaagagaagcactatcttgcctaccctctaataaataaatccgtcccatatcacgctctgcatacacaagattggctgtatcagttaattgttgaaataaggagaccgattgactattcattattaaagcatcttggtacaagtctaaattcatatatagttgccccaaatgattgcgcactaatgcctgatatttaagattgtctgttacatccaatatagagagagcttctaaaaaatatttctgtgcatcctctaacatgccccttgaagatttaacccttcctaaatagaatgacgctttacccttttttagcctatcttttccatttgaataatagccaacagctatttgtatcaacgaatccgagctcaacggtaaatcattcttatccattgcctgggtcaacagtaggcaataatcagcttggttttctcccgtcaacttttccggatccggtatttgatgaagatacactaaagcactatcgggacattcctccatacacatttcggcctgacgtaacaaacgggctacttgcccctcagaacgcccatcggtacaacttaccaaaaacaaaacaaataacaatacgcagcagatataagatgatttcatctgtcttcaaatataatccaaaataaagaataaaataagttctatgaacccattcctcaaaagtacaattatatttttaaatatcaacaataagtaaaataaagaatagaacagacctattctttttccggaaaagtatatatctatccggtggatcatttaataattttatcgcaaataccttgtcggttattacagcatattgtttctttaataagaaacccgccattgatgtggactttgtcaatgacgggcagtttagattattctaagattgtatcgaatcacgttaatattattatttcattcaatcaccttgaacctcatttctatcaataaccaccggtattttataagatttaccttgacctcgtcgatttaactttgtattctcttctatagtgatcattttaataggaatttcatttatagcaataatttcatcaccttctaacaaaccggcttttttaatataattactctcataatcggcaattttagtaataataatttttccatggctattcatacgggatgacatgtggaatcgtttcttccgaggattgaccactcgttcgtaattctttattggctgcaaacctaatctttgtgatttcatgtcgaaaaaacattaaatcttttaagaaaaagcattagtttttcagtggttctaccaaaggctatactataaatattattccttaaatttagcgataagcaacaccggattatcttcgtcattcaattttgaagcaatctctttcaactctcctttcaactttccttgcccgttaagttcgataagcttctcggccggataacattgtatggcatagttttcaggcactacatgataattggcggacaatcgcatctggaatgccggaacattggtagcggacacaccatccctgtttaccagatcgacccggcaatattcattagtgaacctgtcatacaaataagataccggatcagaaacacggttgttcttcacatctatatcctttactatcgtgtaccaaagcaaataacggccggtcatcacatcaaccgtcgctaaaatcggaatattgttttcgcttgtatggttccggcggacagtcaatggaatcaaatggtcatcacgatatacatacgccgtatccaaagaataatcggcaatcaaaatatccgaacccaaacgggctacgggagacatggataaacttacatagccgccagactcaccgtctcctaccgtataaagtccatcccttattctccccttgaccgtgatgggaaccgacgttaatttcccgtctttcttggaaattttgtaataaggcgttttattaacaggatacttcccaatctgatagtcgacaaggcgataatcttcgccaaacaggaaattttcatcatactcaaatatcgaagaagcaaacatgcggttttgcggcagtttaagcgtgcgcctgtatgcgccgccataaccatacacctgaattctgctttgtaacccgtcatagatgaatatctcccgggctttttcatctatacaataaccgctgacaacatccccatattcttctccgctcatgcctgtatgattaaaagaatgaagatatttccctgacttatcaaaaaagataacatcacttttcttgtttacggtaacaagtaagctgtccgtcataaggatggtacgggtaccgaccaatgaactatcgccggtttccaacacgacatatcttacatctgcgatatcctgaagaatgatttctttctcggggtattgcccctgcaaatcaaaaacaggcaatccggtgaacggctcgacaggagtatttacacatgccggcttctctttttgagaactaccggtacaggccaccaacgcactaagcactaaaatcaaatataggtttttcattataaatctgtttaaaaatgtataaaatatttctctgatagaatttgcatgaacagctttctcctccttctccaacttcactccgacctgcggcagatttgtgcataaagcccaaatatcccaacaaatagatgacttactttcatttatactaatttatgagaattaaatattgtcacatgtcagacctccgtaaattaaaagcaggcaatctaacaaatggtttaacactatcaacaccatgagcccatcctcaaaaatacaattatatttttaaaaatcaacaataagtcgaataattccggttggtgaaattcaaaaaaggtatcaaattctttcattcaaattaacactgttaacagtcatttcaaaatatcttttttggaggatgcaaagaacaagtcttttgcatttaaaagagctgttccttatcaccaaaagacttgttttaacagtgtgttaaaacaagtcttttaccgacaaacagcaaatcaacagaagcatctaatttacagaataataatcaaacaaatcaattcattttccagaagtttcactgatatattatataggaagataattactattttgacaagtagaacacatagtatccccaaatgtcatttattaacaaagaagagctaactgcttccagcggtatatactctacatcagctacttcacgtatttcaatacatttcactggataatcacgggctttatcaatgccaatcaccgatagagagaaatctttatttctcaaaagcctattttagcctttctttatcataacggccaaaccatattctctagctttgcattgattctacttatttatatttacatatcattaatatatcattatcatctatactcaatcgggatgcaatatccttcagctcccccttcaacccgcctgcttgatattgttcaataagcctttccgctgtaaacatgcttataccataattttctctatcagcagactgaagtatcatagtcgacacaggcctttctatatcggaggaataattataatcatacattttccattccgcaatcttgcctgtatgcctgtttaacacaagctcaggagcatccgccataggagacataggagcagaaggattatagtacatcggaattattctaaaatgcaaatatgaatcggtgtataattcacaagcgacaatgaccggtggatctgatgcatataccgaaggagtctgcacggcgataggaaccagtttgtgatgacgatagctgtaaatagtatccaaagcatagtcggcaatcaagaaagcatcgccattttttatcagcgcggttatgagaaagaggacctgatctttataagcccctccgggaaatttgacgatctctgtatgtaccttctcactgataggtttatccacaacaatcccgatggaagacatctctccgctctgtttatcgatcagatagtaaggatgcgtatccacctttttctttttgcgaaagtcataaaaccgattataacctatcagataatccttatcataattatacagatcgataaatgtgcaatccttcataggcaaagcatggctacgtttataccgtccatcaaaagaataaatatatatctttttcctgaacgaatcatagatgtatatttcttgcatgccaaaatcggcatcccatgcggttatagaactgtactcttcagcagatcctcctcgccggttaaaagtccacaagtacctcccttttctattaaagaaaaagatattgccattatcaacaccacttgcgacagttatataatcatctgaaatccgaaaaacagaacaatccgacgcaagcagtgaatttcgtgtcgtttctaaaggaacatactctacatcggcaacatcatgtatattcactttctcaacaggatattcacaagtaacatctatgacacacaaagaggaatccatgtcattagaaaccttttctttagtatgagagcaactacatgaaatgagaagcagaagccataaatagattttatccataaacctaaattttacaagtattattatacttactgattacatccaaagaatctcaggttacataccgttataccagatctttcgtctaaaatatattccgtttcagtctttcaatttatagaaagcaataatcggattatcatcctctcccatttcatcaagaagcttcagcagttcggcctgcttctcagggaacttaaccttagcttcagcgacgttgcgccttacctgatccaaattatccggtgtgatgacgaaacaaaaacagttttcacccacatctttcatattattatttcctctaaacgattgtgtaccatcaatatcatttgtgacaccgggagcatcgcgtatcatccaatagcgaacctcaaaaggcacctgctcccaagaatctattttatctttatttttatcataacggctgaaccacattttacaattaaaccaataactaaagagaagatagtctttcgtttcgcagacacttttaatcagaataaaatctcctaaatccaaattattgcaaaagttatatttttcgggaggtagcttgtactttcccaaagacaaatgataacgaggaaaaatagaatcacaggtaatcccatagatagtatcatttataagtgagtaaatattacttttcccttgataattccatgaaatgtccggatcgattgccatatcaatcttttttgcctcaacaggcatttctggaacttgttctcttactatttgcccatctgtattaatgacacaagcgctgatgaagccttctttattacccggaaaataaatgataccgggataatagatcagacaattatccattatatcaatcttatcattaaccgacacaggatacttcaaagaaacctcctttataaagtcattgttttgtgtatcataaatcataaaactgctactacggctcaaaggataaatgaaaactctattatcattggtcgtaaaagactgtatattggacatctctccgggaccttgccctacacgtcctatcctacggataaacttcccggacttatcaaacatcataatgtgattctgtcgacgtgaataaataaagatatattgctccgtccgctttagctgctttatatcaccgactaatatattatcctgcgtttccagcttcacatactccacatctttcacgatgtcactcagcaataaaggcttgccgcaatctttcaggttgttagcaagatcaatttctttaaaggtttcctcagtcggtagagcgttatcatccatcatatccggagaagaagacttgctgccacaagcagcaagaaaaaacaataccaaaaacaatgcgatataatctaacttcataggacgataatttataggttattactaatagttggatttaagtttcccaatcataagaatgtcattatcattttcgtgcaaactatttctcaaaccagtggctcgcttacgtatttcaggctttaaatcagtttgggtaagaactttatctaaagcatccatcagctcaagaggatcataagagatacagacataaccgttgcgcatagtcaagaaaggataagaaagtcccaaaaagtcatttgtaaaacgatcaatacgcttcacactaccatcctttttcgaaacgcaaacattaaatgtagtcagacggacaggagaagaatttgaagaaatatcattaggatataatgtaacacgtgcccaataactccttgaagtttcatataaaacagtacaagcactttgattttcagaaacaacatgatctattgtaaagcgtggagttattatattctttactgcatcatagtgatacaaagtatcagggcgagtacgcaacatggggtcttcaaaaatagaaaaagaaatcgcatccacattccgacatgccactaagccattactgtaatctccaattaaaccgtaatgatttgcagaaatccgatgcacgatatcaccctccctattttgcacccagcacacattgttactaatttcaaaattggagttctcattctcagaaaatggcaaccccactacagttacatgctttttatcatgatccatccaaatacaaggcttatgtactatttccttgaaatggatagcttcatctgacagataattccccttcaggtcataagtaagtattttatttgctcttcccggacctaagtaaatacgtttttgtttttcatctatcatacagaaatgtatcgttttgtactctccagggccctgtcctataccaccaatatccgccacgtattgacctttacgcgtaaacaacttaataggagatatagcgtctggattcagcaagatataattatctgatgcaaagatcccaaatggataggttttaataagtgcctcatccctattctctaatttaatgacttcatatgactccactaaatcactcaaagacatcactgtcccttctgctttctctattatacgcaaatcaacagaacgaaaggcggaatcttctattatatccccctctttgggtacatatgaagagcaggaagcaaacattgcaaccgaaaaaagaaagagaagcgggtagaaaaagtgtcttgccttcatatgaaatagattttagtttaaaacaaaagcatacagtcctaaaaacatgccgaaatatacggatcatttataaaacatcattcttttagaaatatgtttattaaattcatttttgttttaacctaccaaaaagaagaacactattgccattttccgacaatccattataaagcttttcaactttacccctcatcgcagtatccatttcggaaagtttcaatatctgcgatagctgctctttcaattcaataggctccatccagagataaaagtatccgaatctaaactgggcataatataaatctaatgaaagcccaccatagcctctggaaaaaagttttatataagacgcttcgtgggttttcttatcgactttgattactgtataatctaaggttgtaaagggccccctatcatttgtgtagcccgacgataagccaacataatagttcaacggggtgttcagataacgatgttgatgcccttctttaccaaaatcggcataaaagaccggtgtcaatacgtcggtttccggataataatgatacaaggtatcattcataccttccaactgctcaaatcctgcagaaacacttgtataaaaagcttctgtattaaacatggtctgaacatcattcccaaaatcgggctttagcgtgtatggataagaatgtattttccccttaatatttccctcaaaatcctgtttccaaacaaatgggctttgtccggcaggaacatcaaagcagtaaatcatcttatgctcactatctactttaaaactgcctttatgcaaaatagaagctaaaggaatatcatgcaaatattgacccttaaaatcataaaccataatttgggaagcttcaaaagtattcagataaatgcgctttgccttttcgtcaatttggtgatacagcaaagcagtgtattcgcccggcccctgtccaaagcctcctacattacataagaagctcccgtctcgggaaaacagtttataggtacctcctctttcagagggggtcaggccaatatgttgttcggttatatacactgttaatggagcacacagtgcctttttatcattatccaaggggagaataaccaaagagtctaccaaatcttcgatatacaccttaatggtatctttcacatccgatacggcaatagaaaagaaatcttcattatactccactcgctgttccggagacttgggtacagatgaagagcaggaagcaaacattgcaaccgaaaaaagagatagaaacgggtagaaaaagtgtcttgccttcatataaaataggttttagtttaaaacaaaagcatacagtcctaaaaacatgccgaaatatacgaataattcgtagaatatcattttttaggaatatgtttattaacactattaacaaaattaccaaaaagcaaatggttcttcagaagtattaacctcctacttgattattttctaaataatagaagaatattttgtttttcggaaaataaataatatctttgtgtcaaattaatgtgttatgagaataatatcatttgcagccataagaaattacgccaaaaagcacgctgatgctgatgtacctttgcgtgattggtataaaaaaacagaaaaggcagattggtcgtgtttggctgatataaagcaaacattcaatagtgttgactatgtaggtaatgatagatttgtctttaacatcaaaggcaatgattacaggctggttgctatgattttgtttgctgctaaaaaagtgtttatccgttggataggtactcataaagaatatgataacaaagattgttaaaatgcttaaatttgtttggtatggcaaagataaaaacagaaaaacagtacaaggcagcttgttcaagaattgaagaactgcttaaggtggttagtaatgatactccaaccgatgataaaaacttcctcgaattggacttgatttccgatttggtcgcagactatgaagaggagcatttccctatagaagctccttctttggtggatgttattaagcttcgtatgtatgaaatgggacttacccaaacaaaactgtcagaattgttaaatgtaagtccttcccggattagcgaatacctttcaggaaagtgtgaaccaaccttgaaagttgctcgtgaaataagccggaagctaaatattgatgctaatatagtgttgggggtataagtgtaagtttttgtcgtgatatattttaggcgtgattccatttttaggtttcacgccttttttatgtcattttacgacaatcgcttcattgtcgtgtatcacctatctacctgagttcgggataagaaattagtgtataaaattggtaatcatatgattaatttgtatttttatagtgttctaaatcaacaaattggaactgtttttctaattacttatcccgaactcaggtaataattcgtagaatatcattttttaggaatatgtttattaacactattaaccatattttcagtgataaacaagggatgaacaggttcttaacttcccggatgtacgaagttaagatcctccctgtacgaagttaactttaacattgtgttaaagttaacttcgtatagaaaggatattagtaacatattctgctggttattaacctattagaaaggagatgcaataaacagacataaatctgtcgatcgtgtgagacagaatggaactgacgtaatacttattctgataagtacagaagaatgataattaccggaaaagcttatcgatctcttcttcttttatggtagtcagcaccacgcgtccgtccggcgtatagttgggtgaaggacaggcaaacagattatcgaccaaactgaccatctcttcgttgctcagcacctgcccatagacaatggcagccgcacgggcaagagtcaacgcaaggatatcctgaatttcttctttgacatcattgcctttctccatagcggtgtgcagcatgctacgtaccaaatcgaccggattcagcccgtcgatgcctgaaggtactccgttaatggcatagctgccgccaccaagatcactgagatcaaagcccactgcggataaatcgtccatgatactttgcaacacagccgcctcggaagccggaagttgcaggatttccgggaaaagaacaccttgtgagaatccctgcttctgctgaatctgggcacgataacggtcaaagagcacacggatatgtgcgcgatgctgatcgatcaacatcaatccggacttcacggacgtaaggatgaagcgccctttgaactgcaaatgctgcgtacctttttcaatcacggccggctcaccggcataaagagtttcgggagccgctgtagcaatgctctcttcttcgatcaccgcaaactcttccgattcaggatcggagtcggagaaaggctgattcatcttactggctttctcaagaccgccatacaaatcttcccagtccactttcggacgggagtagttgcctccaccggaagaagaggagggcttgaacgggttgaaatcggaattgaaatgtaccttaggcggcgcgggaggcagattctgctcaaaagcaggaatatcgggcatgtcctccgtgtcgaaatcgatagaagggacagcattgaacttgcccaatgactccttgatcgaagcagaaagaatctgccagatagcctgctcgttttcaaatttgatctctgttttggtaggatggatattcacatcgatgttggcaggatcgacttcaaagtaaatgaaataagaaatctgttcgcctgcgggaatcaactgttcgtaagcatccatcactgccttatggaaataaggatgacgcatatagcgcccgttcacaaagaaatactgatgggcgcctttcttacgggctgtttcgggtttggctacataacccgaaactttcaccattgtagtgttgacttctacactgagcagttgttggttaagtttcttgccaaaaacagaaagaatacgttgccgcaaatggcaagcgggaagattgaacagttcggagtcattgctatacagtgaaaaagcaacctcaggatgtaccagggcaatacgttcaaattcggccagaatattactgagctcggtggagttagccttcagaaacttacgccgggcaggaatattgaaaaagagattcttaatagaaaaattgcttcctttgggacaagacaccgcttcctgactctccactttggaacccgcaatgataatcttggttcccagctcttcggattcgggacgtgtcttcagctcgacctgagcaacggcggcaatggaagccaatgcttcaccgcgaaaccccatcgtgcgaagagcaaacagatcggatgcttcacggatctttgaagtggcatgccgctcgaaagagaggcgtgcatcggtttcggacattcccttaccgtcatcaatcacctgtatacaggttttacctgcatcggtgaccaacacatgaatattctgcgcctcagcatcaatggcattttcgactaactctttgatgacagatgccggacgttgtatcacctctccggcagctatctggttggcaaccgaatcgggtaataaatgaatgatatcgctcataatagatttagctttgactgttttagtttataggacttagaaagaccaactgccggtctgcaaataatgccacagaaaaataagcagggcaatgatagccagaattactcccaaatgggcgggtttacgtccgctctctttacgacgcttcaggtgtgtggtaccttcgataaacttcccgcgaatatcttcgggagaaaattctttctcgggcaatattcccagatcacgcttggcatcttcttccatttttgccagtttttctttcctctcgtccacatagatatattgatgattaaatccacgcggctttcgtacattgaacattcccatagctatttcatattaattatttcacgtttcggaccactaatagctttacgttcggttttacgcaaagcctcaccggcctttttccctctccagttgaaaatgtcttctttacttaaaggacggacataatcaaaccaactaaaggtgggcagtttcattttgtcgggcggaatctgattcatcggataaagtgtaccattcgactttggactcattaccattctctccattttccgatccttaagatacatatttagcaaactggtttcggatgtgttcatgccaatcatcgtactatcttgctcctgaggataataaactaccaggacatttcctatcacatctaccttgcgagcttcaccttcggcaaagtaagccttgatctcttttcccgaaatctgattaaaatgaatggagtctttctgttctaccgtaagtgcctgattgatgatatgggcccaatcaatcgtactgtcattcatatagaccttaatctcttcacccaacagttgttgcccttcgttccaaagaataggatcgcgatacatagtaaggcaggaatctttcgtattgaaaaccaaagagtcgcaaacaccctgcaaatcgatgctgtacatacgcactttgtggaaagcacgcatctcacggaaaagagaatctgtgtcaagattatagctattcatcagtaatgtatcggcatgcatgaaaagactgtcgccacgcgaataatccacagccacggcacgcttggtggcgagggcattctgcttcagctcgtcataataacaataatcgccggtaagcatgttcttattcaccgtatcattcatctgcacattatcgaacgcttcgccatagccggctttacggtcatagaaaaggctgtctccggtcaatcgcttgccatcattggtcagtactgagcgatccagcagctcggcttgtccggaaaccgtattgtaaatgccacgttcggagtagatgtgattttgttcactgacaatatcagagggtcccaggatggtggcaatcttcgtatccgtgctatacttcagggtatcggaagtcagtacaaaacggggattaacaagcttgacgtcgtgattgaaaacggatagtttggtggcgggactgtattcgccccaatcagaagtcagcacgttttcttcatccatcaaggtgcctccatcaaaataatagcccaaattgtacaaacggtcataattcagactatctgtcaacagggtagtattccggttgatcatttttacattctcacgaagctgcgctatctgggtcatgccgtcataaaacagataatcaccatagatgaaaagggtatccccctgctccatacgtacattactgaatgcttcgaaagaattggttttctcgtaaatcaaggcactgtcacaatacatgtacatgctgtcatgacgcaacttgaccgaaccgatcagcacctgaacatcggggcgggccaacttatcggcctgtccctgatcggcatgaagcaagtcgacacgtgttttctttttaccctgtgccttttccggttcaactttctgctccggctgcgctttcttgtcatgctgaggtttcttgtcctgagccatcagaaaacatacagcaagcaggcatagagtacccgctaagagaaatctatgcctgccttggaatttattttctttattgaatctaaacatatcaaaataggatcagtcttttttaatccaccccggatatttaaaatcgcaacgctgccatgccggattaatacgtacgtatgtatgcttctgtttttcaacgatccatttctgcaacgcttcttcgcgacgcttgtcgagcacgatttctttcaggttctggtagtcatcggtgatcgtggctttatgcccgttgatacgtgacttcagtttaacaatggcacaaacttccttaccatctttaggattaaccattgtgaaagctttggaaatctcaccgatattcattttatccaccactttagcaatctcctgcggcaaatcctgcatttcgaatttagcggtctggttctgcgggttctgcatcagaccgtggttgttgcgcgtatctttgtcctgagacaaagcagaagcagcctgatcaaaggtaaacttatcgctacggatatcgttggcaatagagtcgagacgcgcattggcttcatccaactccttatccgacactttgggcttcaacaggatatgacgggtgttgatacggtcgccacgtttttcgatcaactggatgatatggaaaccatactcagactctacgattttagagatcttcttggtatcctgcaagttgaaagcgacattggcgtattcgggaaccatctgccctttacccataaaaccggtttcaccacctttgatagcagagccgcgatcttcggaatacagcagggcaagcgtagagaaatcactttcacccttattgatacggtcggtgtattcacgcaagcgtctttttacatcttcaatttcggcaacaggtattttaggctgctgcgtaataatctgtacttctacctgggtggggacgtaaggaatactgtcctggggaagctccttaaagtaacggcgtacttccgccggagtcactttgatatcacctaccagtttctgctgcatcctttgtacaatcaatccgtcacgggcattctcgcgcatggcttcacgaatctgtgtagaggtcttattaaactctgcttccattctttctctgctacccaaagcctgaatataattactgatctgatagtcgacacgctgtatgacttctgcctcgggcacttcaatactgtcgagcacagcctggtgcatataaagtttctgtacggccaactcttcgggaatcacacaataaggatcaccatcaaacttacgcccttcatacaaagcggccagtcgtgcttcttccacatcggacttcaggatagcttcgtcgccaatgacccaaaccacttcgtcaatcacattgtcctgtgcataggatgccacgttagcaaccagtgccagggcaaacataacaacaaacttaaagttcacaaacttcttcattctgtgtatttaataatttataatcttctttctttttactgcacgctcgtacagatcgtctttcacttgtttcataaagtcaacccgcttgatgttgacaagcatatccttgactttcggctgggcaaattcataaggttcctgttcgcccgccacacggaaatcactgatattcagaaaatagtaaaatgccgtatctttcagttcaatatggcggtttttatccatataggcttcaggggattccgctttcaacgggatcatatccagcacatcggccacccgcacccatttatcataaaaatactcatacttcactgcgttttgcaaactatacttttccaaatgctcaacggcatcctgagtctccgtcttgtaccacttacgcacgttgcccagttggggagcggtcagaggaactttgataaacagacctttcatcaatggacggtccagcttaaacagttctttgttcttttcgtaatagtctgctatttcttgttcggggatctcgcccgacaatttctggctgattagttcttgctgataagtatgcatgatcaatgctttccggtaattctcgaccaacttatcgatttctccgttatcgggaatattgctttgcgcctgattgaacaacaaaacatcttctacccagctacggacgtagtgctcggcgaaaagaagactgtcatcttttgacaaaccggcagggagcacggcctgaaggtcttctttgtacaaaaagtttccatcgacctctaccaaaggagtctgtcctttgtggtcatgcttgtcggcacacgacgcacagaaaaggagagagattagcagaaggcccgtttttcgcattgtcaactgaattatacttaatttaaggtacgaagataatacaataattcgttgcatcagtgattattaaccgtttttaaaacctcttggttaatttcaaccttagctgaagctctgagacgttctgtccaaagtgcatccagatgattctgataatcccggatcaattggggaatgatctcatggtaggactccggccctttctttttctcacctagaacaacagtaaaaggataggactttaagggttcgaaatctccttttttaaacactaacttatcaacaaaaacattgtcaccttcggcaaaagttccttgttctatccggatagtggcaggcgaagcaggagtattaaacgtcaggcggatggcgtctttccactcttcctcgggaagtttcttcaagaatttacgtgcacttttcagagtctttttatgggttccatgtaatacggcacccctgtaacggggcgaatcccaattgtaatcggtccggtgttccttaaaaaaggctttcagcgcaacagcatcggacagactgacctgacgcgattcgcgacgggttatagcggctaaaagcagatcgtcacggcgctgttgcaaggccagtcggaaatcaggatatttctgttcaaggcgattgttttcgtaatcaagaattgatttcacaacaaaggcattcaattgtcgttttatccccatgggatgggcatcggcaaaccgttcaaagtctttcccggtaaagctttttccgtccagcgtaaaaagagtgcgggaagtcctgcccgaggcaagcaactcttccatcccggccttgtccggagtatattgacaggtactcttcaacttgttcacccataactcaatttctttatccgtacccgggcgacgggagagtttatgaatcaattctccgcgtatctgttcgaatggaggaatttcccgcctgcctgtcaccttgataatctgtatacccttgggtgtaaaaaacggctttgaatactctccatcttttaaagagaaggctacttcttcaaactcctgcgaagtctgcaaccaacccatccaaaactctttcttatcatccgagtacttgtttaccagtgtcctaaagtcaatatcgggatgggcctccaagacatgatagagtgaatccatcaagatctgttcctcccgcaaatgatggggtaaggcagtctgcagaagataacggaaaatacgcataaccttaacttcgccggcagcagagcgggttttcatctgatcgtagagtttctttgcgtaggcctcatcggtagcagaatcggtaagataggacctggataaggctcgatgataattctccatctctgtacgaaaatcagaaacagtatccaatccggccttttgcgctgcagacaacttcaacttcatatcgacaaaaagatcggcacagcgtttcagagtctccttcccggctattcccgaaggtttattccggtggcagaaacgctcaaactccgaacgggtaatatcctgcccattaatccgcatcaataccggatcttgctgggcatggccggcaatcgccccaaacaaacaggtcagtgttccaaccagaatcttcttcatatcattctacattcagatgttcatatcaaaacaaaaaaaatgagcggatgttacggagcacctccaaaggtgatccgttcaacccgctcaatcgatattttcaaagaatatctgccaatattccttttgtctttttactatctattactccggacggctgtaattaggcgactcactcgtaatcgtcacatcgtgcggatggctctccataaccccggcattggtgatgcgggtaaacttggcatcatgcagtttctcgatgtcgggagcaccacaatatcccataccggcacgcagaccaccggtcaattggtaaatcacttcatataaagttcctttatagggcacgcgggcggcaattccttcaggaaccagtttctttacgtccatctcgccactctggaaataacggtcttttgaaccattctccattgcttcgagcgagcccataccacggtatgacttaaacttacggccattgaaaataatcgtttcacccggactttcttctgttccggcaaccaatgaaccaatcataacgctatatcctccggcagccagggctttcaccacatcgcccgaataacggagtccgccatcggcgatcaaaggaatgcccgttcctttcaaagctttcgcaacatcataaacagccgagagctgaggtacgcccactccggcgacaacacgtgtcgtacaaatggaacccggaccgatacctaccttcacaccatcggctccggcttccaccaaagctttggctgcatcccccgtagcaatattaccaactacaatatcaatgtcgggatagcgttttttagcttcgcgcagcgtgtcgatcactccctttgaatgtccgtgggccgtatcgatcacgatggcatcggcaccggcatctaccaatgcctgcatacggtcgaatgtatcagccgtcacacccacaccggcagcaacacgcaggcggcctttcgagtctttgcaagccatgggtttatccttggcctttgtaatatctttgtaagtcaccagtccgatcaactttccttctttgtcgactaccggtaatttctcaatcttatggtactgcaaaatctgtgaagccgcttccaggtcggttgactgattggtagtcaccagattttcttttgtcatcacctcgtcaatacgcttatccatgttacgctcgaaacgaaggtcacgatttgttacaataccgactaaatatctattgtcatccactaccggaataccaccgattttatattcggccatcaatgcgagggcatctcgtacggtagatccttgcttaatagtgacaggatcataaatcataccgttctcggcacgtttcacggtagccacttgcttagcctgttctttaatggacatattcttatgaatcacaccgattcctccctcacgcgcaatggcaatggccatcttagcttcggtaaccgtatccatggcagcagttacaaacggaatctttaactcaatgtttcttgaaaactttgtcgagagatcgacagtgcgcggtaaaacttcagaataagcggggatcaacaatacatcatcataagtcaatccgtccattacaatcttatcagcaataaatgacatagggctatgcgtttaaaaattattgcgtgcaaatatacagtttttattcaagactgcataagtgcacgcaatttttttcgctttttttaattagccatttcggagataaacttgatacgaaccagacgaacttcttcttcggtaaattcgtcaccgagttcgtcgagcgcatcgtcaatcttatctgttgtcgactccttgaaataatcatagatgtcgagcatgtggtcttcgtccataatctcatccaggaagtaatcaatattcaacttagtacccgaataaacgattgcctccacttcatcgagcaattcgctgaactcaatacccttggaaagcgcaatatcatccagggctactttacggtcgatggcttgaatgatggccactttcatcttcgatttattggccaccgtgcgtacccgcaaatcttccggacgttcaatctcgttttcttcacaatgcctctttatcagcttgcagaactcttcgccgtaacgtttggcttttccggcgcctacaccgggaatgttctgaagctcctccagcgtcaccggatagatggtagccatcgcttcgagagacggatcctggaaaatcacataaggaggcacttccagttttttcgatagtttcttccggagatccttcagcatggaatagagaaccggatcgaccgcacaggaacctccgcctcttgccggtgtttcttcttctacttcctcaaagtcattgtcttcggttatcttgaacgacttgggatgtttaaggaatttctttccggcatcggtcactttcagtaatccgtaattttcgacatccttgctcagataaccggctatcagtgcctgacggatcacggcattccaggttttgtcttcttctcccattcctgacccgaacacttccagatcttcatgtaagtgcgcctgaacttcggacgtttcgcgtccctgcaggacatcaataatataatctgccttaaagttttcttttaccgctatgattgtttcgatcacagcacacaataattcttgagcctccacttgttttttagggtttaaacagttgtcacaatttccacaattttcttccgtgtactcttcgccgaagtaatgtagtaatgtcttacggcgacaaacggaagattcagcatacgcagcagtttccaacagaagctgcttgccaatttcttgttctgccacaggtttgccttgcataaacttctcgagtttctgcaagtctttgtttgtataaaaggtaatgcactggccttctccgccgtctctgccggcgcggcccgtttcctggtaatacccttccaggctctttggtatatcatagtggatgacgtatcgcacatcgggtttatcaatccccattccaaatgcgatagtagctacaattacgtcgatcttttccatcaggaaatcatcctgattctgcgttcgcgttgccgaatccatacctgcatggtaagcacgggcgttaatcccgttggcttgaagtatctcagcaagctcttctaccttcttccggctcaggcaataaatgatgcccgacttttccggattgttcttgatgaactttatgatgtccttatctacattctgagttttaggacgtacctcgtaatacagattcggacggttgaacgaagacttgaagacgtgtgcatccaccattcccaagttcttctgaatatcgtgctgcaccttcggcgtggccgttgcggtcaacgcaataagaggcgcttttcctatttcattaataatcggacgtatcctgcgatattccgggcggaagtcgtgtccccattcggaaatacaatgcgcttcgtcgacagcatagaacgagatctttactgaccgcagaaattctacgttttcttccttcgtcaacgattcgggagcaacgtatagcaattttgtttttccggcaagaatgtcagaccgcacctgatcaatcgcacccttattcaaagaagagttaatgaaatgagccacaccatcttcttcactgaagttgcgcatcgcatcgacctgattcttcatcagggcaatcaacggagaaataacaatggccgtaccttccattaataaagaaggcaactgatagcacagagattttccaccgccggtaggcatcagcacaaaggtatcattaccatcaagcaaattctggatgatcggctcctggttccccttgaaattatcaaatccgaaatactttttcagttggtctgtcaaattaatcttccctgccatcttaatctaggttgttttattcagttcatggtttaacttaaaaacactcgctttgcttggaaagcgctctaacaaagttataaacaacttcttaaatatcaagcataatcagactaatatttttcaagaaaaaacggaactcacctccattattgcccttaccttttgattttaagcagtttgcaatctcgcaagatttgctttttcgagctgatgcttcgcataatccagtgtcacttcatattctttctggttttcagaaggaatctcgaacatgacatccatcataattgtctccacgatagagcgcaatccgcgggcacccagtttatactccactgccttgtcgacgatatattcgaagacttcgggctggaaggtcaactgcacaccatccatttcgaacaacttgatgtattgtttgataatggaattcttgggttcggtcagaatggcacgaagcgcgttccggtcgagcggattcagataagtcagcaccggcagacggccgataatctccggaatcagtccgaacgacttcaaatcttgcggtgcgatatattgcatcatgttgtttttgtcgatagtagccgtcttgcgggaagcattgtatcctacgacatgggtgttgagacgctgggcgatcttcttctcgatgccatcgaatgcaccaccacaaatgaaaaggatgtttttcgtgtttacgggaatcatcttctggtcggggtgcttgcgtcctccctgaggcggaacgttgaccacagaaccttcaagcagtttgagcaatccctgctgcaccccttcaccgctgacatcgcgggtaatggaagggttgtctcctttacgggcaatcttgtctatctcgtcgataaagacaatgccctgctctgcttcggggacattgtaatcggccacttgaagcagacgggtcagaatgctttcgatatcttcgcctacatatcctgcctctgtcagcacggttgcatccactattgtaaatggaacatgcagcagcttggcgatggtacgtgccaaaagtgttttaccggttccggtgctgcccaccatgataatgttcgacttctcgatttccacatcatcgccactgtctttctgcaacaggcgtttatagtggttatacaccgatacggcaagaaagcgtttggcatcgtcctggccaatcacatattggtcgaggaaattctttatttctaccggtttgggtagttcctttaagttgagtcgggtagcccccgcgctctgtttgccggctcccatggcttcctgagtgatctcataagcctgggttgcacagctgtcgcagatgtagccgttcattcccgtaatcaggaatccgacttcattctccgaacgaccgcaaaagctacacctttttttattattctttgattcagccatgtttatttcttaatcaacacttcgtcaatcataccatattcttttgcttcctgggcagtcatccagtagtcacggtccgaatcggcccaaaccttatcaaaagaggtacccgaatgatcggcaataatggtataaagttctttctttaatttctgtatctcgcgagccgtgatctcaatatccgaagcctgaccctgtgcaccgcccatcggctgatgaatcatcacacgtgagtgaggcagcgccgagcgtttgcctttggcaccggccaccaacagcacagaagccatagaagccgccataccggtacaaattgttgccacatcgctcgaaataaactgcatcgtatcataaatacccagtccggcatataccgatccgcccggcgaattgatatagatagagatatctttacccggatctaccgagtcaagatatagcaactgtgcctgcagcgtattggctgtataatcgtcaatctgtgtaccgaggaagataatgcggtccatcatcaggcgtgagaacacgtcgagctgagtgacattcagttgtctttcttccaaaatatagggattcaaatacccggcttgcgatttaatcacatcgtccagcaccattgcattcatacctaaatgcttggttgcgtattttctaaaatcatccattgttacgttcctttctattattaataatgtaactgcaaagaaacaaaaaagaacacagagacacaaaaaaacacagagttataattttataaaaactctgtgtttctgtgactttatgtcctgttcaaaagaagagtttattcaaacatcttattgaattcttccattgaaacggttttgttctccaatgtaaccttgcctttcagtgcagcggccaatttggtttctactacgcggtttaccagaccgtcgatgctttctttctttttcagcatctcttttgcatagttctcgaggatatcatcgggtatagtcagcataccgtattgggcaaactgagcttttgtagcttctttcgccatgttgatcacgtcgtcttgctctaccttgatatcgttttctttcaccaactgttccttgatcaggtgccatgtcagctcttcgatgctcttatcgtagttttcgtttacgaattcttcgcctttatctttgttgttcaccaacatgacacgcttcagcagtgcatcggggaattccagtttgcctactttatcggtcaataccttgcgaacgtcgatcaggaatttatagtcgctgtcggcaacaaactgagctgcgatgctttcttttactttagcacggaattcttcttcagtcttcacaacatctttgccgaatacctggtcgaaaatctcctggttcagttcgccgtttacgaaacgggtaacctcttccacctggaagctgaagttgccttttacttcggcagcagcttctttatcgattttcagcagtgatgccatttcaacggcattgccttcgtatgcagtgttcgggttgaacaccaatacgtcatttacctttgcatttgcaaagatagccttctgctcgtcgttcttcatgtatgaaggcatcattacagcaccttctacctgaataccgccttccttggtgttaccttcttcatcgagttcggccaacagacctttcagcatatcgttctcttcgtaagcatctaccttttcgtatttaccgttacgttgagtataagccttaatctggttttccaccatctcgtcagttacctcgattgtatagtagtctaccttgtcctggtcgctaacctcagctttgaattccggagccaaagcgatatcgaacacgaattcgaattcttccattgtatcgaaatcgatatccggctgcttttcttcgttaggcatcggttcgccaaggatgttgatgttgttatccttgatgtatgcgtatactttctcagaaagcaatttattcacctcgtcggcaataactgacttaccatacatcttcttcaccaagctcatgggaaccatacccggacggaatcccggaacctgagctttctgacggatgttcttcaacgatttgtctacctgaggctggtagtcagctttttcaagcttcacggtaagcaatgcgcttactttgtcaatgttttgtaatgaaacgttcattctgacaattatttatttgatttatactttattctatactcaaacgagggtgcaaaattagtgctaatctttcaaatttcaaaaaacattgcagaattatttcatttgcagagaagcgccattttcggccggaagtagccagacacacgcctgaaaagccattggtctgtttccgaaggagccggttttactttttattaaccaaaaaaggagaatgcgaatattgaaaattccacagaagcctcccgagcaaaggtcggcaaacggatgaaactcaatccatctgtacattagagagatgccgggatatgaatggatcgccccgtagagattcgcaaataagcaatgataacgataatcggagtttatactgacaaaaagatggcaaatcgccgttttcactgactctcctttccttgatttggaaccaacgggaagaaaaggatcaggaaaaagctgtctttgactccccaaagagaggtttctgatggaacaaagcccgcgttccgggtaaagacaagctccttcccaggaaaaagacgggtacattctgcccgaaagacgtaagcattttcggaaaacgcttacgtctttttccaatttctccgaatgttttgtccggtcgcacttattgttatggaaaacgaagccttcggaaaacttttccactctggttgccttccggagaaccttaccatcggaatatcctaagaacagacatctaccgcaaagaagcacaaaatgaatcaatggagcggattcatcttatcagaatgcttcgaaatcaatctgtctgaaagaaaagagataataccggaatcgcctggaatgcgttttttccggccccgacgaatactcctccgaaataaacaaatatgagaagaaacaattatcattttgacaaaatgccatccaaacaccgataccttatctataaagccgggaagttcgtatcttctttacaatccatattttctattttcaccccgaaaacgttccaaatcgctaaaattcataggtttcgtatacaaaaaaagagaaaaagttattgcaattccggtttttatgcgtttctttgctgcggaaagatgatcgattagtttctcgatttcaattacaaggtttttacttccggcgcaaagacgcttttgtaaactctctgtttctttaatccttttattattaaatcatcttccggagagttttatttcatttatttcattttttatcattttcactatgaacatttatgttggaaaccttagctaccgtgttaaggaagcagatctgcaacaagttatggaagactacggaacagtaacttcttgcaaagtaatcatggatcgcgaaacaggcaaatcaaaaggtttcggtttcgtagaaatcgctgacgatgcagccggtgcaaaggctatcgccgaattgaacggagctgaatacgaaggtcgtaccatggtggttaaagaagccagaccaagagagtaacgacagaaaaacgaaattaaaaagaaaccttttacccaaagagccggtaaaaggttttttttatgtattctatgtccggtgactattctccggcagaacggaaagcggaaacgcttggctaatctttcagctggaagtccttgcgacgcaacacaaaactgttactcaggtatttctcacgcacaattttattttctgccaactcctcgggagtgccttggaacagaatctttccttcgaacagcagataggcgcgatcggtaatactcaacgtttcctgcacattatggtccgttatcaggatacctatattcttatccttcaatttccagacaatctgctgaatatcttctacggcaatcgggtctacaccggcaaacggttcatcgagcatgataaatttagggtcgatggccaggcaacgtgctatctccgtacggcgacgttcaccaccggacaactgggtacccttgttcttacgcactttctgtaaacggaactcggctatcagactctcaagcttatctttctgataatcgagaggcttattagtcatttcaagcacggaggcaatgttgtcctccaccgtcatctgccggaaaaccgaagcttcctgggccaaatatccgataccggtctgggcacgtttgtaaacaggatattttgttatttcaagatcatccaggaaaatacggccttcattcggagtaatcaatcctacggtcatatagaacgaagtagttttcccggcaccgttcggcccgagcaaaccaacaatctcgccctgcttcacattgatggaaacatggctcaccaccgtacgcttaccgtactttttcaccaagtcttcagtacgaagcaccatcttgctttcttccatatcctttgttattttgcggcaaatgtagcaaaaataagccgaaaaaacgtacatttgcaaacaaatatacgagttatgattaaagcattaagaaccgtcggcagatacatcatacttatggggcggactttttcacgtcccgagcgtatgcgtatgttcttccggcaatatatcaaagagatagagcaactgggagtaaactctatcggcatcgtgctgttgatttcattcttcatcggagcggtgatcaccatccagataaaattaaacatcgaaagcccatggatgccccgctggacagtgggatacgtcacccgagagattcttctgcttgaattctcctcctccatcatgtgtctgatcctggccggtaaagtagggtcgaacatagcttccgagctgggcaccatgcgcgtgacgcaacagattgacgcacttgaaatcatgggagtcaactccgccaactatctgatattacccaaaattacggcaatggtcaccatgattcctattttagtgactttcagtatcttcgcaggtatcatcggagcgtttgcaacctgctggttcggtggcatcatgacggctaccgaccttgagtacggacttcaatacatgtttgtagagtggtttgtgtggtgcggcatcatcaaatccctgttttttgcctttatcattgccagcgtctcttctttcttcggctataccgtagaaggcggttcgatagaagtgggaaaggcatctaccgattcggtggtttccagcagcgtactgattttgtttgccgacctggtattaactaaacttttaatgggatgatcgaagtaaaaggactctataaatcattcgaaggcaaaacggtattgcataatatcgacgccactttcgaaaatggaaaaaccagcctgattatcggacagagcggttcgggaaagactgtactgatgaaatgtatcgtcggattgctgacaccggaaaaaggagaagtgctctatgacggacgcaacttcctggccatggggaaaaaagaaaagaaacacctgcgacgcgagatgggaatgatttttcaaagcgcggcgttgttcgactccatgtctgttttggataatgttatgtttccgctcaacatgttcggcaccgacactctgcgcgaacaaaccaaacgggctatgttctgcctcgaccgtgtcaacctcacggaagctaaagataaatttcccggcgaaatcagtggaggtatgcagaagcgtgtagccattgcacgggccattgcactgaacccgcagtatctcttttgcgatgaaccgaactccggactcgaccctaaaacttctttagtgatagacgacctgattcatgacatcacacgggaatacaacatgactaccatcatcaacacccacgacatgaactcggtaatgggaatcggtgaaaagattatctacatttatcagggaaccaaagaatgggagggcacaaaagatgacattttcacatccaccaacgaacagttgaataacttcattttcgcctccgacctgctgcgtaaagtaaaggatgtagaaatacaaaacctcgaaggataatccactatcagactgaaatagaagggctcatgaatcatcacaattcacgagcccactttttgttataaaaaaaccagttaatagaatcgacatatatcatcacgacatattgactgtcctaaagttctcaataaaacttaaaaagagaataattccaattacacttcaaagatagcaaaaaaaatgcagcaaaacatcaccgaaaaccgtgacaaatcaaaataaatagaatcattcgagttctatccatccttttgacattgctttcactaccatatcaatagcattctttgcacagaacttttgaatcagcctcttacgaaatgtctcaacagtattctccgagatttttaattcggcagccacttcgtgcgtattacatcccctcgcaacagctttcagtacatcgagctctcgctttgtagggatatctttcgagtgaatttgtacaggactgagacttagcttttgacgaatagattgaaaccgcggacaagtatagggatttccttcaagcacgcttttcacggcattttcaaactctaccgcttcggatgatttaaggatcacagcattcactttctggcgaatcaaacgattgataatccagatttcctcatgcatagtactaataataatacgcgcactctcgttaatctcacgaatcatatcaaccagatcgaatcctgatatatcaggaagattcacatccaacacatagatgtcataatcccgctctccaatcagctcggcagcttttgcccccgaagtcaccgcatcggcaactctgacatcagggaccgactccagcatacgccgcattccttcaagaaccagtgcatgatcgtcaactaatagtatttctgccttcgcttccatgtagcctttgtctgtatttatggtttgcttctttttgctctgtacaaatataaataaaaagcattacataagaaacaaaaagaatcaattatttcaattattacgggcaaaaagaaagccggattcttcatcatccggctcttatattcatatatcaattaaattcgacacaaaatttacttctgtctgatataaatattaatgggagttccactcaaatcccacttttcacgcatcttgttttccaggaaccttctataaggctctttcacatactgcggcagattggcgaaaaagacaaacgaaggtacttgcgtattaggcaactgagtgacatatttaattttaatgtattttcccttagttgcaggaggtggataagcctcgatcaacggaagcatctcttcattcaagcgggctgtagggattttaatcattcgattctcataaaccttgcgtgcttcttcaagcactttgaggattctctgctttgtcaatgccgacgcaaatactataggaaaatcaacaaaaggagcaaaacgtgaacgaatggcttcttcgaaagtcttcatgactttatcagtcttgttttctacaagatcccatttgttgacaactaccaccaggcctttcgaatttttctgaatcaacgaaaagatatttaagtcttgactttctataccacgggtcgcatccaccatcaaaatacatacatcggctccctcgatagcacgaatggaacgaactacagaataatactccagatcctcgttcactttattctttttacgaatgccggccgtatctaccaagtagaaatcgaaaccgaacttattgtaacgagtataaattgagtcacgggttgttccggctatttccgtaacaatgttacgttcttcaccgataaaagcattcacgatagatgactttccggcattgggacgtcctaccactgcaaaacgtgggatatcttcatccagaatctcatcagattctttcttgaatttactaacaatcaaatccatcagatcacccgtaccactaccactaatcgcagaaatacaatacggatcgcccagtcctaaccgataaaactcaggagcattgtatcgtagctcatggttatcagtcttattggctaccataataaccggactcttggcccgacgcaatatagcggctacctgcatatccaaatctgtcactccgtttgtcacatccactacaaacagaattacgtccgcctcgtccactgccatcaatacctgcttgcgtatttcctcttcgaatatatcgtcagagttcaccacccatccaccggtatcaacaacagaaaactcccgtcctaaccattcggatttaccatactgcctatcacgggtagtacccgcttcatcgttcacaattgcctgacgggtcttcgtcaaacgattaaataaggtagacttgcccacattgggtcgtcctacgattgcaactaaatttcccatagtttacacactttatttttgcgactatcacagtcgtatgaattttctttttttaatctaactgatagccaaaattccgcaactccttatctgaactgcgccaatctttgtctactttcacatacgtttccaggaaaacagtttttccgaaaaaacgttccagatcgcgtcgcgcctcagtagccaccttcttcagggccttaccctgttttccaataataatgcctttctgagaatcacgttctacataaatcacagcatgaatatgtatcttctttgcatcttccttaaattcctccactactacttctaccgaatagggaatctccttatcataatacaacaagatcttttcacggattatctcgttgacaaaaaaacgggctggcttatcagtccattgatccttatcaaaataaggaggggaatcaggcaagaggtctttaatccgcttcatcacatagtctacattaaacttcgtagttgccgaaatcggaataatttcagcttgcggaagcaactctttccactcttctaccagtttcacaagcttttcctgatcagtcaggtctattttattaatcaacaacaaaataggtgccgactgctgacgtactttctgaataaattcgttattcttatcaggagtttcaatcacgtctgtcacataaagcaagacatctgcatcagccaatgctgaagtagagaagttcagcatagattcctgtaacttataattaggtttcaatacccccggagtatccgaaaaaacaatctgcatatcatccgtattatagatacccataatccggtgacgagtagtctgcgccttaaacgtagcaatcgagatacgttcgcctaccaacacattcatcagtgtcgatttacccacattgggatttcctactatatttacaaaaccagctttatgcatcgtcttccatttattgattgagacaaaaaaacgcatcgaatcgaaataggatgcgttttatgtgatttatattagcaactgtcgtcactattcttttttcccgtcgtaaccccatttcacatacacggctccccaggtaaaccctgcaccaaacgcagtgaaaatgatgttatcgcctttcttaagtttctcttcaaaatcccagatacacaaaggcagagtacctgcactcgtgttaccgtaatgctgaatatctaccagaactttctccatcggaacttccatgcgatgagctaccgcttcgatgatgcgcatattggcttgatggggaacaatccagtcgatgttatctttcgtcagaccattcttttctgctatagctgcactcacatcagacatgtttgaaacagcatatttaaatactgttctaccttcttggtgaatgtaatgcatcttattgtcaacagtgaaataggaaggaggacaaaccgaaccgcccgctttcatatggaggaaaggcaatcccttaccatcagttctcaagatagcatccataattcccagatcttctgtagtcggttcaaccataaaggctgccgctccatcgccaaagatgggacatgttgcacgctctgtgtaatctaccattgatgacatcttatctgcaccaacaatgattatctttttatatcgtcccgaacggataaaattggctgccgtttccatcaaaaacaagaatccgctacaagcggcttgcagatcgaaagcaaaagcattttttagtccgagtttatcacaaagaatagaagctgttgaggggaaatgatagtcaggagtagtagttgcaacgataaccaaatcaatatcatcaggattcgaacccgtttttttcatcaactgtttagctgccttacgggccatgtacgaagtacctaatccttcttcgttcagtattcgtctttcttttactccaatacgagtcataatccactcgtcattggtatccaccatcttagatatctcgtcatttgtcaagacataatcaggtacatatcctccgactcctgtgattactgcatttattttttccatcaattctgttttaatttagcaatacatctaatacttaaagcagccggagagcaatgccctctggctgtttgataagtataagcttattcagactgcattatacagcagcttctttttcaattgccagcttacctctatagtatccgcaagcgccgcatactgtatggtaaacatgccattcaccgcagttcgggcaaatagccaatgtaggagctactgctttatcatgagttcttctctttgcagttcttgtttttgattgtcttctcttaggatgtgccattttcttttaaactttaattattatctaatattttttttaattcattccagcgcggatcaatctgttcctccgcttcatcttccacaacgatatcctcaccagcgccaaaagattcttcagcatcgtcatcaccacttgttctcaggtgtttattcagcttactggtcacagctttattacacttgcccggagcatgtacatgcttcatcgggatagccaaagctataaactcatacataaaccaagccacattgatctccccctcttcttcagggatcacaatcaggttatctccctcctcagcatattcatggccaaattttaccatcaacttatcagaagaagtaaccggttgttccatttcatccagacaacggtcacatggtacccatacgataccttcagtctggaaactcaactcaaaagcacgagaggtctttttaacggtcaactctacattgactttacctttctgaacttcagggccatcaatatgagcgaaaaaaagattgtcaagtagaaactcatatttacatgagtctgcttgcattcctttcaaatcaattttgtatttatcaaactttcccaaagcttctcttttttaatcgttgcaaaggtacaaaaaaagcccaaacgttatgtactacttaactaattttcatctgaatcttaagttagtagacataattcgggcgacaaagatacgaataataatcctcataacatacaaattatcagtaaatattcgtattttaaatagtattttatttataacccgctttccctactcccagggtcagagtagaaacagggcagcctggcgctccctttccttccccccccgtataaaacaagtcatcccctccggtctttcgaccgaaggggatgaaccatctgaaaa

SEQ ID NO: 5097 - DNA, 701 bp, Unknown
  gut microbiota DNA sequence
ccccttatgaaaatttggttggtatatcgggaaaggtgaagagaccgatgatctatgaaatgaaacatggagaaagtttagctactttgattagttatacgggtggatttaccggagatgcttatcggaatacggtccgtctggtgcgtcgtagcggaagggagaagcaaatatataatgtggatcaacaggattacgataactttattctgactgataacgatgaagtgtccgttgaggcggtattgggacgtttttcaaataaagtagaaattcatggagcggtttatcgttcaggcatgtatcagttggatagtgtgacggggactataaagtggctgatacaacaggcggaaggtcttcgtggagatgcttttcttaatagagccttgttgaggcgggagcgtgaagatctgtctcatgaaatgattcctgttgatctgaaaaaacttatggcaggaactgcacccgatttacctctgcaaaagaatgatgtactctatatctcaagtataaaggaattggaaaaagaaggagttctcttcatttatggtgacgtggcaaaaccgggttattttccctttgcgcggaatatgagtgttcaggacctgattttaaaagctggcggattattggaatcggcttcgactgttcgtatcgatgtgtcacgacgaattaaagatcctaaaagtgtttcttct

SEQ ID NO: 5098 - DNA, 19012 bp, Unknown
  gut microbiota DNA sequence
tcacctttgtgcccagaacaggactcgaacctgcatgcctctcgacacacgcacctgaaacgtgcgcgtctaccaattccgccacctgggcattgactaatcagaaacctgccgttaaaaaaaatggagaggaacagataaccgacgttcttgttgagcggaaaacgagactcgaactcgcgaccctaaccttggcaaggttatgctctaccaactgagctatttccgcaaaacaactttaatacagaatgtgaagagaaggagactcgaactcccacgacagtaatgtcactaccccctcaaagtagcgcgtctaccaattccgccacctctccgattcttgattaaagctttgaactattctcacctttgtgcccagaacaggactcgaacctgcatgcctctcgacacacgcacctgaaacgtgcgcgtctaccaattccgccacctgggcaaaaggtttccaacatttcaaagagagcggaaaacgagactcgaactcgcgaccctaaccttggcaaggttatgctctaccaactgagctatttccgcatttgcaaccgttgtttctcgattgcggttgcaaaggtaggcattttcttgatatctgcaagcattcggaacacttttttctcaagaaaatgtgcattgtgtttttggcaaacgacaaatgttttgattatcaactcattctatcgcgataatcttcgtaggaaaactgcctgaagatttcggctttgccatccgctgtccacagagcaatggcaggatggtgaattccattaaacatattcgtttttaccattgtataatgtatcatatcttcaaagacaattcgttcgcctgcctgcagttcatggtcgaaactccaggaccccatataatctccgctcaggcaggaattgcccccgagacgatagacaaacggtccctcctctcccatcaccgctccgcgaacggcgggctggtaaggcatttcaagacagtcgggcatgtggcaggtgaagctgacgttgagaatggccgtacggatgccacggctttcgacaatatccaccacctcggaggtgaggactccggtttgccaggtgaaagccgaaccgggctcgaggatgatacgcaaatgcggatagcgctttttcaatccttgcaacaagccggtcagatgccgggtatcataatccttgcgggtcatcaggtggccgccgcccaggttgagccacttgatttgagaaaaccacggagagaacttctcttcaagatgttgcaaagtgcgctcaagctcaaacgaagatgactcgcaatggcaatgacaatggaaaccttcgatcccctgcggcaaacgggcgggcaacagatcggcagtgatcccgaaacgggtgccgggagcgcacgggttatagagttcggtctctacctccgaatactcgggattaacacggatgccgcaagagatgccgctgccttcggccacggtcagcggatagaagcggctgaattgagacagggaattgaacgtgatgtggctgctgcaacgcatgatctccgggaagtccgtctcggtataggccggggaataagtatgcgccttactgccgaactcttcgagcgccaaacgggcttcgtagacggaactggccgtggagtgtccgatgtactccctgaaaatgggaaatgaacgccacatggcaaaagacttgaaagcaaggatgatttcaactccggcatcatcggctacactctttatcaggctgaggttctttctcagcagctcctcttccatgatataacacggagaggggaattgggtaaaatctatcataatatgtttattcgggtagtgttcggggtcaccacagattacacggattaacacagatttttttagttgagttctcaacaaagttaattcttaatctgtgaaaatctgtgtaatccgtggtgcgtctcccacgaacatttattctattactttaaatctggcgaaacgcagcaacagctgtttatcgcctgcattacggaaatgaatggtagctttggcattgtcgcccgtaccttctacgcggatcacctcacccaggccgaagcgttcgtgctcgatggtctgtccgggctgtacgccggcgacgccggctccggaagccgacgatggggagagcgtagtcccacttacctttttcaagttacgggggaccgtcggcgcgatgatctgcgccttcggccgttcgcgttccggacggtcggccgacggacgggcagagaagcgttcggaagacgaacggcgcgaatacccctcttccatctcgcggcggaagcggccggccccttcgtcgatgctccggcctaaagcggcctcctgcggaagttgcaggaaacgggtgtcaatgtcccgcaagaaacggctggggctgccgaactccatcttaccgtaacggaaacgggttttggcaaacgagaggaaacagtgctcttcggcacgggtgatggctacatagaacaagcgtcgctcctcttccatcgcacggggtgaatcgcccgccatcccgctggggaaaagattctcttccatccccaccacgaatacgttgcggaactccagtcctttggcggaatgtaccgtcatcagagtcaccttctcgccgtctccctccttgtcggaatcctgatcggtgagcagggatacttcggagagaaagtcgatcagagaaacgttcgtgttcccctcttcctgacgcatggcacaaaaatcattcataccgttcaccagttcctcgatgttttctttccggctgagattttcgggcgaattgtcctggcagacttcattgatgatgccggactgacggatgatttccgtacctatttcataagcattctttacggtcacatctgccataaactgctcgatcagcgcacgaaaatcctgcaatttggtatgtgtgcctttattgatggaaagcccgtacgtaatggggtcgcagagtgcggtccagaggctgacattgttatcggtggcggcagtaataatcttgcccaccgtggtatcgccgatgccgcgtgccggataattgataatccgcttgaacgcctcttcgtcattggggttgaccaccaggcggaagtaggctatgatatctttgatctccttgcgctgatagaaagagaggccgccgtaaatcttataaggcatgccccgtttgcgcaaagcctcttcgaagacacggctctgggcattggtacgataaaggatggcgaagtcggagtattcataatcgtgctcgcgacgcagttgcgctattttattggtcacaatgtcgccttcttccacatcactgtaagcctgaaagaccccgatggcctcaccccgttccttctcggagaacacctctttggggatctgccgctcgttcttttcgatcaggctgttggccgcacagacaatggtctgggtggaacggtagttctgctccagcttgaagactttggtatcgggatatatcttggtgaaatacaaaatattgtcaatgtccgctcccctgaaggagtagatgctctgcgcgtcgtcgcccaccacgcatacacgctgattctcctttgtcagttgcagcacgatgctgtgctgtgcatagttggtgtcctgatactcgtcgacaagcacatagcggaactgctcgcgatagcgtgccagcacgtcgggaaagtcgcggaaaaggatataggtatagaccagcagatcatcgaaatccattgctccggcctgccggcaacgctcccagtagcggctgtagatatcccgtatggcaggcatctttgcggcaagatcgccctcgtacgcctccttgttggctgcgtatcccgaaggagacaccaggtggttcttcgcattggagatgcgtgcctgcacactgccgggcttataggtcttctcgtcaagccccatctctttgatgatggaacgaatcaggctcttgctgtccgccgaatcgtagatggtgaactgcgacgtaaagccgatatgggacgcctcggcacgaagaatacgggaaaaaaccgaatggaacgtacccatccaaaggaatcgtgcacgctgctcgcccacctgccgggcaatacgctccttcatttcacgggcagctttgttagtgaaagtcagtgccaggatattccagggattgtaaccgttctcgagcagataggctatcttataagtgagcacacgcgtctttccggaaccggcaccggcgatgaccagcgaagggccatcaccgtagagcaccgccgcacgctggctttcattaagttcttcgatatagtcgggcataaaatttatctgttaaatctctattcacgggcaaagatagaggaaagtttggacaactccgaacatttgggccctatatcctgttatatattcagagaaatgaaataaaagatttgaatttatgaatacattattaatgtctttaatatttacgaccatgacttacgaaatgcctaaacttccgtacgcaaacaatgcgctggaacctgtaatcagtcagcaaaccatcgattaccattatggtaaacatcttcaaacatatgtaaacaatctcaatagcctggttccgggcaccgaatatgaaggaaaaacagtagaagccatcgtagcctcggctcccgacggagctatcttcaataatgccggacaggtgctgaaccatactctgtacttcctgcaatttgcgccgaaaccggcaaagaacgaaccggcaggcaagttgggagaagccatcaaacgcgacttcggcagctttgaaaacttcaagaaagagttcaacgcagcttctgtaggattgttcggttcgggatgggcctggctgtccgttgacaaagacggaaagctgcacatcaccaaagagcccaacggaagcaatccggtacgcgcgggactgaaaccgttactgggatttgacgtatgggaacatgcttactacctcgactatcagaaccgtcgtgccgaccacgtaaacaaactgtgggagatcatcgactgggatgtcgtagaaaaacggctgtaacctaactcttttcaccacggagtaacacagagtatcacagagttttttttttgttaataatcaacaacttaaaatcgtctctgtgttactctgtgttttctatggtgagttttgagaaagggcgaaaacaaattccgcatgactccgcgatgaaataatccccgatttactttcttcttattttctttttcacttactttgcctccgtaaagacaaaggggtgccacccggtggctgagattataccctaagaacctgatgcagttagtactgccgaagggattgtgtatttcttccgttttttctttttcccgcacgcacccctctttgtatttactttcatttatccccaaacacacctatacgaatatgaaagtacaagtgaacaacaaagaagtggaaacaaccgcaagcacactggcccagcttgccacccaactgcaacttcccgaaaacggtgtagccatcgccgtcaacaaccgaatgataccgcgtccgcaatgggacggattcgggctgcaagagaatgataacctgattgtgattaaagcagcctgcggaggatagcctatgttaagcctacaatttatcacccatcaaacagagaattactcctatctggaatcggcgcgcatggctctcgaagggggctgtaaatggatccaactgcgcatgaaagaggcatcgccggaagaggtggaggcagtggcactgcaactgaaacctctctgtaaagctaaagaagcgatcctgattctcgacgaccacgtagagctggccaaaaagctggaagtggacggggtgcacctgggcaaaaaagacatgcccatcggcgaagcccggcagatactgggtgaagcattcatcattggcggaacggccaacacctttgaagacgtaaagctgcatcatgccgccggagccgactatctgggcataggccctttccggtttaccaccactaagaaaaatctgagcccggtactgggactcgaaggctacacctccatactggcacagatgaacgaggccggtatccggataccggtagtagccatcggagggatcgtagcggaagacattccggccattatggaaacgggggtgaacggcatcgccctctccggagcaatcctgcaagcaccggacccggtagaagaaacaaaaagaattctaaacatataaggaaatgaatcaaactcaccacagagtaacacagagttccacagagatggttttctcttaatactccataaacaagaaatttaaaactctgtgagactccgtgttaccctgtggtgaaatgaactcaaaacaagatcagaaatggaaaagttaatcattgcgggacgtgaattcaactcccgcctcttcctgggaacaggtaaattcagctcaaacgaatggatggaacagtcgatactggcatcgggcaccgaaatggtgacagtggccatgaaacgtgtcgacatggagagcacagaagacgacatgctgaaacatattgtacatccgcacattcagttgcttcccaacacatcgggcgtacgcaacgcggaggaagcggtgtttgccgcacaaatggcacgagaggctttcggaaccaactggctgaaactggagattcatcccgacccgcgctatctgctgcccgactcggtggagaccctgaaagcgactgaagaactggtgaaactcggattcgtcgtgctcccctattgccaggcagatccggtgctatgcaaacaactggaagaagcgggagccgccacggtaatgccgctgggagcacctatcggaaccaataaaggactgcaaaccaaggagtttctgcaaatcattatcgaacaggcaggaatcccggtagtggtggacgccggaatcggagcaccgagccatgcggcggaggctatggaaatgggtgcatcggcatgcctggtaaacacagctatcgccgtagccggcaacccgatagaaatggcaaaagccttcaagcaggcagtagaagccggacggacggcatacgaggccggactgggtatgcaggccatagggttcgtggcggaagcaagttcaccactgacggcatttttaaacgaataaaacaataacctcgcctccggcccctctcccgtcgatcactcttcgggaaaagaatacggggctgagagatcctaataacgaatgtatggaacaaagaataaaatttccccgctctgagaaggtatatctgtccggcaagctattccccgaaatccgtgtaggtatgcgaaaagtagagcaagtgcccagcacaactttcgaaggagaaaagaaggtgatcactcccaatccgcatgtgtacatctacgataccagcggtcctttcagtgaccccgacatagaaatcgacctgaaaaaaggcctcccgcgcctgcgtgaagaatggatactgaacagaggagacgtggaacaattgcccgagatcagttcggaatacggacgcatgcggcgggatgacgggagcctcgaccacctccgttttgaacatatcgcattgccctaccgggccaaggccggccggcatatcacccagatggcgtatgccaaacagggcattgtcactcccgaaatggaatatgtggctatccgtgagaatatgaactgcgaagaactgggcatcgagacccatatcacacccgaattcgtacgtcaggaaatagccgaaggacgggcggtgctgcctgccaacatcaaccatcccgaagccgaacctatgattataggccgcaacttcctggtgaaaatcaataccaacatcggcaactccgccactacctcgagcatagacgaagaggtggagaaagcaatgtggagctgtaaatggggaggagacacattgatggatctttcgaccggagagaacatacacgaaacgcgggaatggatcatccgcaactgtcccgttccggtggggaccgtacctatctaccaggctctggaaaaggtaaacggaaaggtagaggacctgacctgggaactgtatcgcgacacgctgatcgagcagtgtgagcagggagtggactacttcaccatccatgcgggcatccgccggcataatgtgcacctggcggaaaaacgcctctgcggcatcgtatcccgaggcggaagtatcatgagcaaatggtgtctggtgcacgaccgggaaagcttcctttacgaacacttcgatgacatctgcgacatcctggcacaatacgatgtcgcagtatcgctcggcgacggcctacggcccggatcgacccacgacgccaatgatgaagcgcaatttgccgagctcgacacaatgggcgaactggtggtgcgcgcctgggagaaaaacgtacaggcatttatcgaaggaccgggacatgtgccgatgcacaagatacgcgaaaacatggaacgccagattgaaaaatgccacaatgccccgttctatacgctcggcccgctggtgacggacatcgctccgggatacgaccacatcacttcggctatcggagcggcacaaataggatggctgggaacagctatgctatgctatgtgacccctaaagagcacctcgccctgcccgataaagaagatgtacgcgtgggagtaatcacttataaaatagccgcccatgcggccgatctggccaaaggacacccgggggcacaggtacgcgacaacgcactgagcaaagcccggtacgaattccggtggaaagaccagttcgacctgtcgctcgatccggaacgtgcattctcttacttccatgccggacggcataccgacggagagtattgcaccatgtgcggaccgaatttctgcgcgatgcgactgagccgcgatctgaagaaaactcaaaaacaaaaataggatgaccgtaacggaaaggacagcggaataccggaaagcactcgatgtgcctatctctcaactggagacggaccggattgtaaaagaaatcctggatcgaccggagaacttcgacaacatttaccggctgacgtcggacgataaattattggtgtcctggcgggccttatggatatgcgacaaactgtgcaggcagaagccggagtggctgatccctttcagggaagagctgaccggaaggttgatgtcctgcgggcacgatggctcgaaacgactgcttctttccatactctaccatgcacccgcaacgaaggtgccttccgtggctctgctcaacttctgcctggacgccatgctgtcgccccaagagagtatcggcgtgcaatcgctcgccatccgaatggcttaccgcctgtgtgagcccgagccggagttgctgtatgagctgcgtaccatactggagagtacagaaacggaaatgtattcgaccgccgtaaaatcggctgtacggaacacattgaagaagattaaccagaagaataaaaagaaaaaataaaatgttttcagatgaattagaaaagatttcctgggaagagacgactaaagccatctattccaaaactgacgctgatgtgcgccgcgcattgtcgaaggaacactgcgatgtaaatgattttatggcattgatttcgccggctgccgctccatatctggagacgatggcacgtctcagccggaagtatacgatggaacgcttcggaaaaacaatctcgatgttcgtgcctctctatattacaaattcttgtacaaactcgtgtgtatactgcggctttaaccacaacaacccgatgaagcgtaccatccttacggaagaagagatggtgaacgagtacaaggcgatcaagaagctggccccctttgagaatctgttgctggtgacaggcgagaatcctgccaaagccggagtggactacatcgaacgtgccctcttgctggcaaagccctactttgctaaccttcagattgaagtaatgccacttaaagcagaagaatatgaacgacttacacatgcaggtctgaacggggtcatctgctttcaggagacgtataataaagccaattacaacatctaccacccccgcggcatgaagtctaaattcgaatggagggtcaacggattcgaccgcatgggacaggccggagtacacaagataggaatgggcgtactgatcggactggaggaatggagaacggatatcaccatgatggcctatcatctccgctacttgcagaagcattattggaaaacgaaatatagtgtcaacttcccccgcatgcgcccgtcggaaaacggaggcttccagcccaatgtggtgatgaacgaccgtgagttggcacaagtgacttttgcgatgcgtatcttcgaccatgatgtagacatctcctactctacccgcgaaagcgcagccttccgtaaccacatggctacgctcggagtgaccaccatgagtgcggaaagcaaaacggaaccgggaggatactttacctatccgcaagcactggaacagtttcacgtaagcgacgagcggaaagccgtggaggtggatgcagcactacggtcgctggggcggataccggtatacaaagactgggacacggcgctgacgctaccccaatgctgataactgaaataaaagggaatttatggaaagatacagcagacaaaccatgcttccggaaataggagaagcaggacagctaaagctaaaagctgccaaagtactgattgtaggcgtgggaggactcggttctcccatcgccctctatctggccggcgctggagtgggtaccatcgggttggcagatgacgacgaagtgagcctcagcaatctgcagaggcagatactctacacggaggaggaagtgggcgacctgaaggctatctgtgcctccatgcggatcagcgccctcaacagggagataaaagtgaatgcctgtccgggaaggctaagtaaagaaaatgcacgcgatctgataggccagtatgacatcatcgtggacggttgcgataactttgcaacccggtatctgctcagcgatgtctgttcggagctcgggaaaccgtatgtatacggtgctatctgcggatttgaaggacaagtgtccgtcttcaactacggagaaggaactcaacggaaaacttatcgtgacctctacccggacgaagaaggaatgttacacatgcctcctcctcccaagggggtggtcggagtgacaccggcagtaacgggcagtgtggaagcatgcgaagttctcaaaatcatttgtggattcggagaggtcctggcaggcaaactatggacaattgacttgcggacattgcaatctaacatattttcactataaaggttggtttctgattaagttaattagtaactttgctaaacttaacagtttaacaaaagaaatgaaacttatcgtagtaacgacgcctactttctttgtagaagaagataagattatcactgctctttttgaagagggactggatattctgcatctcagaaaaccggaaacaccggctatgtattcagagcgcctgttgacactgattccggagaaataccacaaacggattgtcacgcacgaacacttctatctgaaagaagaattcaacctgatgggaattcatctgaatgcacgaaatcccaaagaaccgcatgactattcgggacatatcagttgttcgtgtcactcggtggaggaagtgaagaataaaaagcacttttatgattatgtattcatgagcccggtttatgacagtatctcgaaagagggatataactcaccctatacagccgaagaactgcgcctggcagccaaagacaagatcattgacaacaaggtgatggctttgggaggtattacgccggataacatactggaagtgaaagatttcggattcggaggtgcagtggttttaggagatttgtggggcaaattcgacgcttgctccgaccaggattacctggcagtgatagaacacttcaagaagctgaaaagaatggcggactgaacgaaacgacaacagacaaaataaaatagggtgattctccttgcggaggtcaccctatttcgttgaaacctatttgattaaaattcgtaatggaatccgaatgtaaggtcttcactgcttgcgctaaagccaaaaccgttacccatataatcgtccttatatcccaggaagccacatttggcaaccaggctgaaatgctggttcaacttgatagcgatacccggtttcagaccgatctcgaaaccgtttacagcatcaccgccatctttcaccttagtggtagcaaaaccaaatccgccatcgacaaacagacgtacgatcttgttttcataataagaaaaacgtgcgtaaggagcaatggcaaatgtgtttgtcgagatatgctccttgtattcatggttgaactgaagctcaacgcccaatgcccattgttcgctcaggttgtatccgatctccggagccagtttaaaggaagtggtattggcatcatcattacgccacaaacctacggtacctcccatgtaaaggtcttgtgccttaacagataaagttgcaatagcaacaaataaaaacaatacaatctttttcatcttcttagtagttttaattaaatacacctattttgaaaacaaacaaaagaataatttcacttttgtttcggggcgcaaaagtatatcatattcattaattaaacaactatttcgatcattattcaccggagagcaaaatgaaaaaagccgcttgtaattgatttacagcggcttttctatttaaatatttaccggtttccctcagaacttatagcctacgctaatagaaagattcagattcttaccatttacgttgtccatgacatcgacaaacccgaactgaccgtcaagccctgcgataatcttgccaaactccgcggcaacaccgataccaagacctacatcgccacgtttcagcagaccgtcgtcaccaaaggtatcgacttccaagcgccctttgcccagatctactttggaattacccgcgatgccgcaagcaaaataaggacctgcactcaacacgatattagtattatcggctactttgaaacgcgcagcagccataaccggcagttccagataaacagcattcacactcagttcgtccttcttggcacctttggaagatacaaacaaagagggttgcaacgaccagatttcattaaatccatactccatgccaccgcctatcttgaatcctactttggcattcatgtcaaaatcaccggtaaagttactgatattcattcccaccttggcattccagctcacttgagaaaagcccacaaccgaaacgagggcaaacaatacaaacacaagatttcttttcataattctgtaattttagtttgttaaaaatataataagtaaggtttcataagataaaggaaatatttttatttgaattatacaaatatttactctacattttaggtttccgccggcttttctctcctgtaggctctgtctgcaccatacagatatatacaaaaaggcgaggctaccctcttggagtagcctcgcacaaaccagttaatctaaagttattcttcgatggctgcctgtgctgctgccagacgtgcgataggcacacggaacggagaacagctaacgtaattcaaacctactttatggcagaacttaacagatgaaggctcaccgccatgttcaccacagataccgcacttcaggtccggacggatggcacggcctttttcggttgccatacgtaccaactgacctacaccattttggtcgagtacctggaacgggtctactttcagaatcttcttctccagataaaccggaaggaaagaagctatatcgtcacgagagtaaccgaaagtcatctgagtcaagtcgttggttccgaacgagaagaactcggcagacgaagcgatacggtcggcagtcagagctgcacggggaatttcgatcatggttccgactttgaagtcgatgcggtctcccacctcttcaaagagcttgtctgcttcggcacgaatcacactttcctgctgctggaactcgtaaagaatacctgtcagcggcaccataatttcgggatgtgtctctattccttctttcttcagttcaagagcggcacccagaatggcacgagtctgcatctgtgtgatttcgggatacgtatttcccaaacggcaaccacggtgacccaacatcgggttgtgttcgcagagcgattcgacacgctgctggatatattgcaggcttactcccattgtatcggccatctcctgctgtcctttcagatcgtgaggaacaaattcatgcaaaggaggatcgagcagacgtacagtcaccggacaaccggccattgccttgaagattcccttgaagtcggcttgctgatatggcaagatcttggcaagagctttgcggcgtccctcagcattttctgccagaatcatctcacgcatggctttgatcttttcaccttcgaagaacatgtgttccgtacggcaaagaccgatacctaccgcaccgaaattacgggcaacttcggcatcatgcggagtgtcggcattggtacgaacctgcagacgggtatatttatcagccaacttcatcagatcggcaaagtcgcctgacagttcggctgctttcgtttctactttaccctgataaacctcaccggtactaccgttcaaggagatgaaatctccctctttcagcaatacaccatccacttccactgtacgggccttgtagtcgatattcaatgcaccggctcccgaaacacagcatttacccataccacgggcaaccacggctgcatgtgaggtcatacctccacgggcggtcaggataccttcggcaactgccataccggccaaatcttcgggtgaagtctcgatacgaaccatcacaacgcgttttccggcagcatgccattcggctgcatcgtcagcaaagaatacgatctgaccggtagcagcacccggagaagccggcaaaccgcgagtcagcactttagcctgtttcaaagcagacttatcgaataccgggtgaagtaattcatccagtttattgggttctacacgcatcagcgcggtcttttcgtcgatcatgccctggcggaacagatccatggcgatttttaccatggcagcaccggtacgtttaccgttacgtgtctgaaggaaccaaagtttgccttcctgaacggtgaactccatatcctgcatgtctttgtagtgattttcaagcttggtctgcaattcatccaactgcttgtagatctccggcatagcctcttccatagaaggatattttgatgcacgttcctcttcgctcacaccggcaagctgagcccaacgctgggaaccgatcttagtgatctgctgcggagtacggatacccgccaccacgtcttcaccttgtgcattgatcagatattcaccattgaagaggtcctcgcccgtagcggcatcacgggagaagcatacacctgtagcggaagtatcgcccatgttaccgaacaccattgcctgaacacttacggcagtaccccattcatcgggaattccttccatcttacggtacaggatggcacgttcgttcatccatgaattgaacacagcgcagatagctccccaaagctgttcgtatgcacaagtcggaaagtccttgcctgtttgtgcctttacggcagctttaaatttcttcacgagttccttgagatcttccacctcgagctcgttgtccagcttcacgcctttggcatgtttcacttcttcaatgattgcctcaaacggatcctggtcttctttgttaacaggtttcatacccaatactacgtcaccgtacatctgtacgaaacggcggtaagaatcccatgcaaaacgagcgtttccggtcttacgggtcagaccttcaaccacttcatcattcagacccaggttcaggatcgtatccatcatacccggcatggatgcacgtgcacccgaacgcacagaaaccagcaacggattctctacgtcaccaaattttgaacgcatcaggttctcaatatttgcaatagctttttctacttcttctttcaggagagatacgaccttttcctgtcccatctcgtaatattcggtacaaacgtcagttgtaattgtgaagcccggaggtacggggacaccgatcagattcatttcggcaaggttcgcacctttgcccccaagtaagtttcgcataccggcctttccttctgccagtccattaccaaaggtataaactctttttttgtccataatacgattttaaagttattagttgtgattcttttctgttcgcaaatctaaggatatttcgcaaaccagaaaacttttatatgaaaaactttctatcaaaatgcaatttcgacattgcaatctgcattatttcacttcatatagagaaatacgaaaaaaaatacctacttttgcgaaagattttattaatatggcgtagaatggtgatttaatagattcacgctttatactcaaagaaatcattttaatataattcaaggagtactgtggctagaaagaaaaaagaacttcctctgctggagaaggtgacaataacggatgtggctgccgaaggaaaagccatcgcaaaagtagatgacctggtcgtttttgtaccttacgtagtgccgggcgacgtggtagatttgcaagtaaaaagaaaaaagaataaatacgccgaagctgaagcggtgaagtttcacgaactctcaccggtacgtgccgttcctttttgccagcactatggcgtatgcggcgggtgtaaatggcaggtattgccctacgcagaacaaatcaaatacaaacagaaacaggtggaagacaacctccgccgtatcggaaagatcgaattgccggaaatctctcctatcctgggatctgctaaaacagagttttaccggaacaaactggagttcaccttctcgaacaaacgctggctgacagcggaagaagtgaaacaggacgtcaaatatgaccagatgaatgcggtgggattccacattccgggagcattcgacaaggtgctcgccatcgaaaagtgctggttgcaggatgatatctctaaccgtatccgcaatacgatccgcgattacgcctacgagcacaactactctttcatcaatctccgttcgcaggaaggaatgctccgcaacatgattgtacgtacctcgagtaccggcgaactgatggtgattctgatttgcaagataacggaagagcatgaaatggatctcttcaagcagttattgcaatatgttgccgaccaattcccggaaataacctctctcctatacattattaataataaatgtaacgacacggtcaatgacctcgatgtacacgtattccgtggcaatgatcacatcttcgaggagatggagggacttcgtttcaaggtgggaccgaaatcgttctatcagaccaactcggaacaggcatacaatctttataaggtggcacgcgactttgccggactgacaggtgacgaactggtatatgacctctatacgggtaccggaaccatcgccaactttgtgtcacgccaggcacgaaaagtgatcggcatcgaatatgttcccgaagccatagaagatgcaaaagtgaatgccgagatcaatggaatagagaacaccctgttctttgccggagacatgaaggatatcctgacacaggatttcatcaatcagtacgggcgtccggatgtaatcatcaccgaccctccccgggcgggaatgcatcaggatgtggtagacgtaatcttatttgccgaacccaaacggatcgtatatgttagttgtaatccggctacacaagcgcgtgacctccagttgctggatgtcaaatatcgtgtgaaagcagtgcaaccggtagatatgttcccccacacccatcacgtggaaaacgtagtgctgcttgaacttaaataaaaaaatgaatatgaagagaatcaaacgaactccggccgagaaggcccgtgcacaatataccggctatctggtgaaagaaccgatggaattaatggatttccttgcggccaaaatgcccgatgccagccgtaccaagctaaagtctctgttgagcaaacgaatcgtgctggtcgacaatgtgatcacaacacaattcaactttcctctgcaaccgggcatgaaggtgcttatcagcaaggacaagaacaagaaagaattccgccatccgctactgaagatagtctacgaggacgcctatatcatcgtagtggagaaaaaggaaggattgctttccgttggcacagagcggcagaaagaacgtactgcccagcatattttaagcgaatatgtaggtcgttcgggacgcggaaaccgcatctacgtggttcatcgcctggaccgggatacttcgggattaatgatgtttgccaaagacgaaaagacacaatacacgttgcgtgaccattggcacgacatcgtgacggaccgtcgctatgtagcggtggttaccggcgagatggagaaagacagcgacacggtagtgtcctggctgacagaccgtaccttgtacgtcagctcaagcagctatgatgatggcggttccaaatcgatcacccactatcgcaccatcaaacgtgccaatggctactcgctggtagaattgcgattggaaaccggacgtaagaatcagatacgtgtacacatgcaggatctggggcatcctctgatcggagacggacgttatgggatagacggtgggcccaatcctctcgggcgcctggctttgcatgctttcaaactttgtttctatcatccggtgacagatcagctaatggagtttgaaaccccttaccctcctacattcaagaagctatttctgaagaaataatataaatagggatgtatcaaaactcgtatttaccacagattacacagatttgcacagaacgatttttaatttactgataaccaata

SEQ ID NO: 5099 - DNA, 937 bp, Unknown
  gut microbiota DNA sequence
atataagtttattccattcttaattcaaagttaaatccccgggcatcgtccgaaagataaaaggcaccggttatccgatctccgtatatccttacgtcatccatataagagataccgttcttaccgtaattcaatactaaattacgattataagaatcttcccaataccactgaaagcgaaactgatcatacaaaagaccgtttgaagcatagaactgggtctccactccaaaaccgtcgttcccgaactcaaaggtactgaacaggggttcaccattatgggcattcatccctacatcgccggtccatgcccgcccggtaatgacatattcaatctctccctgatcgtcctcgcaagacgcgaatccgacagcgagcatcagtatcagtaaaatcttccaatagcctttcatttcttcctatctccttctctaattagtttctgttatattttgaatcgacaaatacaactacctttccgttcagcttcccggacatattatgctcacgtacccacacgttatcgaaataagtcaccccgttcactccatagtcaaaaacaataccttccatcgtatcgtctatccacgaccaggtcagattattggtctccgtgcggtaaggctgactttcatttacatgataataggcataagtctctgccagccggccgttatcatcaaacttcaatgtatgccgaacccactcgtctacatcattcttctccgaatcattcacccaggttttgccacagagctttgcattgctatttcgtagataatcatctgaataatacttgtcaccacaagagcttaggcctactatagctaccaataaaaatagcgttttcataaaattcaatgtcttcataagtgtcatttgtcattaaattaataatacacggacaaatataaggattgttttctaataaaaagga

SEQ ID NO: 5100 - DNA, 303 bp, Unknown
  gut microbiota DNA sequence
aacaaattaaaaaaagtatcgtatgaaaataaaaagacttttagtgttggccgttctacccatgctgtgtcttgcagtgaatgcacagaactccagtaaagacaatactcctaaaaaaggagactttacggtagcagctactgttggatacaatagttacacaagtgtcacagccccttcggggctgctgactgactatgaagtcagagcgctctctaccaactgggcagacaaaaagctgatggttggttttgaaggaggctggttcttcaaagatcagtggaaactaaatttgggtggcgg

SEQ ID NO: 5101 - DNA, 52437 bp, Unknown
  gut microbiota DNA sequence
acactttcttaatggagatggctatgggaaatccgatagccttttcttgtcctatataacggttattggaagaggtgggtatctccgcatcctttgggggcacggagccttgcaaaagaggcgattcaagcgaatgaatgggttttatataggaagtttcactgctttgaataatttgttttataggaggtgaagttaaaagaaccttttccaatatacttttttttaacttgattaatcttttatataaaagaaagaatcttttagttaaaacaaaaaccgattgagagtgttttaatgatagagttcaatttttgataattaaaagatgtaaattgtggtgactctatgcaattagttactatttttgtcccgaaaatcgaaaagagagtttatcaataaaaataggacgatgagaacttctgtaaaattcatattaatgtttgttctgctgatgctatcctttagcataagtggaaatgcattgaatattacggaatgctctcataagtcggttaattcctgccaggtttccgcatcttctctggatactaactattcttatcgctatggcagtgatatcaccggttttgataaatcacaaactctatctgtctctgatgttgaattgggttttaaacctgtttctgaaacatactcttctaataacctccgtctgcgcagaattcttgaagattctgaccttttcaaagacaccatgcgtaagtggtgcctggtaagagagaatttgttggtattagaccaaagtaagtcttattattcggataaagatccgcattatgcgtctataagctgccactactacatttttgctttgagacgtattcttatttaattcctaacttactatactgctgtgtttgacaatacagcctcatttttagcatgaggcagtagggtttggcctgtggtgtgtctaatcgtatttactttaaattcttaataacaaattctttaacaaaaaaaaactttattatggaaactactcaaaaaaagtcaactaagattgtaggtatcaagaatgccggattggttattatctgctgttttattatagcagtgtgtatctatcattttattttgggaaatcccactaactttatgaacaatgaccctaacaaccatccgcttccgggaaactttatgggaaccatttacaaaggtggtgtgattgtgcctgttatccaaacgttattgctgactgtattggcattgagcattgaacgctattttgctcttcgttcagctttcggtagaggttctttggttaaatttgtatctaacattaaagaggctttgtcggcaggagaccttcggaaagctcaagaaatctgtgacaaacagcgtggctctgtagcaaacgttgtaacttctacactacggaagtatgaggaaatggagaatgaatcttctctctcaaaagatcagaaactacttgccatccaaaaggaactggaagaagctacggcgcttgaacttccaatgatggaacagaatcttccgatcattggtactattactactttgggtactttgatgggattgcttggtacggttatcggtatgatccgttcgtttgccgctttggctgcaggtggttctgctgattcaatggccttgtcgcaaggtatttctgaggctttgattaacacagctttcggtattcttaccggtgcgttggcagttatctcttataactactatacaaacaaaatcgataagttgacttacagtctcgatgaggtcggtttctctattgtgcagacttttgcagctactcataaataatttagaatctactaaattctgacaataatgggcagagcgaaaattaaaaagaaaagtacgttcatcgacatgacagcgatgagtgacgttacggtactgttgcttactttctttatgctgacctctacgtttgtgaagaaagagccggtacaagtgacaacacccgcttcggtttcggaaattaaaattcccgagaaaaatattcttcagatattggtcgatccgaacggaaagatatttatgagtatggacaagcagtccgatctgaaagcggtattggagagcatgggacaggaatatggtgtcacatttactccggaacaggaaaagaaattcatgttggcctctactttcggagtgccgatgaaaaacatgaaaacctatctcgacctgccgaccgacaaacaggacgcagtactgaagaacgaaggtattccttgtgatagtcttgataaccaattcaaatcatgggtgcgtaatgcacgcgcggtgaattctgatttacgtattgcaatcaaggccgatgcggatactccttattctgtgattaaaaatgttatgaattcacttcaggacctcagagagaatcggtacaacctgattacttctctgaaaacgacttctgaaaactaaaaacgaacaactatgagtgctgaagtacaagaaagcggtaaaaagaaggggaatagcaaacagaagaagatgacggttcgcgtagactttacgcctatggtggatatgaatatgttgttgatcactttctttatgctttgtacctcgctgagtaaacctcagacgatggagataagcatgccgagcaatgataaaaacatcaccgaagaacagcaaagcaaggtgaaagcttcacaggcaatcactctgttactgggccccgatgacaaactatattattatgaaggagaacctaattacaaggattatacttcgctgaaagagacgacgtataaaccggatggattacgggggatactcctgaagaaaaatgcgactgctgtcagacaagtcaatgatctgaaacagaaaaagctggaacttaagatatcagaggatgaatttacgaagcaactttctgaaataaagagtggaaagaatactcctacagtcatcattaaggcaatggataatgcatcgtataaaaatctgattgacgctctcgatgaaatgcaaatatgtaatattggtaaatatgtgataacgaacattgctgaagccgacgagtttctggtgaagaactttgaaagcaagggtgaactttcacagaatattgccgactaaaatgtaacaccaaaaaatagaaaagtaaaatggcaaaaatagatttaacttcttttgaatggtgtgagctgatttttaaaggcaaaaataaagcttacggtgcctataaaatgcgtgccgattcacccaagcgtcacaacgtggcaatggtcattgtgttgataatagctttagtaggttttagtcttccgaccttaatcaaaatggctactccgaagcaaaaagaggtaatgacggaagttaccactttgtcgcaattggaggaaccggaagtgaagcaggaagagatgaaaagagtagagccggtggcaccaccaccgcctgctttgaagagctctattaaatttaccgctccggtgatcaagaaagacgaagaggtacatgaggatgacgagattaagagtcaggaagaacttacacaaaccaaagtcgctatatccattgccgacgtgaagggtaacgatgaagcaaacggtaaggatattgccgatttgaagcaggtggttactcaggcagagccggccgaagaacaagttttcgatatggtagaacagatgcccacattccccggtggaactacagaattgatgaagtacatcggtgaacatctgaaatatcctcccattgcggctgaaaacggtacacagggaaaagtgatctgtcgttttgtgattggtaaggatggccaagtgagggatgtaaccatcgcgcgttcgttggatccatattgcgacaaggaagctattcgtgttatcaaatcaatgcctaagtggattcccggaaaacagaacggtaaagccgtagctgtaaatttcacagtacctattgtctttaaactacagtaattatgactaaaaaacaattttggctgatcggtgcgtggtccttgattgcactatctgcttgtagctcgaaacccaaagacggactgacagacacttatacatcgggtgtaatagctattactgctgacgaaagtttccaacccattgttcaggaggaaattgatgtgttcgagggattgtttcctttggccggaattgttccccgttatactactgaggtagacgctatcaaccagctcctgaaggacagtgtacgtttggctatcaccacgcgtacactgactccggaggagatgaactcttttcatagccggaaattttttccccgggagataaaactggctactgacggtttggctctgattgtcaatagacaaaacgccgattcgttgatttcagtgcgtgatatccgccgtatactgacgggacaggtacaaaagtggaaagagctctatcctgcgtcggggttgggtgatatccaactcgtctttgataacaaaaactcaagcacggtacgctttgcggttgactccatttgtaagggagctcctctgtctgataaagacgtaaaggctctgaaaacaaatcagcaggtgattgactatgttgcacatacacctgatgcaatcggagtgattggagtcaattggcttggaaaccgaagtgataccactaacttgtctttccgtgatgagatcagagtgatgtctgtcagtgcagacgatgtggctacggtagagaacagttataagccttatcaggcttatctgtactatggtaactatccgttggcacggcctatttatgtattattgaacgatccccgtaatgcactgccctggggattcgcttcttttctcacatctgacagagggcagcggattatattaaagtccggactcgttccggctactcagccggttcgtattgtggacgtgaaagacgaataataactaaaattgaattacaatgaaacgatttcaactgtttttagtaggagcatttgtagcagccggtccgctttttgcgcaatcggcagatgctgattggcacagtgaggttgccaaagtgaaagaacttattcagactaatccggcgcaagcttccgaggaagccgcacaattgctgaaaggtaaaaataaaaaaaatacggatcttctgattgccattggacaagcctatttggaagccggtaaaattaatgaggccgaagcctatgctgctcttggacagaaagctaacagcaaatctgctgcggtttcggtgctgcaaggtgacattgccgtagctaagaaagatgccggaaaagcttgtcagttatatgagcaggctatctattttgatcctaattataaagaagcctatctgaagttcgctgacgtatataagggggctagtccgcaacttgctatcgagaagctggaacaactgaaaaaccttgatccttcgtgcgtggctgccgataaaaaattggcagaggtttattatctgaataataaatttgataaagcggccgaagcttatgcgcattttatcaatacaccggaggctacggaagatgatttgacgaaatactcttttgcgctttttttgaaccatgattttgagaaatcacttcagatagctttgatgggtttacagaagaatccgcgtgatgctgcattcaatcgtttggctatgtataactataccgacctgaaacgctatgatgaagctatgaaagcggcggatgcgttctttaaggagtccgataaggcagatttttcttatcttgattatatgtatttcggccatctgctcaatgccgtgaagaagtatgatcaggcagttgaagcttatatgaaagcgatcacgcttgatcccgctaaaacagatttgtggcgtgaagtttcttcttcttatgaattgaataatgaatttacaaaggcaatagaggcctataaaaaatatagcgaatcgttgagtgccgacaagcgtacccctgacgtacagttccaaataggaaagctttattacgaaaagggtacgcaatcggatacgttaaccgtttcgctggatgagcggaaggcggctcttgtttctgccgattccatttttactgagattgctaaagtggctccggatagttatctgggtaacttctggagagcacgtactaattccgcgttagacccggagaccactcaagggttggctaaaccttattatgaagaggtggctgccttcttgattgataaaaatgacccgaggtacaactcagctttgattgagtgttatagttacttgggatattattatctggtagctaacaaacttcctgaatctaaggagtattggaataaaattctggctatagaccccgctaatgctactgctaaacgtgcattggatggcatcaaatagtaataattttagttgtttgtcgtgtaggaggagtggagagtgattcttagctcctccttttttagtttctttcttatcctatatccgctttggtttcatcttctacttttagagcgttgctataagtattggttttgattttatgattttcctttcgtatcgatagaatatcgaatgtatagcgctgataataagtgaaataagaaaattatctaaaaaaacattgccaattcggttgtaatattcatatatttatctacttttgtggtgtactattgtactaatacacataaactcataaataaatgaagatgattacagtagaaaatctttcctttctttatcgtaaatcgaagcgtgccgttttgcatgacttctctctgtcacttgaaaaggggcgggtttacggattacttggcaaaaatggtgcaggcaaatctacactactctatctgatgagtgggctgctcactcctaaaagtggaaaagtggtctatcatgatgttgacgtacgccgccggcttcccatcactttgcaggatatgtttttggttcctgaagaatttgatcttcctccggtttcgctaattagctatatagagttaaacagtccgttttatccccgtttcagcaaagaggatatggtgaaatatctgcactattttgaaatggatatcaatattgatctgggggcactctctatggggcagaagaaaaaagtattcatgagctttgcgctagccactaatacatctttgttgttgatggacgaaccgaccaatggacttgatattcctggtaaaagtcagttccggaagtttattgcttcgggtatgacagatgataaaacgatcttgatttctacccatcaggtgcgtgacattgataaggtgctcgatcatgtgttgattatggacaatagtcgggtattgctgaatgaatctactatgagtatttgcgataaactgttttttactgaaagcgaaaaccgggagttgttacagtcgtctttgttttccactccctctattcaaggtaattttttgcttttgcctaatgaatcgggcgaagattcagagattaacctggaattattatttaatgctaccttggcagttcccgaaaggatttctgcattgttccactctaaacaaatagaattatgatacgagatacttttttcagtcaaacgcgttttgtgaatctttgccgtaaagagatggtggagaattggaagtccaatctgcttcgtgttgcgttgatgtatggtgctatggcggtgataatgttatggagcggatatttaagttaccgggcagtaggtcaagatacagatagtacctgggagttcaatctggtgatttttatgtgggggctttgtgtattcggttgcttgagtgcttcgttcacaatggagaggatgaaatcgaaaaccgggcggctctctgttctgatgactcctgctacatcgtttgaaaaatacttttcccgttggttggtatttacggttgttttcttaattgtttttctgattacttataaactggcggattatacaaaagtattggtatactctttggtttatccggaaaataacgcaattgcgattactccgttatctcatctgtttggtgaaaatacggattattatacagtattcaagcatacccatacatttgtattaatgattgcaagctatttcttctgtcagtcttgctttgtactgggcagttctgtctggcctaagaattcgtttatcaaaacattttctgccggaatgattatattcattgcttatgtattgattgtggtcggatttgccaagttgatatggccggatcaaataagttacaatccggatatgagcgaggagactgcttttgcttgtctttcggcaatagctgttcttttcactctgactaactggacacttgcgtatttccgtttcaaggaatctgagattattaatcgaatgtaacaaactcttacgtttatgaattttaaagaaagtaaagccatttatctgcaaatagcagatcgaatctgtgacgagattcttctcggacagtatcaggaggaagaacgaattccttctgtaagggagtatgcagctatggtggaggtaaatgccaacacggccatgcgttcgttcgattatcttcagtcacaagatatcatttacaataaacggggtattggttattttgtttcttccggcgcaaaggagctgattttttcacttcgtcgggagacttttctgaaggatgaacttgagcatgtattccgtcaactctatacacttggggtttcggatgacgagttgttgactatgtaccgtaactttatgatgaaacaaaaataaaaacgaaattttatgaaacgtactacatatatatttattggcatacttgtttcggtactcgtgatactgatggcaggtgtcgtttatatttctttccagaaatcagaaactaattcgtatacactcactttgtcggagaagatacttagaacagagttttccggtatccgtgctgtcaaagtgtatgcaaacgacacgcgtcgtgtgtggttggacgaagcttgtgtgaatgttgtttcttctacagatggaaaaaccagacttttaagtccggaatccgaatatctgaaaatcagtcagaatgcagatacattggtcatttgcctggatttgacaacttatgatcttcctaagcaaaaaaaggagtatcttattccggccctgcaagctaaaggattacaactgaccatagaagccgactctaatctggcttttgtggctaatgctattcgtggattacgtacgagaatcgataggttgcatgccgactctttgactacatatataagaggaggggaattacgtttggactcttgtgagatacgtgctttttgtgtcgatggagatggagtgacatttaatgctcatcaatcaattattccccatctctatttagatttggatggcgtcaggaattggggcgttcatgaatctgtaattggtactgaacatctgaccggaagtggagtttatcataataacttgcagaggggtgagtgtaaaaagatgatctggactccgaagaaagaggacgccgaattgagattaactatacgggagaagggaagtttgatacttcaagaagaataaaagaagaaattattaatacataattgaaggaaggatgtagtagagagtattttagttttcttgctgcatcctttttcagttatttgaagttgaaagctatgaagaattttcgagtggcaatacggaggtcttatttatcggtcatccttttgcttttggcattggtatgctatcttttgtatcctttggaaataccggctctttcttcagaatcggctatagaaattgatcggtatgttcattccgtgccatgtactgtacagatgccggataccgctactgatttcttgtgcttcttggatgaagagttaaaaaacaagcaaatcttattgttaggtgagcagttgcatcaggatggagccaccttgcaaatgaaaaccaggatggttcgttatttacacgagaaattaggatataatgttatactatatgaaactggcttatatgacatgtatcttatgaatcaggatggtcgtcagcggatgaatccatctaaagctgtatggacattttggtgggggagtaatgagacaaaatcattatgggaatattatcgctcccatccttctattaccttggatggcttcgactgccagttaaccaattatggacaaggaaggaaacacatggaatccgttgagaagtatttaaatggttactcttcttctctttcggatttcccgtatgtgcaacgcttcttcttgcagatgagtgagtttaatggaaactggaattatttcggataccggcttgataggatgttaaaagactccattgttcaggattttaataaattggaaaatagaattcatgaggagtcaagatattctgtggaagatggtttgcatcagcgttatattgcaggactgaaactacggtatgagagcatatggaagtatcggaatgtcggtgatttaacacgaatgaacctacgcgattctattatggccgataatttgacttggttggtagactcggtttataaagaccaaaaagtgattgtatggtgcgctaatgtgcatgtattcaaccgggggaggatgcaggttgactcgaccagattcacctctatgggacaaaggttaaaaatacattttggagaccggatgtatacaatagcatttacttcgtatgcacgaagaaacactgacggcggcatacgggatccgcttagtacgttgtcactcgagtatttgctacatcagagaaaagtcgggtttgcttatttaaatttcaatgaactacccgtggatagcagatggagacaagcgtttatctcgggtttggatcaaggtgcaagtctttcggaagtttggagcgaacaaatggatatgctattctatatcgacctgaattatgatgtatattacgataaaacttttataaataaaatgtataaatgggcaaaatagagataagaaatctctgtttccgatacggcaaacagatggtactcaataatctgaatctggatattccggaaaatgcactctatggatatttaggtaataatggttccggaaagacaactacgattcaagtattacttggcttagctcgtcctgttaaaggtgaggtattatatgatggacagccatttcgagatcagagagaaaaacaattaaggaagataggcttatgcccgggagaaccattctattatgataatcttacggggtatgaacaccttgcgtatttagaccatatttatcattgtggaaggaccgctatcaataaagtattggcaatcacgggaattgagaatgccagaaacaagaagcttcgacactattccacgggtatgatacatcgattgggaatggctatggctttattgcatgatccggatatactgtttctggacgaaccgctcaatggacttgatccggaggggatacattctataagagagttacttttacagctgcatcaagagggtaagaccgtttttttatccagtcatttacttgatgaagtagaaaaaacttgtacccatgttggtatccttcagcatggctgtttattgtatcaaggagatttatcggaattactgaacaatatagagaaaagaatccatatcaggttggacaaggtggatttgttacattcggtatgtaaagaggtccaaattgacagccggatcaagtcggagtcaatattggaagttatcctttccgatgatactacctatgacaggcttattgagctactggggcagggcggttatcatatatctgctattcaacctttggagaatactttggaatcggtttatttaaaattaacttcacaaacaaaatgaggatattaagagacttacaaaatgtcatagcatcagaatattataaaacacgtcacgatgtagctgcaaagttatttctattcttcccggtgttgttgacagtagctttcattgtgtatgatttatggaatctgagtcaggaaggctatgacggtacgaacttgtggatatacaatatcggacgtacgttattcatgttttacggtatgttgtatccattaatggcagccttgttttgtgcggcctatataggaaaagagtttaaaaatgacaattaccttctcttgtttttatttcctgttcccagaggcactgtttatgtagctaaacttatttaccttctatcaatgacattcttgtcagttcttatcgcctatgttgcttttatgttatcaggctttattttgggcgtttgtttaccgtcaatgggctttcaaaattttgatgtgagaattttagtgatttctgtcttctttcgtgtttttattgggctattgcctatccttgttattcaatatgtgtttagtttcttgtttaagaattatgctttagcactgggatttagtttttttatgactgtgttttcgatgattgcgagtaattggcgttacattaattttattccgtattcctccattttacatgcatactcttcatttatgcagcaaacggtttattattggaaatcatttgaaaccattaatatcagttattttatagtcttttctatcgtgggttatattttatataggtataaaaaatggcggtaggatgattcctggtagtgaaggggtgaagttctttccagcttaccgaaatgaatgaagtgattttgttcggcaagtggtaagaatgcttatatttgcaatattcgttcttgttaacctaaaatttactttaccatgataggatatagaaacttactgatatcgttattttgtagtatggctgtttctgctgccggacagccgtgcttagtaaaaagccttgtgcctgatatgccatcgcaagttcccgattacttttgcacgtggaatttacaaggctatgtggccagctataaaagtactgaactgaccagggctgctatgactgaagattatttatttggggacgggctttatcagaattgggtggattgttatcctgcaatccgaaaagatctttactttgtgatggacgattcgtgggatattcctaaagatgtgaatgattcacccaatccttatttaggttgcgtagaactgagctctgatcgttttccgtcttttcgtggagatgcagtggagcgtttgaaacaattatcggaacatatcaagagtaaaggctggaaaggtgtcggtggatggatttgtgcccagaaggcagagacgcatgcagctattcctgaagaggagtattggaaacaacgaattaaaacggcaaatgctgccggatttgattattggaaagttgattggggaaaggaagacaggaatggggaatggagaagaaagttgacagctatcggcaagcgatatgctccccatttatatatagaacatgctttgcgaaatgaatttattgagtttagcgatgttttccggacctatgatgtcgaaaatattacggcgcagccgataactatccggcgtatttgtgatttattgccttataagacagtcgagggagcgaaaggaattattaattgtgaagatgaaccttatattgcggtaggtttgggctgtgctatcggtgtgatgcgacatccgttcgcagggactttgccggatgggacacaagattttgtgtttcctccggtcggacgtgatattaagcggcgtctggatgaagtcgtgcgtggtgtcagatggcatcggatagctgagccgtttgcagtgggttacgggactttcgccatcgacagtgtgaagttaaccgatcattggattctacaggaaaatgagacttggaataaggggtgtacggtgggtgcagatgtaacggccgatgcaccggcgcgggttgctcggaatatgaagttaccggaggtatccggagctcctttgtcggtttgtccgtttgtgttggcttcccgataccccaatggcgctgtagccgtttctactataggccgtaatgtaggacgtgagtatgtaaccgaaaaggttgctgtttcgatatccgtcgaccgttgggacatacctatcggactatttggttatttcaaagaagtgacaatggtgtttccttctccattgaaaacaggaaagcatacggtttttgcgcaggatctggccggtgagaatccggtggacattacttccaatgttgtaatcaaggataatcgattgataattccgggagaagtaattagccgggtagggcttatgaatgcttcagaaggagattgttctgatccggggatggtgataagggttatgtagttgaaggatacgaatctggtctctcactaagatttcaaacagatacatcattactcttaacatcttgcctttaagtctattataacaaatctcggtttctttacctcagcacagatacgcgggttcatgggctcggatatgggggatcagatagagaacataccattttttattaaatagtaatgaaaaacagaatgctctaaacaggatatctggttaagaaacgcccatcttaccattattaattagtatcttagctattgatatactcccaaatcagcgggtggaagatgcgggtggaagatggaagattgaaattcattttctgtaagagagcaagccgatattccgaattcatcattcttattatagaatccctcaggaattatggaagatcccggaatcctgattccggctctgctccttatctcgatataaaataagaaaggctgataatcgattaattatcagcctttcttcttctatttagttgcggaggcctgactcgaacagacgacctttgggttatgagcccaacgagctaccaactgctccactccgcgatgtttctgttttgtgagtgcaaaggtacggcttttatttgaactaccaaatatttcggcatttatttttttataaaagagctacttttatactatatacttgaggatcagtgctgaactagattgattttttttatctgttttcacatacaattgttaataatttatttgttttcttgtgtggacgaaagaaaagaattacttttgcacaaataattcagcaatgtgcaattaacctatgaccgtatcaaagacaaaagccaagttagtagacgttgcccgtcagcttttcgcaaagatgggagtggagaatactacaatgaatgatatcgctcttgcttctaaaaagggtagacgtacgctctatacttattttaaaagtaaggatgaaatctatttggctgttgtagagtctgaactggatattctgtcggatatgatgaagcgtgtggcagataaagatatctctcctgataaaaagattatagagatgatttacacccggctggatgcggtaaaggaagtagtatatcgcaatggaacccttcgtgctaatttttttagagatatttggcgtgtggaaaaagttcggaagcgctttgatgcaaaagaaatgcaactatttaaaagcgtgctgaaggaaggacaggacaaaggagtgtttcatgtagatgatgtggaaatgactgctgcattggtacactattgcgtaaaaggtatcgaagtgccttatatccggggacatataggagctaatctggatatggaaacccgaaaaagatatgttgccaacatcgtgtttggcgcactacatagaacagaaattaatcaataatttaaatttagtatgggattattagatggaaaaacagccattgtgaccggtgcggctcgtggtattggtaaagctattgctttgaaatttgcttctgaaggagcaaatattgcatttacagatcttgttatcgatgagaatgcacagaatacagcaaaagaaatcgaagcaatgggtgtgaaagccaaaggatatgcgtcgaatgctgccaattttgaagatactgcaaaagtagtggaagagattcataaagatttcggccgtatcgatattctggtaaacaatgcaggtatcactcgtgacggattgatgatgcgtatgagcgaacagcagtgggatatggttattaatgtgaacctgaaatctgcttttaactttgtgcatgcgtgtactccgatcatgatgcgccagaaagccggaagcattattaatatggcttctgtagtgggtgttcacggtaatgccggacaagctaactattcagcttcaaaagcaggtatgattggtttggctaaatctatcgctcaggagcttggctctcgtggtatccgtgccaatgccattgctccgggattcatcattactgacatgacagccggcctttcggaagaagtgaaaacagaatgggctaagaagattccattgcgtcgtggcggtactcctgaagatgtggctaacatcgctactttccttgcttctgatatgtcttcttatgtatcaggtcaggtgattcaggtagatggtggtatgaatatgtaatattcggtatgaccgtcatatacgaagacaatcatattatagtagttaacaagaccgcttccgaaatcgttcagggagacaaaacgggtgatactcctctttcagaaactgtcaagcaatatctgaaagataaatatcagaaacccggaaatgtctttatcggtgtaacccatcggctggaccgccccgtgagcggtcttgttatttttgcgaagaccagtaaggctctttcccgcttgaatgagatgtttaagaacagtgaagtgaaaaagacctattgggccatcgtgaagaattgtccgaagcaacccgaaggagaattggttcactatctggtgcgtaacgagaagcagaataaaagctacgcttatgataaggaggttcccaacagtaaaaaggcgattctgaactataaacttatcggacattcggatcattactttctactcgaagttgatctgaagaccggacgtcatcatcagattcgttgccagttggcaaagatgggatgtcccatcaaaggtgatttgaaatatggttctgcacgttccaatccggatggaagtatttgtttgcatgcccggcatgtgcgttttgttcatccggtgtctaaagaattgattgaactcgatgctcctgtaccggatagtaacttatggcatggatttcaatgaaaaagagtgatggtttcatttagatggatcctcaaataatttcaaccggagcacaactttggttatctactttcctatataaacgcaaaaaagccattccctgaatagacgaagtaggaatggcttttttgttgtagtgtgcttactattattcggcaaactgtgcaaatgctcctgatgctgcgaccgttgtagcggttgtgtcggctacttctttcttaggctcagtttttgcagtgtctttgacctctttctttgggtcttttttcaccggatcctgtgccattgtaaagaacgatccacaagcaaacataaacatagctactactaaaactaactttttcataattattttcttgttaaagttctgattgtctgtttttaatttcatgttaaggtctaggttaaaaccatcacaaacaaacataaacattgctactactataaaactaactctttagttttatctttcatttggttaaacacttgtattgagtattttccaaatcttgtgccaaaaagaatacgtgtgaactaatctgttgatttgtaggtgagtaagaaatgaatggaaatgggatgcagtgtggaatgttgtggaaaatgtggaaaagggtgtggaaatattccacaccttggtgttctttagaggtcgattccgtatagtttcagtttattgtataatgttttgcggtcaatatcgagtaattgtgcagcacggcttttgttgtttcctgtttgtcgaagtgcttccagtatatgttccttttcggcatcttcatcccgtaatgtcattttgggagttgatagttgtgtttccagaatttcactacccagttctgcaagacctatgaaactgccttgagcaagcaatgtggcgcgtttgatgatattcttcatctgccttaggttgccgggccagtgatattcgagtaatgcctttgaagcattggcatcgaagccgatcagttgcttgtcaagctctttattagcctggtcgaggaagaagttggcaaaaagaaggatgtctccgccacgttctttcagagtaggcatgcgcaaagtaaattcattgattcggtggtagaggtcttcgcggaatgtacctttttcgatggcttgttccaggttctcgttggttgcagacaccagacggatatcgacagtaatttctgagtttgaaccaacagggcgtattttacgttcctgtagtgcacgaagaagttgaatttgtatttcgtaactcaggttgccgatttcatcaagaaagatggtacccccgttcgctgctacaaaagcaccggttttatcagagagagcaccggtgaaggagcctttgatgtgaccgaagaactcagaagcggccaactctttggggatggagccacagtcgatggcaataaacggtttgtcgctacgtttgcttaattggtgaatacgatgggctacatactcttttccggttccactggcaccgttgatcaggactgacatgttggtgggagctaccaggctgacatagttatagagttgtttggcagcatcactttctccttccagataggaatgagattcttgcttggttttagggcttttctccgtgaggggagttttgggaagaggagcttctttcttttgaagtgcttcgctcattttcttaagcagctcttcgggattaacgggtttggcaatatagtcttgtgcacccagtttcattgcttgtacggctgattggatatctgcatatcctgtcatgataatcaatgggatatggagctctttctcacccatccatttcaacaggtgaataccatcgtggtcgggaagtcgcaagtcggaaagaatcaggtctaccggttgtgcatcgatgtgcttttgcgcacgtgcaatgttactcactgatgatacattaaaccctttcttgcctaaccaggtttttagcatcatcccgaacgtaatatcatcttcaactatcagtatggatctcatgatgttagcttttgcctctttttgtgagctacaaaggtaagaggttttgaggtaaagtcgtatatttgcagacttaaattaaataaaagcgttatgaaacagaatttttggatattattaattatactggcttgcagcgcagtagcttgtaagtcgggacaaaagaaagatggaaacatggaaaaagaaactgtattgaagattgagacctctatgggggatatcaaagtaaagttgtataatgagactccgaaacatagagataatttcattaaactggctaaagacggaacatataatggaacgttgtttcatcgtgtcataaaagactttatggtgcaagcgggtgatccggaatcgaaaaatgctccgaaaggtaagatgttgggttccggtgatgtaggttatacggttccggctgaatttgtatatccgaagtattttcataagaaaggcgctttgtctgctgcccgacagggagatgaagtgaatcccaagaaagaatcatccggttgtcaattctatattgttaccggaaaagtgttcaatgattcgacacttctgaatatggaacaacagaagaatcagaataaggtaactgaggcttttaatgctttggcgcaaaaacacatgaaagaaatctataaaatgcgtaaggccaatgatcaggacggactttatgctttacaagatactctgtttatacaggctgaagcggaagctgccaaacaacccgatttccactttactcctgagcaaataaaagcttatacaaccgtcggaggtactccgcatctggatggtgaatatactgtttttggcgaagttgtcgagggcatggacattgttgacaaaatccagcaggtaaaaacagaccgcagcgatcgcccggaagaggatgtgaagattattaatgtttctgttattgaataaatatgctgcaaatcaacaggcatattctggataatggtttgagattggttcatgcgcaggacaccagtacgcagatggttgcgctcaatattctctataatgtgggagccagagatgaaaacccggagcataccgggtttgcccatctttttgagcacctgatgtttggcggttctgtgaatatacccgattatgatgctccgttacaattggcaggaggggaaaataatgcctggaccaataatgacattaccaattattacctcactgtacccagacagaatgtggaaaccggattttggcttgaatctgatagaatgttgagcctcgatttcagtgaacgcagtctggaggttcagcggggagtggtaatggaagagtttaagcagcgttgccttaatcagccctatggtgatgttgggcatttgttgcgtccgctggcttatcgggttcatccttatcaatggcctaccatcggtaaggagctgtctcacatagccaatgctacattggaagaggtcaaagatttcttttttcgtttttatgcacctaataatgctgttctggctgttaccggcaatatttcgtttgaagaggctttacatctcacagaaaagtggttcggtcctatcccccgccgggaagttcctttgaggcaattgcctccggagccggtacaaacggaagaacgccgtttggtagtggagagaaatgtaccgcttgattcgctttttatggcgtaccatatgtgtgaccgcgcggatagcgattattatgcttttgatatcttgtcggatatcttaagtaacggacgttccagccgtttgaaccagcatcttgtgcaagaaaagcaattgttctcgagtatcgatgcttatatatcgggaacacttgatgccggcttgttccatatcagtgggaaaccggcagccggtgtgtcgttggaagaagctgaggctgcggtgcgtgaagagttgaatgaactgcaatctgctttgatccaagaacaggaactcgagaaggtaaagaataagtttgaatctacccagatattcggaaatatcaattatctgaatgttgccaccaatcttgcctggttcgaattgaacgggcgggctgaagatatggaaaaggaggttgaacgctatcgtgccgtgactgccgaccgtttgaacgcggtggcacaaactgcattccgagaagaaaatggagtagtactttattataagagtagtagaggagagaaggatgagacttatatataagaatcattataaagcattgtttcttctcggccttcccattgttatcgggcaagtgggggttattgtgcttggctttgccgataccttaatgattggtcatcacagcaccaacgaactgggagcagcctcctttgtcaataacatgtttacgcttgccattattttcagtaccggattttcatatggattgactcctattgtagggggcttttatgggactcgtagatttgcgtctgctgggcaggcattacgttgcagtttgcttgccaatcttttggtcggtattttattaactgtaattatgggcattctctatctgaatgttgaaagattggggcaaccggaagagttattacccttgatcaagccctattatctgatactacttgcctcgctggtctttgtgttgctatttaacggattcaaacagtttaccgatggaataaccgatactaagacagctatgtggatacttttgggtggaaatgtactgaatatcgtggggaactatatcttgattaacggtaaacttggatttcccgaacttggattattgggtgccggaatcagcacgttgttctcacgtattgtcatggtgctgatatttgtattcgtgttttttagcagccgccgtttcttacgttataaactgggatttattcgcttgggatggtcgcgtacattgttccgtcagctgaatgccttaggatggcctgtagcttttcaaatggggatggaaaccgcttcatttagcttgagcacagtgatggtaggatggttggggactatcgcccttgcctcacatcaggtaatgcttactatctcacagttcacgtttatgatgttttatgggatgggggcggcagtagctgtgcgtgtcagcaatttcaagggtcaaaacgatattgttaatgtacgtcgtactgcgtatgccggggcacatatcatattggctatgggaattgttctgctgtctattgtcttcttgttccgctatcaggtaggaggatggtttaccgacaataccgaagtctctgcgatggtagttgttctgatggtgccttttctggcttatcagttcggcgatgggatgcaaatcaatttcgctaatgccctgcgtggtatttcggatgtaaagcctatgatgctgattgcttttatcgcctattttatcatttctctcccggccggatatttctttggatttgttatgggctggggattactcggggtctggatggcttttcctttcggactgagtagtgcggccattatgttatggttacgtttcagatataaaacaagataagttatggctattccttcccgtttcacaaaagtaaagatcgcggcggggtatactttgttgctggttgtgctgctgctctccctgttgtttgtacacagggagatggagaaactgtctgatacggacgatgtacagagtttgcagacggatagtttgctgcttttactgaaagagaaagatgaaaataccatccggatgcttcagatcattaatgaagcgaacgagagtatgattactccggttgaattggattccatcattgccgaacaagatacagtgatcactcaacagcgtgtgcaacatcgtatcatcaccaagcgtgactctgtgattacgaaacgaaagaaaaagggttttttcaggaggttgggcgaggtgttcgctccttcgaaagaagatacggctgtgctggtaaatacagctgtggaatttgcgaccgacaccattcttgaaccttacaatccgattgattcactacatcagcgcatacgaacggtgaccaaacggaagtccaggcctgtggtacggcccaactacaatgcccgtcttcgccggatgaataaggaattaaccactcgtattgacagcatgattacgacctatgagcaagtagtcacccaacgtgctatggacaacgcatccgaacagcaagaacttcggaaccgttcaactcgtacgattggcgggattgccattgccgccgtgttgctgtccgcctgcttcctgattatgatttggcgggatatcacccggagcaatcgttaccggaaggaattggaggaggccaataagcgtgcggaggcgttgttggaggctcgtgaaaagttaatgcttgccatcactcatgattttaaagctcctttggggtctatcatcggatatacggatttattgaccgggttgactacggataaaagacagcgtttctatctggacaatatgaaaagttcctcgcaacatctgcttaaactggtaagtgacttgctcgacttccaccggttggatctgaataaagcagaagtcaaccgggttacttttaatccggcacaactgtttgaagagatacgtattagcttcaaaccactgaccgatgccaaacatctgactttaagttgcagtatagacgccgaactggatggacgcttcatcagtgatccgctccgtatccggcaaattgtaaataatctcctttccaatgctgtgaaattcacagctaagggtagcattgcattgaatattacctatcattcgtccagtgtccgcatcgaggtggtggacactggtaaaggtatggcacccggtgaccgtgaaaagatatttctggaatttacccggttgccgggagcgcaaggtgaggaaggctttggactggggctttccattgtacacaaacttgtgaccttgctcgaaggatcgattagtgttcaaagtaccttgggtgaagggagtcgttttattgtcattctgccgctctatcctgtggggcctgtgacaggagagaagcgggaaggaaatgtgtcttcggtttcaacgacagatcaagccggtgaggacggggtaatggcatctccaaaattaaaccgtgttttattgattgatgacgaccggattcaattggctctgactgccgctatgcttgaacaacaaggcattcaggctgtttgctgccaacagccggatgagttgattgagcaacttcgtacggctacattcgacgtgttgctgactgacgttcaaatgcctgccatcaatggtttcgatttactgaaactattgcgtgcatccaatatacctcaggcgcgtactattccggtaattgctgttaccgcccggagtgagatgaatgaacaggactttcaggaacacggctttgcaggatgtttgcataagccttttacggtaaaggaactcttgacgattatcagtggtgaagaaatgaccggttcgtcagctgaattgacaccggactcccttaactttcgggcgctgactgctttttccgaagatgatccggaagctgcctctaccatcattcaaacctttattgaagaaacggagaagaaccggaaccggatggaaagcgctatccgagccactgatgtggatgggatagccggcatggctcacaaattattgcctctgtttacgttgcttggggcttccgaggcacttcctctgctattatggctggagcagcgtcgtggcgaagccgtatcggacgaaatgatacaaaaggcgaatgaagctcttcggcaggtagatatcgtaatggctgaggcaagacgatatgcagcgggagattgacaatcggtgattgccgtaagtgtctattcgtatacaaaatcgtcgtcactttaatctttttccggaaaattttgtttcctttgtatcactttttacattgagagacaagcttcatgaaacgaaaatggatcaaatgggtaagctggattttgcttacccccctcatactctttgtgatactgatggtattactctatatccctcccgtacagaattttctgagaaaggaggctgctgcttatgcttccgaagcaaccggcatgcagatcaatgtacgtcgcatcgatttacggtttcctttaaatctgttggtacggggagttgaagtcatccaggctcccgatacattgctttcacttgaaagcctcaatgtacatgtgcaggcacttccgcttttccgtggcaaggttgaggtagatgacatcagccttcagcaggtagcggttaattctgccaacctgatagacggtatgcggctgaaaggtgttctgggtagttttaggctggagagccatggggtggatctacccaatgaaatagccattataaaccgggccgaactctctgatactcatgtacagttgcttttgaatgataccactgctacgcctaaagatactgctcaaagtgaggtccgctggaaagtagacctgcgtcatttgaaattgaagaatgtctctttcagcatgcagttaccggcagacagtatgcgcttggcggctcatgtgggagaagcacaagtgaatgatgcggaagccgatttgaagaatttgcattacgggcttcgtagttttctggtatcgggtacctcggtcaattatgatgtgggcaccgcggagccggcggaaggtttcgatccttcacacatcgctttgcgcgatattcgtatcggactcgattcgatgtattatcgcggacgcaatatgaatgctgttatccgtgagttttcgatgaacgaccgttccggattaagtgtcacttcgcttaccggacgtgtgtttgccaatgataccattatccaagtgccgagtttgaaactgctgactccacattccgaaatggatcttactgcacagacttattgggagttggtgaatattcctactaccggacgtctgactgcccgctttaatgcgatgatcgggaaacaagacgtgttgttgctggccggtggattgccggatagcttcaaagaggcctatcccttccgtccgttggtgatacgtgccggtacggaaggaaacctgaaagagatgcagataacccggttcagtgccgagttgcccggagctttttcactttcgggcggtggagagttattgaatctgaccgatagcctggagaggtccgccattattgacctgaggatgcagacacagaatcttaacttcctgaccgctctgggcggaacgaggccggatagtttacttgttattcccaatcagatgtcgttggttgcgaaagcccgaatgaaagggcctcaatatatggcgcaactcctgttgaaagaaggagagggaatgctgaatttagatgctgcatacaatggaagcactgaggcttatcgggctgacctgaaggtggacgctttgcaacttcatcatttcctgcccaaagactcgatctacgaactgactacatcggtcgctgctgtgggaagagggatcgatttcacttcttatcgtatgactgcctctttgaaggcctcactgcaatcgttgcattatgggcgttatcagatttcgggaattgaagtgaccggtgatgtaaagaacgcacttgccacagcccgtttagtgagtgacaaccgcttgttaaagatgaatgccaatgccgaatatcaccttgccaaaccttatatggacggaaagcttgatatggatgttacacaacttgatttgtatgaactggggattgcccctaaacccctgaaatatcctttagcttttaattttacggcagaagcccggcgcgaccgtattttcactcatcttacggccggtgatatgaagcttaacctttcggcacgttccagcctggataagctgattaaacagtcagcacattttgctgatgtgctggtcaagcaaatagataagaaagaacttgatcacggggaattgcgagaggcgttgccgaccgctatattctcgatgtcggccggtaaagaaaatccgttggcctattatctggcaacgaaagatatcgcttttcacgatgtgggtgtgaagtttggcactgctcccgactgggggatcaacggaaaagcctctattcatgcattgaagatggataccttgcaactggacacgatctactttactgtcaagcaggacacgactcgcatgagtttgcacggaggggtcatcaacggtcccaagaatccgcagatcgtttttaaatcgagctttgccggagaaatacgcaacgatgatgccgaactcacgctacgctatgaaaatgcgaaaggcgaaaccggggtacttttcggtgtgaacgtccgtccattggtcgaaggaaacggaaaaggcgatgggcttgcttttacgctgataccggaaaatcccattattgccttccgaaagttccacttcgtcgatcatcacaactggatatacctccataaaaacatgcgcttgtatgccaatgtcgatatggcggatgacgaagacatgggattcaggataaaatcaaaccggaacgatactgtatcgttgcagaacattgatgtggagttgcaacgcatccgcctgtctgagatcagtgaagtgcttccttatctgcctgacttgtccgggctcttctcggctgaggctaattacgtgcagacagctacttccttgcaagtatcggctgaggctaatattgatgaattgacttatgaacgtcaacgcatcggcgatgttgcactcggtgtgacctggcttccgggtgaaagaggaaaacattatatcagtacttatctgacccatgagggcgaggagatattgatggctgacggttcgcttcatccttcggtgaccggtaaagacagtattgaggtgaatgccatcatggaacattttccgttaaagatagccaatgcctttgtaccggatcaggtagtcaccctttccggcgatatggacggtgggcttcacatcaccggtgatacagaccggccgttggtcaacggggatctggtcttggacagtgtgtcggtctttgcccgtcaggcaggggcgcggtttacgttcgacaatcgtcctgtacaaatcaaaaacagccgtttgacttttgataagttcgctatattcactaccggaaagaatcctttcacgattgatggtacagttgattttcggaatttgaccgatcccagggttaatctgtccatgctggcagaaaactatatgctgctcaatgctccccgtacaaaggagagcctggtatatggcaaagtgtttgtcgacttcaatgcaaccgtgcgcggaccggtaaatgcgttggtgatgcgcggcaatatgaatttgctgggcaatacggatgtcacttatgtattgatggactcgccgcttaccgtgcaggaccggttgggagacctggttacttttacttctttcagtgatacgacgaccgtacagaaagaagaagcccctgttgtgtcacttggcggactcgacatgattatgactgtacaaatcgatcccggagtccggttgaaggccgatctgagtgctgaccgtagcagccgggtagagttgcagggaggaggcaatctgagtatgcaatatacaccgcaaggtgatttgtccttatcgggccggtatacccttacgggtggtatgatgaagtatgcacttcccgtgatacccctgaaagaattcaatataaacaatggcagttacgtggaatggaccggtaatccgatggacccgatgctcaatctcaaagctaccgagcgccttcgtgcttccgtaggcagtgagaacgggcaatcgcgtatggtcaactttgatgtgtcgattgtagttaagaaccgtttggataacctttcactggcctttgagatcgatgcgcccgatgatgcggaagtgcagaatcagctggcttctatgagtgctgatgaacggggtaaacaggccattgcaatgttggctaccgggctctatctggctaattcgggaagttccggaggtgggggactaaatatgggatcggcattgaacagtatactttccagccagatcaatgcattggccggaaacctgaagaatgccagcttctcgatgggagtagaagaccacgatgcggctgatgcgggaggaaaacgtaccgactacagcttccgttattcgcagcgtttcttcaatgaccgtttccagatcgtactgggtggtaaggtgtctaccggagcgcaggctacgaatgatgtcgagtcgtttatcgacaatatctctctcgaatatcgtctcgatacatccggtacccgttacattcgccttttccacaataagaattacgaaagtgtgcttgaaggggagataacggaaaccggtatcggtctggtactgcgtaaacgtatcgacagattgggtgagttatttattttccgtaaaaagaagaagacacttcctgatacgcaaaaagctccgtctgacggcgaagcacatcagtaattgattaacaacagagatttaaacaggatgatacgtaaagaaacagttcatataatatgggttaccatacaagccggtcttgtaatgttgttgttgggagcatgttccacaaccaagcacctgcccgaaggggaaatactctacaccggatcgaagactattgttgaaaacgagccacaagcgcctttgacagaggatgcgctgaccgaacttgatgccgcactcgataaagctccgagtacaaaaattttaggctttgtccccatccctttcaagatgtgggcttataacagtctggttcgctataagaaaggtttcggacactggctcttcaaccggtttgccgccaatcctcccgtgttcatttctacggtcaatccggaaatacgtgccaaagtaggcaccaacctgttgcacgactatggctactttaatgggacggtccgattccagaccgtgcccgacaagaaagacagcctgaaggcaagtatacgctatacggtcgatatgaaagacccttattacatcgatacggtttattacactcgtttcaatccgcgtacgttgagaatcatggagagaggacgcagaggatcgttgttgacccccggtgaacagttcaacgtgagtgatctggatggagagcgcagccgtatcagtactttattgcgtaatcgcgggtatttttactttcgtccggactatatgaagtatcaggcggatactctgttgaatcccggacatgtcagtctccggttgatacctgtaccgggacttccggatgcggcccagcgcccgtattatgtcggcaagacatcggtctttttgtacggaaagggtggagaagtgccgaacagtacactcgaataccggggactcgatattcattattataagaagatgcaggtgcgtccgaatatgctttaccgttggttgaattatcaggcttatgtccgcaatgattctttgcgcaactctgctcatagccgtttatacagccagtatcggcaaacgcgtatccaggaacgcctttcgcaactgagtattttccgctatctcgatctgcaatatatccctcaggattctacggcaacttgtgacacgctgaacgtgcgtttgcaggctacgtttgataaaccgtacgacgcggaactggaattcaacctgaccaccaagagcaataaccagacaggccccggtgcatctttcggcctgacccgttacaatgtatttgggggaggagagacgtggaatgtcaagttaaagggctcttacgaatggcagaccggacagaataaaggaagttcattgatgaatagttgggagatgggagtatctactgccttgacttttccccgggtcgtgttcccttctttcggaggacgtgagtatgacttcccggcaaccactactttccgtttgtatatcgatcagcttaaccgtgccaaatactataaactattggcgttcggaggaaatgccacttatgactttcagccgacccgtatcagtcgtcacagcctgacacctctccgggtgactttcaatgtgctgcaacacacaacgaaggcctttgaggaaattgctgatcagaacaaagccttgtaccgtagtctgcagaatcagtttattccggcaatggaatatacctatacttttgataacgcggctttgcgcggagtgcgtaatcctatctggtggcagactacgtttacttccgccggtaacataacttccggtatttatcgtattttcggaaagaagttcagccaaagagacaagaaactgttcggtgttcctttcgcacagtttctgaaggtgaacagtgacttccgttatacctggaagatcgataagaaccagtccatagccagccgtgtggctggaggaattatctgggcgtatggcaatacaaatacggcaccttacagcgagcagttctatatcggaggcgccaatagtgtgcgtgcgtttactgcacgcagtatcggaccgggtggattccggccgacaaagacttcgaaagggctctatctggaccagacgggagatatccggatggaagccaacgtggaatatcgtttccgcatttacggtgacttgcacggtgctgtctttctggatgccggtaacgtctggatgttgcgtaaagatgaagaggcaccggaaaagcaactgcgttggaagactttcggcaaacagattgcgttgggaacaggtgccggtatacgttacgacctcgacttcctgattctgcgtctggattgtggtgtgcctttgcatgatccgtacgataccggcaagaagggatattacaatgtgaccggttctttctggaaggggctgggactacactttgccgtaggctatccgttctaaaatagtcgatgacgatgggcggcgtaagaaaattcttcatacttcgttcttcattcttcattctattttgtacttttgcaacgatatctgatgagacacatcactaaccttttaatattcacagttatgaaaccaacattatttgtgcttgctgccggcatgggcagccgttacggaggcttgaaacaattggacggactgggtcccaacggcgaaactatcatggactattctatttacgacgccattcgtggtggatttggtaaagtagtattcgttatccgtaaagattttgagcaggatttccgtgaaaagattctgagtaaatacgaaaatcatattccggtggaactcgtattccaggcattggacaacctgcccgaaggcttcacttgccctgccgaccgcgtaaaaccctggggaaccaaccatgctgtcctgatgggtaaagacgtcatcaaagaaccgtttgccgttatcaatgctgacgacttctacggacgcgacagctttgctgtattgggtgccgaactgtctcagatggacggtaaaaagaacgactattgtatggtaggttaccgtgtaggcaatacgctttcagaaagcggatctgtggctcgtggcgtttgtgagacaaatgcggaaggctatctgactacagtggtagaacgcactgcaatcgagcgtatcgatggtaaagtatcgttcaaggatgagaacggcgaaatgcagacaatcggcgataacactccggtttcaatgaatatgtggggattcactcccgactatttcgcttattcggaagagtatttcaaagagttcctgaaagaaaacgaaggaaacctgaaatcagaatacttcattccgctgatggtaaacaaactggtgaacgaaggtactgcccgcgtaaaggttctggatactacaagcaaatggttcggcgtgacttatgctgccgaccgtcagggtgtagtagataagattcaggcattggtagatgcaggcgaatatcctgataaactgttctaaagctaatttgcttatttctataatgtagattttgaaagggacgtctttgcgaagatgtcccttttttaatatcaggccggatcacacctctttggtacgctctctgccggtgaactttaaatcaccctccgggagtcgcgagggaggagatggtcggtttgtcaatgtgtcaaattgataatcgtaaccctctgtttctcgttttttcgggccacaatccggtaaagtctataaaaacggcctacaggcaaatatccattcatagttttgatcttgtttcatccctaatggaaataaaaggaaaggaagtatgatttttttgtttcctaatcttttctttgcggagtttttcctgcttttctgacactttgcagcggtcgggcggggggaggcaaccaggagaaaatcagtcactcttgtcgcccgatttgcattacaatagatgtaatctgccaaaacatatagagatattcagaaaagaagtaaacattttcgggaaatgcttacttcttttcacccgaagacttacttcttttggggtaaatgcttccttctttccgaaaaaacaaaggtgcaaccggctcaaaagcccggatttcctgtagaaaaagctttttactgtgctctgtttcttctgctttcacccgaatatgaaaaaggcttgtaagcgaattctgcgattcagtgtctttttgatgtctatgtctgcaaatgactgtcaattctttatgaggaaataaagtgtgcagggtttcggggcagatgagaaaagggcgaatgtccggtatgtgtcggatatttatattcttttcgttgcttatttcagaatatgtgtttatatttgaaatattcctttaggcttaactctgattatatatgaagaaactcctttgcctgataatactccttttctcttttattcggtcggaagcccagtctgatcatatctgtcctcacgagaaactttatgtccatacggatcgtgccaattatgagcgtggtgatacggtccgtttccgtgcttacctgatggatacccgccacgaggcaacggcttacagccgctacgtttatgccgaactgctggctgacagtcaggtcatctcccgtgagatggtcaaggatgatcacggtgtcttttccggttacctctctttgggcgatacacttcgttcgggcaattatacgcttcgtttctatacccgtcatctttcttctttgcccgctccccgttacttctatcgtcagatcattgtcggcgggcgtccctttcaggattaccgcaaggagagcgtgactcgtatggcggcttcctaccatgtctctttctttccggaagggggacgtctcccttcgggttgtgtcagccgtgtcgctttcaaggctttgagtcccgatggtttgggaacagatgtgcagggctttgtggtcaatcagcgtggagataccgtcaccacgttgcgttccgtccatcgggggatgggcttcttcaatcttgaacctgtttcgggtgacagctatacggcggtgtgccgtaatcgtgaggggatggagcttcgctttccattacctccggcggatccttctgccgtcagcctccgtgtcgatgtccgtaaggatgactttctggtgcgtttgaattcaggcgtttccctgtctccggggcattctcttcgtgtggaatatcgggatagtattcttttgcatgcggctttctccggttccaggcctttgcggtttctccgctctccgctgcctccgggtgtactccgttttgttttgttggatggttcgggcgttcctataagtggtcgtaccgctttcaatcagagtccttccgtgcgtgccgacgttgatttctcggctcgtttgaaagaagagaagggacgttcgttttgggatgtcagcttggggcttcgtgattcctcgggtgagccgttgggcggtacactttctgtttcggtcaccgacgaccgctatgcacttcaggataccacggtaaatatcctttcttcttttcttctgagttctgaccttcagggctatgttgaggctccctctttctatttttccagtgatgactcccgtacctcgtatctgttggacttgttgatgctgactcagggctgggtgaaatacagccttgttccggattacggtttctttccggtggagcgtagtcagtgtgtcagtggcaaggtggtttccgaatattcggaaaagaagtgtatcgctgatgcggttgtcactttattctctttcgataaaaagattatgcgtcagacgacgagtgatgcttcgggctgtttccgtttcgacagtctttccttcccccggggtacgcatttcattcttcaggcgcgtaagaaaaagggaggtacagatgtggcgctgttggtcgatcgggattccgttccttctgtacattcttctcttcccgtttatgcggattggtttcgtgcagagatggatgaaccggttgtttccgaacaatccggtaatgatccttctccgaccagtgcgaatgtgtttcaacgatcttctaccgcccctttttccatggagcaatatttagacgaagttgttgtttccactaaaaagattgagaaaaagaaacggtatgcaatcgaatctttaatggctcactccgattggaataagacttatcatgtggacgaaatgactctttcgccttattcatctactaaagatttgttgattaatactcccggagtagggtgggcagtcgattcgaactcaggagatttcttttatataacacggttgcgtgcaggaagaagttccactcctcctccggctctgttaatggtagatgggctggaaacttcttattccgaacttgtcggtatccctgtatccatagttgaatccatcgagttggtaaaagatgccgctcagatggcatatatcggatctaaagcatcgaatggcgctattttgattagtacaaaatcaggtttaggcactgttggtaagaaagcatccaattttaggataattcgtcccataggatatcaggtgaagcgtgagtcttattcgccttcttatccggttgtttatggtgcaataaataacggtgggaatagtttcagaacaatatactggtcaccggatcttctgcttgataaagcggcttctcatttggagttcggtaatccgaaacagggtcgactgactcttgttgttcagggaatcacaccagatggaaagttgataaatttgactcggactttaggtaatgaataataagtctttttatcagtatatttagagtaatcgggtgttgtctttctgttctgtctcatactgctacatgaatgatcattgtgaggtagatcatttcatcgtgttttgtagtgtatgtctgtttggctttcagttttagagggggtgtatatttattccgtttcttttttcgcagtctgtataaatgagtatctttgctgcctcaattcccttatttatagaaagaagtgatttcagtagaaggattaacagtagaatttaacgccacaccattgtttgaggacgttagttatgtcattaataaaaaagatcgaatagccctggtgggtaaaaacggtgccgggaaatcaactatgttgaagatcttggccggattgcaaagtcctacacgaggtgttatagctattccgcgtgatgtaacgatcggctatttgccacaggtgatgattcttgccgataaccataccgtgatggaagaggcggaattggcatttgaacatatttttgaattacaggccgacctggaacgcatgaatcaggaattggctgaccgaaccgattatgattcggaagagtatcataaactaatagaccgtttcacgcatgagaatgaccgcttcctgatgatgggaggcactaactttcatgcggagatagagcgtacgctgataggattgggattcagccgggaagattttaatcgtccgaccagtgagttttccggaggatggcgtatgagaatcgaactggccaaacttctgctcaggaaaccggatgtgctgcttcttgacgagccgaccaaccatttggacatcgagagtatccaatggctggagactttcctctctacccgtgccaatgcagtggtgctggtcagccatgaccgggcctttttaaacaatgtaaccactcgtaccatcgaaattacttgtgggcagatatacgattataaagtgaaatatgatgagtatatcgttttgcgtcaggagcgtcgtgagcagcagttgcgtgcttatgagaatcagcagaaacagattgaagatacagaggcgtttatcgagcgcttccgttacaaagcaacgaaggctgtgcaggtgcagagccgcatgaagcaactggaaaagatagaacggattgaggttgacgaagtggataactccgcattgagattaaagtttgtctgttccagccgtagcggaaactacccggtgatctgcgaagacgtgaaaaaggcctatggggcacacgttgtcttccatgatgtcaacctgaccattaatcgtggtgaaaaagtggcctttgtaggaaagaacggtgaaggtaagtctacccttgtgaagtgtatcatgagtgagattgattatgagggtaaacttacactggggcacaatgtgcagattggatattttgcccagaaccaggcacagatgttggatgagaatctaacggtcttcgatactatcgaccgggtggcagtgggagatatccgtctgaaaatacgtgatattctgggagcctttatgtttggtggagaggcatcggataagaaggtgagagtgctttcgggaggtgagcgtacacgtctggcaatgataaagttgcttttggaacctgtcaacttcctgattctcgacgagcctaccaatcatttggatatgcgttcgaaggatgtgctgaaagaggctatccgagagtttgacggaacggtgattatagttagtcatgaccgtgattttttggatggacttgcgactaaagtatatgagtttggtggtggcgtggtgaaagagcatttgggaggtatctatgattttcttcaaaagaagaaaatagagaacctgaatgaacttcagaaggcgaatccgtcatccgcctcgcccgcaaacggtaagaaagaggaaggagccgaagaaggaatatccgagaataagttatcatacgaggctcaaaaagaactcaataaaaaaataaagaaactggagcgcctggtagcagactgtgaagctgctatcgaacagacagagtcggctattgctattcttgaagaaaagatggctacgcccgatggtgcttcggacatgtcgctatatgaacaacaccaaaaactgaaacagcaacttgaccatacggtggaagagtgggagcgcgtttcgatggagttggaagagatgaatgaaaaataatagtttattaagtgtatgaaagtaattaagtatttaccaattcttgcaatctgttgtatggcaacaggatgcaacagtaagaaagaggccgtacttacgtccggcattgaccttgccaaccttgacacaactgccctgccgggcaccagtttttatcagtatgcttgtggcggatggatgaaaaaccatcctctgacagatgagtattcacgtttcggttcattcgatatgctcgccgaaaacaaccgtcagcagttgcgtggactgattgaagggctggctgccgaaaaacatgaagccggcagcattgcacagaaagtcggtgaactttataatatagctatggacagcgtaaaactgaataaggaaggcgctgcccccattaaacccgaactggagaaaataggtgccatcaaagataaagctgaaatctatccgttgattgtagaaatgcagaagagagggatgtatccgtacttcattctgtatgtcagtgctgatgacatgaatagcaatgaaaatatggtgcataccatgcaaggtggcctgggcatgggcgaacgggattattatttggaggatgatgcgcagacgaaagaaattcgtgataaataccagcagcatgtaagtaagatgttccaactggccggatatgatgaagctactgcccggaaagctgtgaaagcagtgatgaatatcgagactcgcctggcccggtcggcacgttcgcaagtagaattgcgtgatccgcatgccaactataataagaagactttggaagaattgcaaaaagagtatccttcttttgcatgggatgtatttttctcaactgccggactgaataacctgaaagaagttaatattggtcagcctgatgcattgaaggaggtgaatgccatcatcgatacggtatcactcgaggaccagattttgtacttgcagtggaatctgatcaattcggctgccaactatctgagtgacgactttatagcccaggattttgatttctatggccgtaccatgtcgggtaagaaagagatgcaacctcgttggaagcgtgctgtcagcactgttgatggttcattgggcgaggctgtcggacagatgtatgtagagaagtatttccctgctgcggctaaggagcgtatggtagcgctggtcaagaatttgcaggaatctttgggagagcgcatcaaggggctgagctggatgggtgaagagaccaaagaaaaagcacttgaaaaactggcgactttccatgtcaagatcgggtatccggataagtggaaagactactcttctctggaaataaaggatgattcatattgggccaacattgagcgtgccaaccggtggagttacaacgagatgatcggcaaatatggtaaaccggtcgataaggacgagtggtatatgactccgcagacagtaaatgcatattacaatccaacgacgaatgagatctgtttcccggccggtatacttcaatatcctttctttgatatgaatgcggatgatgccttcaattatggagcgattggtgtagttatcggacatgaaatgacccatggatttgatgatcagggtcgtcagtatgataaggatggtaacttgaaagattggtggacggcagaagatgccaagaactttgaggctcgtgcggcggtgatggctaacttcttcgacagtattgaagtagctcccggtgttcatgccaatggagagtttactttaggcgaaaatattgccgatcacggtggacttcaggtatcatatcaggcattcaaaaaagcgacggctgcggctccgttgaaaattgaaaacggatttacacccgaacagcgcttcttcttgtcttatgccaatgtgtgggccggaaacatccgtcctgaagaaatcctgaagcgtacgaagaccgatccgcattcgttgggtaaatggcgtgtagatggagcactgcctcaaatcggtgcatggtatgaagctttcaatattactgaaaaagatccgatgtacttgccggtagataagcgggtgtcaatttggtaatagattgttgcaaataaaataaaagtaaaaatggcgctgactcattcaattgtgagtcagcgcttttttattaataattcacaccttatttattacgtacgataaacaatatttcgtaactttgcgcaccaaatacttaataagcaaatcaatgtctgagtctaaaagaataaaaaccgctttggtatcggtttatcacaaagaaggtttggatgaaatcattaccaaactgcacgaagaaggagtagagttcctgtcaacaggcggaactcgtcagtttattgaatcgctgggctatccctgtaaggctgtcgaagatttgacttcgtatccttctattttgggtggtagagtgaagacgctgcatccgaaaatattcggaggaattctttgccgccgtggactggaacaagacatccagcagattgagaaatatgaaatccctgaaatcgacctggttattgtagacctctatccgtttgaagcgactgttgcttcgggtgctgatgaggctgctattatcgaaaaaattgatataggcggaatctctttgattcgtgccgctgccaaaaacttcaatgacgtaattattgttgcttcacaagctcaatataaacctttgctcgatatgttgatggagcacggggccacttcttctcttgaagaacgtcgttggatggctaaagaggcatttgccgtatcttcacactatgattcggctatcttcaactattttgatgctgaagagggttctgctttccgttgctctgccaatagccagaagacgttgcgttatggcgaaaatccacatcagaagggatatttctatggaaacctggatgagatgtttgatcagattcatggaaaagagatctcttataacaacctgcttgacatcaatgccgcagtcgatttgatcgatgagtttgacgatgtcacatttgctattctgaagcataataatgcttgcgggctggcttctcgtcctactgtactcgaagcatggaaagatgcgttggccggtgatccggtatctgcctttgggggagtgctgatcacgaatgcggttattgataaagagacagcggaagagatcaataaaatcttctttgaagttgtgattgctcctgattacgatgtagatgcactcgaaattctgggacagaaaaagaatcgtatcattttggttcgtaaagaggctaaattgccgagaaagcaattccgttctttattgaatggtgtattggttcaggacagagacttgaatattgaaacaactgcagacctgaaaacggtaactgataaagctccgacaccggaagaggtagaagatatgctgtttgctaataaaatagtaaaaaacagtaagtcgaatgccattgttttggccaaaggaaaacaattgctggcaagcggtgtgggacagacttcacgtgtggatgcactgaaacaagctatcgaaaaagctaagtcgtttggtttcgatttgcagggtgcggtgatggcatcggatgctttcttccctttccccgattgtgtggaaattgcggataaggaaggtgtgacagctgtgatccagccgggcggttcggtgaaagaccagttgacatttgactattgcaacgaacatggcatggcaatggttacaacgggtatccgccactttaagcactaattaaaaacttgttgtatgccggacaacccgttatgggcacactggtatattgacgcattagaaatttattcattatgggattattctcttttacacaagaaatagcaatggacctcggtacggccaatactatcattattaccggtggtaagattgtagtagatgagccttcggtggtggcccttgaccgtcggacagacaagatgattgctgtaggtgaaaaggccaagctgatgcacgaaaagacgcacgagaatattcgtaccatccgtccgttgcgcgacggagtgattgccgacttctatgcttgcgagcagatgatgcgcggactgatcaaacaggtaaatactcgtaaccgccttttctctccatcgcttcgtatggtgatcggagtgccttcgggtagtacggaagttgaacttcgtgctgtccgtgactctgccgaacatgccggcggacgtgatgtctatctggtatttgaacctatggctgcggctatcggtatcggtattgatgtagaagcaccggaaggaaacatgattgttgatataggtggtggttctaccgagattgctgtaatttcattgggaggtattgtttcgaacaactctattcgtatagcgggagatgatctgactgccgatattcaggaatacatgagccgtcagcataacgtgaaagtcagtgagcgtatggccgaacgtattaagataaatgtgggtgctgctttgaccgaactgggtgaggatgctcctgaagattatatcgttcacggaccgaaccgtatcactgcacttccgatggaagttccggtatgctaccaggaagtggcacactgtcttgagaaatcaatctcgaagatagaaacagctattctgagtgcgttagagaatacacctcctgaactgtatgccgatattgtgcataatggaatttatttggccggtggtggagcgctgcttcgtggcttggacaaacgtctgactgataagataaatattcctttccacattgcagaagacccgttgcatgcagtagctaaaggtacaggggttgcattgaagaatgtagaccgtttctcattcttgatgagataaataattgactacggtttacgagctataagtgagaggcagttgcgtaagttgctgcacgaatttgtggctcgtagatcgtagtttgtaacttatatgtctttatgcggaatttactgaactttcttttgaaatataatcactggttcctcttcattctgttggaggtgatcagttttgttttgttatttcgctttaaccactaccaacacagtgtttatttcagttcggccaatgtagttgccggcaaagtatatgaagtatccggtggaataacttcttatttccatctgaaatcggtcaatgaggatttactggatcgcatcatggagttggagcagcagaaccgcaatctggagaatgcattagtaaaacatctctctgactcaaccgagctgaatagtatccgaaacttgtcggatacagactatgaaatcttcaaagcccgggttatcaataacagtctcaatctggtagataactacatcactctgaatcggggatcgaaggatggcatccgtcctgaaatgggcgtggtcgacggtaatggggtggtcggcatcgtatatgaaacttcttctcactattcccgggtgatttcggtgttgaacagcaaatccagcattagttgtaaaattgtgggtagtgagtatttcggttacctgaagtgggaatatggagatgcccggtatgcttatttgaaagatttgcctcgtcatgccgaattcaatttgggagatacagttgtgaccagtggttattccacggtttttcctgaaggtattatgattggtacggtagatgatatggccgattcgaatgatggtctttcctatctgttgaaggtaaaactggcaacggattttggtaaggtgagtgaggtgcgtgtgattgcaagaaccggtcagagagagcaaaaagagttggaacaaaagagtttggcgcaatgattatcaactatatacatagaataggatggtttgtcggtctgatattacttcaggtgctgatcttgaataatgtgcacatagccggtgtggctactccttttctatacgtttattttatattaaaatttaactccggtacttcccgaaacgaattgatggtatggggtttctgtatggggcttgccatcgatatcttttctaataccccgggtatgaatgcggcggcgacagtactactggcttttctacgtccgttgtttcttcgcttgtttacgcctcgagatactttggatagtatcgtaccttcgctgaaaagtatgggaattgcttctttccttaaatatttggtggtaagtgtctttgttcaccattttatgttactgactcttgagttcttctcatttaccagcataccgttgttgctgttaagggtggtgtcgagcaccattttgactataacctgtattatggctgttgaaggagtgaggagataggtatggcaaaagattatgttttagagaaacggaaatatgtgatcggcggagtagcattggctattgtcctgatttatctgctgcgtctgttttctctccagatagctactgatgactataaaaaaaatgccgacagtaatgctttcctgaataagattcagtacccgtcacgtggggcaatgtacgaccggaatgataaactgttagtgtttaatcagcctgcgtatgatataacaatggtgccgaaggaagttgagaacctcgatacactcgacttgtgccagacgctgaatatcactcgtgcacagtttctgaagataatgagcgatatgaaagatcgtcgcaggaatcccggttattcacgctataccaatcaggtattcatgtctcaactttcggcagaagaatgtggcgtatttcaggagaagctatttaagtttcgcggattctatatccagcgacgtaccattcgtcaatatagctataactccgctgcccatgtgcttggtgatattggtgaagtatcaatgaaagacatcgaaaatgatgattattacatccggggagactatatcgggaaacagggtattgaaaaatcatatgaatcttatttacggggcgaaaagggcgttgaggtattgttgagggatgcgcacggacgtatacaaggacattatatggatggaaagtatgataagcgtccgatacccggaaagaacctgaagctcggaatcgatatcgatctccagatgttgggagaacgcttgttgaaaaataaaatcgggagtattgttgctatcgaaccggagacgggagaaatactttgcatggtttcttcacccgattttgatccgagactgatgattggccgtcagcgcggaaagaaccacttgatgctccagagagatccgatgaaacctttgttaaaccgttcgattatgggagtatatcctccgggatcgacgtttaaaacggcacaagcgctgactttcttacaagaagggattattcagaccaatacgccggctttcccttgtgctcatgggttcaattacgggagtttgcatgtgggatgtcatgcccatggttcgccgttgccgctaataccggccattgcgacttcatgtaactcttatttttgttggggcttgttccggatgtttggcgatcgcaagtatggctcttcacaaaatgccattactgtatggaaagaccacatggtgtctcagggttttggctataaactcggggtggatttaccgggtgaaaagcggggattgattcctaatgctcagttttatgacaaggcctatcgtgggcgttggaatgggttgacggtgatcagtatcgcaattggccaaggagagattctggcaactcctttgcagatagccaatttgggtgcgacaatagccaatcggggacattttattactccacatattgtgaaggaaattcaagatgaacagctcgacagcctctatcgggttcccagaaaaacctctatcgaccggaagcactatgaagatgtggttacaggcatgcgtgctgcggtcacaggaggtacttgccgggtagcaggagccattttaccggacgttgaagtatgtggcaaaaccggtacggcgcagaaccgaggacatgaccactccgtttttatgggatttgctcccatgaataacccaaagatagccatcgccgtatatgttgagaatggtggttttggcgcagtctacggagtaccgatcggagcattgatgatggaacaatatttaaaagggaaactctctccggagaatgagatacgtgcagaagaatatagtaatagagtgattatgtatggaaacgaggagcgttagtttatggaaaacattggattgggtaacgatcgtcatttacctgctccttataatcggtggatggtttagtgtgtgcggtgccagttatgattatggtgatcgtgactttctggacttttcaacacgtgccggtaggcagtttgtgtggattatctgttcctttgggcttggttttatactcctgatgcttgaagaacgaatgtacgatatgtttgcatacctgatatatataggtatgattcttctgttgatcgtaaccatttttattgcacccgatacgaaaggttcccgttcgtggttaatattaggtccggtcagtctgcagccggcggagtttgcaaaatttgccacagctttggctctggcaaagtttatgaatgcctattcatttaatatcaagaagtggaagtgctttttacccttggtagcttttattttacttccgatgttgctgattattttgcagaaagaaaccggttcggcattggtctatcttgccttcttcttggtgctatatcgcgagggtatgcctggagtagttttgttttcgggagtatgtgccgtagtctattttgtggtcggtattcgtttcgatcaggtatttatagccgatacgcctacgcctatcggagagtttgccgtgttgttgatgatacttttatttgccggttccatggtttgggtgtataggaaaaagtgggaacctgtacggaatatgataggcggtagtttgcttgtgctgctgatcgcttatctcgtttctgagtatctctctccattcaatttggtttgggtggagtgggggctttgtgtggtgaccataggttatctactttacttatctttgagcgaacggcaacgtgcctatcttttgatcggattgtttgctttgggttctatcggttttctttattcaagtgattatgtgttcgacaacattcttgaacctcatcagcagattcgtataaaagtggtgttggggatggaagaggacttggccggagccggttacaacgttaaccagtcgaagattgcgattggttccggagggttgacgggtaaaggttttctgaatggtacacaaaccaagttgaaatatgtgcccgaacaagataccgatttcattttctgtactgtgggtgaagaacaggggtttgttggttcggcagccgttcttttgcttttcttggcattgatactccgtcttatagcgacgtcagagcggcagacttctactttcgggcgggtttatggctattcggttgtgagcattttcctgttccatttgtttattaacatcggaatggtacttggtctgacccctgtaatcggtattccgttgcctttctttagttatggcgggtcatctttatggggatttacgattctgctttttatctttctgcgtatcgatgcggggcgtagcagacggctataaatgttctattttcaatcccacatcactgatcccggttagttgttcattcttcatttcgtgtactatcttgaaagtatagttgccgggatgtttaacaaagcagtccttcaaagggagtgccgattggtagagacttccccagccggttcctgtccatttaccttcccggtcagtcagtataaacttcagggtatctgtcttccatacagttgaatcttccagattataatggatgaggatattcaggttctgataagggtagttactgctgttgcgtacaccaacggacagtcgcaggttggctagggaatcttttagaggcatgttgaaaaagagtgtatcactcttcttccatccatccgggggagtggattggtaagagtgatacacagtattttcgtcacatgcagtcagaacccatgtggtaaggagcatgcaaatgctattcttgagcaggcttttcattttcctgagctttctcgatacgtttaggttgttcattgttgcgcggtccgcgtggttcgcgaggagggcgctgttcacggggttcgtttttacgcgtttcccggttctcgttgctacgcggttcacgagactcattatttttacgtggttggttgttgttgcgattattgtttttcggacgttcaccacgtgtacgctgttggttttgtacaggctgagaaccgttgttctcctgtgcattaatcggagtgggctgtgaactctgtgtttcgccattggtagcttgttgcgggcggttattattcttctttttctttttccggtttccgtttccgccttcgtcctttccatttccgtctttggcgttacggcggcggtcacggtcgaaacgcgtcaagctttcctgctccagcaaatcaacaggctttttaggttccggtttgcgttcggcttccaacagactgtccggtttaatacctcttttgttcagccctatcacttcgaatgcacgttttccgctaatggtcactaagtttgctgcaaagtttttgtcggttgaatacgaaatctgattactgaggatatctgctttgaagaagtaataggttccgtctttggtttccagttcgatttctcttgagggcagacgtttttgtgcttctacatagcagtccacttcatagttcaggcaacattttaacttggcacactgtccggccaacttttgaggattcagtgaaatatcctgatatcttgccgcactggttgatacggatacaaaactggtcatccaggtggcacagcataactcacgtccgcaagggccgatacctccgatgcgtccggcttcctgccgtgcaccgatttgcttcatttcgatacgtactctaaaagcttcggccagtactttaatcaattggcggaagtctacgcgttcgtcggcgatataataaaagatagctttattgccgtctccttgatattctacatcaccaattttcatatccagattcagactggctgctatctgccgtgcacgaatcattgtggtatgttctttggcttttgcttcttcatatttctccatatctacagcttttgctttgcggtagatacgcttgatttcggcatcctgtttaaagtttgcctttttcatctggagggggactaatcgtcctgtcagggtgacagtaccaatatcgtgtcccggagtagcttctacagctacgatatcgcctttctccaatttgattttgttactgttacggtagtagcctttacgggtgttcttaaattgaacttctaccatatcactctcctctgcattgcctggtatgtcggccagccaatcataggtatttagttttttatcttgtcgggaacagcttttacaacaaagacctccgctcccattatgcagtttaaattccatatactttattttaaagttattgctttaacagtacgatcatcttcagcgagaagtcgaaaaataccattttagcatttacgttctgttcaatatgtttttgagcttcactcagttcatccatgatgcccattacatttcgttcgttgacaaaaggggcaaaccgtgtagcgaagttctgttcttctaatgtcatataagtcaactctttccggtgtaggttgtagataaaattctcccggatcattcgttggcagtattccagaaagtttttctggcgttcgcgtcccatgcctgccacttgttcactccataatttcatttcccggattttccgttggtaagagagtcgcatcaaactgacaaacagttcgaaaaacaactgattctcttcattcaggtgaatcgtctcgagggctttgataaagtttccgttggctaggtgggcgatcgaaatactggttgcctgctggaccccgtatttgctttgtaaagcctcggccatacactcttcctcaattttacgtagattgaagcgttgtgtgcggctcaatatcgtttggagaattaaatcgggagcctccgaaaccaaaaggaagattgtcttttcgggtggttcttccagcagtttcaataacttgttggcacaagcctgttgcatcttttccggcagccagaggagtgtaatcttaaatccgccctcgctggatttaaggctgagctttttcatgatctcatcactctctttggtgtagattacggcctgtgcattttctgcatttatttcgttcagccaatgattgatggtaaaatagggattgtttaacaccaattttctccattctacaatgtagtcatcgcttctcccgttttttactaccggaaagacgaaatgaacatccgggtgaaccagcttattgaatttcacacatgacggacagactccgcaagcatcagtgtcactacgattggtgcaactcagatagcgtgcataggccagtgccagcggaaacttgcctaccccttcgggcccacaaaaaagctgggcatgggggatgcgtccttcgctgacttcttgtatcagtcgatgcttggcctcttcttgtccgatgacgtctctgaaaaacatggcttaataaattgctttggctacttctttgatactgtccactgctccgatggagtagaaatggatactgggcacaccggctgccatcaactctttgcattggctgatgcaccattcgatgcctacctgacgggcttcctcatcggtttggcacttcagtgcttccttggtcaactcttccggaaggtctaccttgaacgttttaggcaccatattcagttgtgatatctttttaaagggcttaatacccgggatgatagggatgtcgatacctgcctgatgtaccttttctacgaattcaaagtactttttgttatcgtaaaacagttgggtaacggcatattctgcaccggcttccactttcttcttcaaccaatagatatccatatcgatattaggagcttcttcatgcttttccggatagcaagccacaccgtatgagaaaggagtattagtcactttcatctccgatccgtctacaaaaatacctttgttgaagttattgatttgttgctgcagatccaaagcatgatgatgtccgtctccctcaggagtaaacacggtttcatgtttggctttatcgccacgaagcactaatagatctgtaatacccaggaactgaaggtcgagcagtacatattctgtctcttcctgtgtaaacccgctacacaaaatgtggggtactactgtgatgttgtatttattctggatggcagcagctacagctacggttcccggacgtcttctcaggcggttgcgctgaaaaagtccgttgcctaaatcccgatatacatactcactgcgatgagtggtgatgttgatatactttgggtcgaactcacgtaaggtatctatggtttggtacaacttctcgatgcccgtaccctttaaaggagggagtatttcgaaagagaaagctgttttttcgttgctatgtattaaatcaattactctcattatttttttattcgtctttgctatccttgcagaagcatgcatattgggacaaaaatacgaaaaaaagatgaaacgaaatcgttgtagaacctgaaaagattgcctttgttcccagttatgattctttttctgttgttaacctgaacttttaatgaataggaggcaaaacttttatagaaagatatttattgtaacttgtttggagatatttagctggtttgtataatgcttacatacaagcggtggctatttcagcttgagttgtaatggacggaatggagaaataagtttctacttcaagatgattcaaacatcattatctgtatcgggctaaacattatttcagtggagggaacttttctatgttgttaatgctataatggggatgattgatgcaaaacgattaggcatagggacaaggagtgggtgagtgtggtttatagagtaggctaaggttgattcatatagtctggcactgtccagaattttgtgtaaata

SEQ ID NO: 5102 - DNA, 324 bp, Unknown
  gut microbiota DNA sequence
ttattctctttctttctttgagcagctctctatttccctaaaaatacccctataacctctttacacagccatccttttatctttaaaaccaagactccttaccttttaagccaacaacaccccttggctttaaaccaacatgcctttggtttgaaaggtaggcttctcctgtttttaccctaaattttgcttatgaaaatactttataatgaaactttcctgatcgcaaatgttcttccggattgcaccggcacttgctttaattgcacctatacctgctctgattgcatccatacctgctctgatcacaactatacttacttc

SEQ ID NO: 5103 - DNA, 303 bp, Unknown
  gut microbiota DNA sequence
aacaaattaaaaaaagtatcgtatgaaaataaaaagacttttagtgttggccgttctacccatgctgtgtcttgcagtgaatgcacagaactgtagtaaagacaatactcctaaaaaaggagactttactgtagcagctactgttggatacaatagttacacaaatgtcacagccccttcggggctgctgactgactatgaagtcagagcactctctaccaactgggcagacaaaaagctgatggttggttttgaaggaggctggttcttcaaagatcagtggaaactaaatttgggtggcgg

SEQ ID NO: 5104 - DNA, 309 bp, Unknown
  gut microbiota DNA sequence
ggcgaggttacccttgatcttctgaaagccatgaaaattccttttataattctggatacggatgaagacgaggccctggcgcagatccatgacgcggttgtctcggcgaagagccggtcgattccccatgcgattgtcatccgtaaagatacgtttggaaaatataaattgcgtcaggaagccttgaatgactatcctctgtcccgcgaggaggtgctaatgcaggttgtcgaccacctcggggacaatgacattgtggtttccaccacgggcaagctctcccgtgagcttttcgagtaccgtgaatcg

SEQ ID NO: 5105 - DNA, 4377 bp, Unknown
  gut microbiota DNA sequence
tgaattagccggaatcgtaaaaaaagctttctgcttcagtgttgacgttccgctctcggtggcgtattgcagcacccagatcgtgttaacaggaatattgttaatcgctccgcgggtatccaccgtcagctccggaggcagtttcagaactaatcgaagctcctcggaagtctctacggattcctcgctgcatcccgccagcaagccggaaaccgtccataggccggaaaccgccagcaggcaaccgagtgcccatttgcccgtccatcgtcgtatgtattgtctttttgccattctgttttgatctgattctaaatatgataattgtatatgaatatgccggttattttcccatttcatccgaatcgagcgttacggtcgattcatactcgcctatcgccaacgtcaagtcggcggggtcgagtataccatagaacgtcagtgtgaagtcgaacgtataggtcatgcccggcagcaacaccttctggatctccgccggataagtctcggtcaatgtcttatccccattatctttgtaacctaccgtcaggttcacatcaaaagaaatcatggccgatccgtctaccggaagcaccacaaccggcgtacttactcgtggaatggtaactgtttgccctgtcgtattatatgtgaatccggtgaaggtctgagtagtggcaaatgtttcattcgccaccgtcccccaggcagtactgcccaacgtgtaaggcaacgatgcccggagtcctcccatcttgaaggagttcaccaccagactggtaggagtaaccggatgggttcctttttttgccgccacactcactttaatctgtgctcccaagcgtttaaagggagccggcagcactacgtccatcatgttttctcccgtttggttgggttgcaccacgatccctttcaggctggtgtacataaagtcttttccgttcgacacctgaatcgtaccgtccgttttcagttcgggcacttccgtcgaagagttgtacgataccagataaaggtcgtacgttccgcgatacagatagagttcgcccgtagccactccaccctttaccgtatatactttatgatccagcggttccgtcgtcgtggtagacgcacctgcggggaaagcatagatacagaaagtctttccatcctccatatccgttgccgcatcggcacgggtcgaagcctcgtccgcctccgcccggtaaagagagaagcggagcgataccggatctccctcctccgtgccgggttccccgggagcctgttccgaacatcctgtcagtcccggcgctcccagcaagcaaaggcaacaccctatccaaagtttcagtcttttattcatcgtttcttgttttagttcaccacagagtacacagagtaacacgaagtggatcgttttccactaaatcccgatactcgtgttctggttcgcatcgttcttccagtcctctatctgtaccgagctcagcttacctcccattttgtccaccgtaatcagatagacataatgctttcccgcctcccactgcgctgtcaccgattgggtttcaaacgcatgcgctttcgcggcagcttctccgtccacacatactttgagccggaacgagagcaccgtttcttctttcgccatcggcgccacgaggcaggtcacgttcggtcctttctggttttctttcagcttcaactccacgccactcgcctgcgccagtgtcagtgtcgaaatatccgacagactgttcagcaatccgcttttcaggttcatcgtcccgatgcctgtccgcagacggttggttccgctcagcacatccacctgtatcagctttagcgcttcggtggccgaagccgacttcacgatacggaaactgactttggccaacgcatgcttcatcttgaagctgacggttctcgaggaaagtgttgccgtgacgggggctttccccgtatccgtacccacaccgtagagataatcggcctgcccggtagcgagaaaatcagtcaatgacgacggaaggttcaccgccgtcgtatgttcaccgtcaccggacgcttggatggctgcgggaggataataggcgtatagcaaggcatcacccgaagtggtgttcatgatcgtctgcttgtccggagtccagactccttctttcaaggagaacttcatcagtggattgtctccatacgccgcatgtggactggtagctgatgcggtagtggtggcatacacgtccacctcggtgatagcggttgcttccgcacgggtgacgctctcctctccctccacttcgatccgctgcaattccagtgcgccttcatcggtggcgaatccgtcgtccgaggtgcatgaagccgtcaggcatatccccgctccgagggcaagcgccatgtagaggcgattcgccggcttcttcattcgattgtatttttgtaggttcatatatgttttcgtatccgtttttcattaagtggcgtttcccgcgtctgtctccgttgtctctacgaatcgttctacggtgataccgttcaggatcaattcattggtggacgtaaagttatactggtagttgtatccggccttcaaggtatgggccgccttctcggtgtacttcttctccgtttcaccgctgtcgccggccttcaccttgatcacaaacgttcgggagccgggcttgacgatggctacatacgtatgttgctgagcggaagttcccgctgccgaagcgccataggcgttgatcgtctccgatgtagagacatcggtggcaatccccgtaccctccaggcttgccgtgccgggaagctttgaatcatttccatacttcaccaccaaggtcaccttcgccgcttccggagcgaacgagaacgtagccttattgccatcgagtactcctttagccgtcagccggttgcttttccagaaattggtggctgtgcgctgatcggttagaattcggtcgaacgccgtaggatacgaagccgtaaacgtttcaccaccggtggtggtaagcgctgtttgtccgcttacgggttgccaggtgccggttgtgccggtgaccatccgttggtagtcggcagttttcgtgccgtccgtaatccggatggtatcattcgctacaaattctcttttatcataatcatcggcatgcgagtctgccgccgcacgggtagcgggattccccacctccgccgatacttccaacggacggggcaaagcatcctcttgcgagcaggcggccagcagaaccgggaagaacaggcagagagccgccccggataccgataggattctattctttttctttttcatggggttacatcaaactaatattacatcaactaatattacatcaaactaagttacatcaacttaaggttcctgtatgcgaatccccgctttgccactctttgatctcctgaccggtgggaaccagcacatcatttttcagggtgagcgtataggtgtagtgactgttcgccgcccttgcgcaaataagggtgatgtcatagaccactccgttagcatccgtcaccgatacctgtatcgactgttgggaagtaagcggggcgataatgccatgccaggtatattgctctttgtctgtaccaccggggtgatacaggtagacggtttcatccttgcttgctcctccggagtaaagccccttcccggttacggtcatactcgtaaaatccttggacagtgtgttctttcccgaaaatttcagggtcagcttcacgcctttgtgcacaaaggcgctttcgcctgtaaaggagagggttccgtcacggccgatcgccaccttctcaggagtctccagcagattgctcaggcggtagtcctcacctcccgcctttcgctggtcggcacggatacccgagtattcgatagggtaactcgcctggtaggtggctccggactcaacgagcagctccgtacccgtacccgtcaccgaaggtttccactcgcccgtactgctgccggaagaagcggagttcaatgtatagtccaccggagtggatgacgagccgttccgcgagcggatgatacggattttgtcacctacggcaaaggtgctgcggtcgtaaccgttgtcggctgccacggcacgggtcccggctgccacggccacccgggtctcagactcccggccttcaccggaagcgcagatcgcggcggacaccgtaagcggagtcccttcgggcaacgaaggggtcagcgcattgtccgaacagcctgcggtaagcagcaggcagcctaaaaccatttggtataatctatctgttttcatactgaatcattcattctgaatcatttgtcattctgaaccatttattgttctgaaccatttattgttctgaatcatttgttgttct

SEQ ID NO: 5106 - DNA, 739 bp, Unknown
  gut microbiota DNA sequence
tctacgtcactgctccccccggaaacttccgcccacccttttatatcgacaggttgcaggctgattccccgttcgccgagcgtcaaggtatagacgtagcggtatcctttctgccatgccgggttgaaggcatcggtcgagagggtaagatcccgttcggtagcgtccgagctttgttcacctagtgtcagcgtcaacgtcacctgcgtgcccgaagctgcctcagccttcggagccaccaacccgtaggccactgtaacggggcccgaggtgccgacctgttgcggacgggccgatggggtaaaagagatttcacccaccgcgtccagtccggacaaagcgccatccgtcagggacatcgtgccggccgatccggatccggaagcagtcgtacagtagaaaggagtagcgccgcccgctgccgtaagcttaatcttctttacataatcgtatgtcggatccggggtgcggtcgttcgcgttctgaatgcggaacacgacttgcgacaaggcgtgttgcagatagagggtcggcgaaggagacaggctgttggcggtaaccgccgtagccgaacctacggtagcgctgccggaaccgtaaagataatcggtggtagagcagtcgtaggtatttcctccgtcgaagttttgcccggcaggcacgctgacggggagagcaggcaagacagtactgctgctgccaccgctaccgctgccactgccgctaccactgttgcctc

SEQ ID NO: 5107 - DNA, 358 bp, Unknown
  gut microbiota DNA sequence
ctacattcaggctgaattttccgttgatatctgtgatggtaccgttagtcggatttcctttttctataaccgatgctccgatgatggcttctcccattgcatctttcacaactcccgaaatatttctttgtttctgttgctgggtagtctgtacctctttcgctgctgcagctgctgtagacactacgatctgattgtctacaatcttgtaggtatatcccgagtttttgaaaacttcatccaatacggtttcgatcggagcgtcggatacgttgatggatactttcttgttcagttttacctgattgtcattgtagaagaaagtgtaatcgctttgtttttcaagttcacgaagtac

SEQ ID NO: 5108 - DNA, 701 bp, Unknown
  gut microbiota DNA sequence
ccccttatgaaaatttggttggtatatcgggaaaggtgaagagaccgatgatctatgaaatgaaacatggagaaagtttagctactttgattggttatacgggtggatttaccggagatgcttatcggaatacggttcgtctggtgcgtcgtagcggaagggagaagcaaatatataatgtggaccaacaggattacgataactttattctgactgataacgatgaagtgtccgttgaggcggtattgggacgtttttcaaataaagtagaaattcatggagcggtttatcgtgcaggcatgtatcaattggatagtgtgacggggactataaagcggctgatacaacaggcggaaggtcttcgtggagatgcttttcttaatagagccttgttgaggcgggagcgtgaagatctgtctcatgaaatgattcctgttgatctgaaaaaacttatggcaggaactgcacccgatttacctctgcaaaagaatgatgtactctatatctcaagtataaaggaattggaaaaagaaggagttctcttcatttatggtgacgtggcaaaaccgggctattttccctttgcgcggaatatgagtgttcaggacttgattttaaaagctggcggattattggaatcggcttcgactgttcgtatcgatgtgtcacgacgaattaaagatcctaaaagtgtttcttct

SEQ ID NO: 5109 - DNA, 250 bp, Unknown
  gut microbiota DNA sequence
cctgatctttgagaaattcctgattcactgtcgttatctccaattctccgcgtgcagagggctctattttttttgctacttccaccaccttattcggatagaaataaagccctaccactgcataattagacttcggttcctcaggcttctcttccagactcaagacatttccttctttgtcaaattcagccactccataacgttccggatcacttacccaataaccgaacaccgttgccttttgctccac

SEQ ID NO: 5110 - DNA, 1333 bp, Unknown
  gut microbiota DNA sequence
cctgacgtacgtcttaagtccctccgccgcctgatccaggccaagcctgtggtccgtatcctggaggctcacgacggtctttgcggtctgattattgagaatcttgaagtccagaagggtgataagcgcgaggtctttgacggcatgtggtccagcagcctgaccgactctacgagtaagggtaaaccggatattgaagcggtcgaccttaccacccgtttacaggacctgaacaatatccttgaatgcaccaccaagcctattatttttgatggagacacgggtggcaagatcgaacactttgtctttactgtgcgcactctggaacgtcacggcatttctgcggtaatcattgaagataaagtcggtctgaagaagaattccctttttggtactgacgctatccagactcaggatagtatcgagggtttctgcgataagatcagagcagggaagaatgcccaggtcaccggtgactttatgatcattgcgcgtatcgaaagccttattgccggcaaacccatgagtgacgccctcgaacgtgcttatgcctatgtacaggcgggtgcggacggcatcatgatccacagcaaggataagtcgggtgaggatatccgtgagttctgccggactttccgcaaagaatacgcccatgttcccattgtcgttgttccgacgacttatgaccatgtgcacgaatccgaacttcacgaatggggtgccaacgtagtcatttacgccaaccaccttctccgtgccgcttacccggccatgatgaacgtggccaggaccatccttgaaaacgagcgcgccgaggaggtccgtccgctttgtatgcctatcaaggaaattctggaattgattccgggcactaaataaatcagacggttatggtaagtgtagaaaagatatacgatacgttccttcatcacggtgttgacttctttacgggtgttcccgattcccttttgaagaatatttgcgcctatatcacggatcatgctccgcgtggtaagcatatcatcgccgccaatgaaggttccgcggtgggcattgcctgcggttattatatggcttctggcaacgttcctttggtttatatgcagaactccggtctgggaaatacggtgaatcccctcttgtcccttgcggacgagaaagtgtacagccttcctcttcttttgctggtcggctggcgcggtgagcccggcacgaaagacgaaccccagcataagaagcagggcgaggttacccttgatcttctgaaagccatgaaaattccttttataattctggatacggatgaagacgaggccctggcgcagatccatga

SEQ ID NO: 5111 - DNA, 240 bp, Unknown
  gut microbiota DNA sequence
acctgattgaccaaatgtccaaccggtgcagtgtccattgttttctgggtaaaccagctaagctctttccccgtacacttcccccggtcatcatattctattattttagaggcattcccatagaaatgattattcaaatatactatttcggccacatgcgcatagatatcttcacaagccccttgaccctggctcccaatacggaacaagaactgcccattccaatcaaaacaatagttt

SEQ ID NO: 5112 - DNA, 383 bp, Unknown
  gut microbiota DNA sequence
tcggcttcatcatcgatttcataccatttaagcccctccaccctgagcacacggacaggggaaacggaacgggacatgcggagcagttcgtattcgtaacccagtttaggctgggactccaggatggtcgcataatcggcgcacatccggcggtagaaagtattggaaagtttgtggatgccgaccagctcgccttttgcctcaagggcgtccttgtctaccgaacaggaagtaaggatgtgattgcagtcatattccacataatactgatcctggaacttggtcagagaggagacaagcatcacatccgggaattcgtcatccagcagcgagaggatggccttgcgttcaaaaacaaggtccgattcaagcagcaggaaact

SEQ ID NO: 5113 - DNA, 335 bp, Unknown
  gut microbiota DNA sequence
atcagaccgcaaagaccgtcgtgagcctccaggatacggaccacaggcttggcctggatcaggcggcggagggacttaagacgtacgtcaggagtagtcccgatcgccttgatatccttgtcgagcgaggaggagttgatgccccgggtataagggatctcgattaccttgcccccctgggcgttcatcacctcaaaaacctgttcgcgcacctcgcgcaacgggcccgttttccagtcgtcgccgtggatgatatagtcaggcttgagtttttccagattcggaacatagctccaatcctcctggggaacaacttcgcaaacccctttgatatt

SEQ ID NO: 5114 - DNA, 423 bp, Unknown
  gut microbiota DNA sequence
tacgaactgctccgcatgtcccgttccgtttcccctgtccgtgtgctcagggtggagggtcttaaatggtatgaaatcgatgatgaagccgacctttcgtatgctgaggagcacatcatccgctattgttaaaaacaaatcttttccatatatgaacaagaaaatctatgtcggtatgaccgcggatatcatgcatccggggttgatccatattattcatgaagctactaaatacggtgatgtcatcgtcggtctgctgacggacaaggccatcgccgaacacaaacgcctcccttaccttacctatgatcagcgtaaggaggttgttgagaatatcaaaggggtttgcgaagttgttccccaggaggattggagctatgttccgaatctggaaaaactcaagcctgactatatcatccacgg

SEQ ID NO: 5115 - DNA, 235 bp, Unknown
  gut microbiota DNA sequence
ggctgatacaacaggcggaaggtcttcgtggagatgcttttcttaatagagccttgttgaggcgggagcgtgaagatctgtctcatgaaatgattcctgttgatctgaaaaaacttatggcaggaactgcacccgatttacctctgcaaaagaatgatgtactctatatctcaagtataaaggaattggaaaaagaaggagttctcttcatttatggtgacgtggcaaaaccggg

SEQ ID NO: 5116 - DNA, 275 bp, Unknown
  gut microbiota DNA sequence
cgtggtttacattttcaacaggccccttttgctcagagtaaattggtgcgtgtagtgaaaggagcggtattggatgtagctgttgatatccgtaaaggatctcctacatttggacaacatgtggcagtagagttgacggaggataatcatcgtcaatttttcattccccgtgggttggcacatggattcagtgtattgagcgaggaagtcgtttttcagtataagtgtgataatttttatgctccgcatagtgagggtgccattacctgggatga

SEQ ID NO: 5117 - DNA, 20534 bp, Unknown
  gut microbiota DNA sequence
cactcagatttccctcctactcgattgtaaaatatgtctaatatggtacagccggatgtgttgcagttttcacaaaaataatttgaaaacgcttattttgctgactttttggggaaaataatgatatagtaaaaatactgggtggagaattacctgtatgttatcgtttaaaatggaaactggagaaaggagaatcagaagaatgtttgaaatcggagaatatgttgtgtgtggcgcgaaaggtgtctgtcagatcagggatattacccatattgatatgtcgggagcagacaaagagaagctgtattacgttttagccccggtcggagataagaatgggactatttatgttccgacggacagtgaaaagattataatgcgcagaacgatttcaaaagaagaggcagagaggctgattgacgaattaccgcagattgaacttctgtgggtgccggatgacaaacagcgtgaggaaacatacaaagaggcactccgtacctgtgattatcatgcatgggtgagcattgtaaagactttgtatcagcggaaaaaagagcggttggcacagggaaagaaagcaactgcagtggatgaacgctatatgaaagcggccgaaaatggactgtatggtgagttgtcgctgacacttggagtaccgagggaaaagatggaagattatatcagagagagactttcgtaaggaagggatttgaccggatagtgagtgtacagacagacggatcgtcagaaaaaaaggtgggcagctggcagaaatttgatcctgggatcaattctggaagctgtccaccttttttagaagggattgttatgtaactgtcagatcgtcgtgttcacgccgttaacggcagcatgttcatcctcgtccatcgggatgacaaggcatttcctgccatcgatgacctgggagtggatctggtcgactttttccggtttgacacgcagaatgacgtcgtaggtcttgactgctgggacgtcatccccgtcagattcttctaccggaagagtgcgtgtttcttctaactgctgtttcaaattttcaacctgctgtaccaactctaatttttctttgcgtctggcatttgcctccaccagtttcggatctactaaatgttctgcgaccgggacttcttctccaaatacattttcataggtctgttcgatcacagctgcctgttcttcggtcacaccgctctctgcgagtacggaagagattgtgctctttgtgacaggaaccggttccggttctggttcatcttctaaagcgaccgggatcaggtcatttaagttgtcctggatatccatgaaaatggcatcgctttcgtcatcatcttccccgatgacttcttttacaatgctctggaacgtaagtttctgttcggtagctgtaaatttagagccacagccaagaccggattccataaattcggagtgcggtgtcttggtgtctctggtgtaaaacatgacagagtggatatcagtgctccggtcggtaaaagcagggaaaacaaatccggtgtccggagctccaacgacccagtcgcggatacgcggtccgatacggttttcatcctcacggtagccaagtcccggtttggtcaggttgaccgggcagatcgcgcagagcagatactcgtaaacttcctcggactcgtctaatttattattatcagaagtttttgtcataacgtcgtaggcatcgtggaatacaaggatcagatagtttccgacatagtcgtagctgtcaatgacaagatcataaaatgcatccatcagatcatcattttttaaggcactctcgcgcagtcccatcaaaaactgctgtctgccgccggcagcttcctccgcagtcggaaattccagctctaaaaggttatttccaatcgtaccggacattactttttttgcaatctctaagtatttgtaaaattcctcatcttccagatttaaaaatgtctccccgaaagaagttaccttattgtggtcggcatccacatagcagccacacagtcttgtaaaagtgcaggcatccttcttaaaacgccgttttaattctaaaatatcttttttgttcataaatctatatctccgtttctgaggggatgccatacaaaagatagcgcaggctgtttcatgtccccgtaatctgcaggaaatattataacgaaattttaaaaccggtgcaaggggttatgatttcccgtcacggacaacggcgtgctccattaaccagtcacaccatactgcgtagtattttccgaggggatgcgcattatcattgctgtactgtgtgccgagattgccgtttgcatcgtcaaaaagttcattgatgtccagataataaatggtccgttgatcggctaatgtcgaaattttttgattaaaggcgttgatattggcattattgaatgtcttatccgagtctgagcgctgtgcagtcacatgaagatttgcttccacataaatgatcgcatccggctgcatggtttgcagaaaatttacaaacgacgcatatttttcaaatgtctgtgtgacatcgtagccaagttcattaatgccgagcatcagatatattttatgataggtatggctggctaaaagatcagagatactgacctttccgataccgtccaccataatttttttattttccagctcatagatactgagacccgaatcacaataaaaggtggcattgcccaacgtaccatattcttttaatccgacggtgcgggaatcaccgatcattaaagcgtcatcgaaataatctgcatcaacagtggtcatttctgtcatcggaatttctgtgtccgggatatcctgccggtctgtattgtcagatggcgcaccggaagtgtccgatggtgtcgtggtgtcctgtttttgtgcggcggagacagaagacacggacaaggacgtatttttggctgcatttatgtttaacgttacatataagtaaatgagtggaatcagaaggcagcttatcaaaaagaaaaaataaaacaatatggcagatattttttttcgcatagtgttccttcgttaaaatctgaaatataaaaatgggtcattagagccaacgtaaatacagtaaacagaagcccagaaaattgccagatagacaaaaatttctggcacagagcccctgattttttttaaaaagcggaccggaagccttgtagaaaaaaggaagccggcagggatgataaagcggaaatcatttaaatttttccagaaatcattcacataaataatggcatcatcggcggaaaaaaatggaaataatttccgggtgtagacttcgatactgccgggatcactgattccaaagagcatccacgacaatgggatcagaactgccatataaagatgtccggccagcgcgtatcgatccgtcaattttttcaacagcagtttttctgtcaatacaatgacgaacagggaaaatccccacagaataaaatgaaattctgtgccatgccagattccggtaagtatccacacgacaagcaggttgcggatccatttgcaggtacctgtgcggttgccgccaagtggaatatagatgtaggtctgaaaccattgtccaagtgtaatatgccagcgccgccagaattctgtcatgcttgtggagagataggggtgcataaagtttatgggaagcttaaaaccaagcattctgcccagacctgctgccatcagggaataaccataaaaatcaaagtaaatctggaaagaatatgcatagattccaagccatgcaagcggcgtggagatactttcatatccgatcgtgccaacatttgcccacagactgccaaactgattcgccagaatcgcttttaagccaagtccccggataaaaagtttcataccctccgccagattttcgggcagaaagcgtcttgcactgtgaagctgcctgcgcagcatctcatacggggtaattggtccggaaattaattttgggaacatgctgatgtaagtgccgaatgtcacaaaatcccgttccggtaaaatacgtccgtaatagatatcaaaaagatatgcagtcagctggaacgtataaaaactgattccgagcggcagagataaatgtctggaatatttaaacaaaaacaaccataaaaaatcgaaaaaaataacttttgtcaaaaagagtctcttttttcctggattgtgtatctgataaaggcggattccgaacacataattgagataggtcagaaccattaacagaaacagtgcatatggctgtttgatcactccgactgcataaaacaggatgctccctgcaaagagcgtactgtttctgaaagcagcaggtgtgacataataggcaaacagaaataatggcaaaaaaataaaaataaagttgagactgctaaataccatgccaggatcctttactgcatagacatttcttattttaaaatatcggcgatcacatcgtgcgggatcgtaaattccacaacacccatagacatcggaccgacatcgccctcgttgaagctgatgacgagatttccgtcagcattaatatagaaggaagtgtcatcgttaatggaggtaaagttccattcaggaacttccgtatcatccagccagtaggagacattttcatcggcatccatctgcccgcgcatctgggatttgatgttttcactgatcggagtgatatagtcagatccctctttaaaaagatcttttaacgcaaggcgttccccggtctttaaatcaatcgtgtaataataatccatctcataaccgcttccggcagcctgataacacatcagttttaaggtaaaatagtcgtcagttgtgttgatgacctcatgtttgatcatgatatcctgataaccttcgttgttcatgttctgtttgaactctgcgatcaggctgtcgctgatcttttcaatctccgcattgatctcatcggttgatttctttaaattttccccaaccgggtcttccgttgttttttcagtggaagcgacagtttccggtaccagttttggaacattgacatcggcgttgtttctgtcgctgctgtactggtaatcgcggaatgtgacgacctcgatcaaatttccaagcagtgggatctgttccatcgcataggcgacactcggtgaagtatttggcaggatgacaaacgctgcgatcgctgcggcagcgccaacccagattcttgtgataatggttttattgtgtttgttcttcttctcggctttcgcctgattcattttttctttcatttttatgacctccttttcaggcatttgcgaggtgtcataggatttttttaattcataaaaatcattggtgttcattcggttacctccattttcagttttaacttctgcatactgcggtacagacggctttttatggtattgacattttcatttaagacgcgggcgatatcttcgatttttaagtcctcgaaataccgaagttccacgatcgccttatcctccggggacaaagaatcgagcgcagttctaagatctaagtcctgatactggtccggttttccctctgcgatcagtgaatcctcgtaagaaatggtatccggccgctttaaatgatgaaaaatctcatttaacatgatgcggtaaatccaggtcgccgcatattccggctgccttagggaagcactgtttttgatcgccagataggctccgttttgtacaatgtcactggcatcgtcgggattatgtacatagctgtatgcaagatgatagtagcggttgtaattctcaagcagcaatcgttcgatgagatcatcattagattctgctgtatgttttttttcttttccggaaaagaatttcaagatcagatcctcctttgcaaatatttgattctttcgaatcatctgactattagatacagcatagtcataaaaagtttcaaatacaatgcaaaatatcaaaaaggtatggtataatgtgcgtaagcattgagcagtgccaacgaagtgaacaataaaaaatgactgcttgcaggcacttttttattgtttgcttcgttgatagggcgaaagcccgtcagtccggaaaatctctgatttttcggacgtgcactgcggaatgaagtgcagcaagaattaaaaatggagacaaaaacaatggacataagatttgcaacaataaatgatatagatgcggtcacagagttggaaagacagtgttttccaccggaagaagcagcagaaaaggattcttttgaaaaacgcctgaccgtattcccgaatcatttctggttactggaggattccgggaaactggcaagcatgatcaatggaatgacgacagatattccaatcctgcgggatgagatgtttgaggatgccacaatgcaccgtgaagagggacagtggcagatgatctttggagtggcaacgctgccggagtatcagaaaatgggatgtgcgtcgaaactcatggagcgcgtgatcgcggatgtcaaagagcaggaacgaaaagggatcgttttaacgtgtaaagagagtcttattccattttatgagagatttggttttgtaaatgaaggaaagtccatgtcaaagcacgggggagccgtgtggtatgatatgcggctggtatttgaagaattgtagggaaaaggaattattataatatgaagaaacacagattgccatacatggttgcaggggcagtattgtttgctgcactttttaccggatgtaccaatgagcgcttagaagatgaactggatttccgcaagattgggattaacagtatgcagtccggtgattatgaaggtgcagtggctgcttttaacagcgcactatcccagtgtgtggggaagattacagatacagaactcgacatctgctattataaggcggcagcacagtatgccggtggagatatagagggagctcttgctacttatcaggcgatgatcgattatgatgaggaaaacggcaacgcatattatctgcatggatgtctgagtctaaagcagcaggatacggatacggcaaaaaaagattttgccaatgctgtcaaatataacccggatgattatgaactgtatgttgggatttatgagaaccttaccggtaataatatgactgaggaaggggaagagtatttaaacaaagcgtttgatatcaagggaaattccgcagaaaatcttacctggcgcggcaggatttattatctgctcggacaatatgataatgcagtcaaagagttagaaggagcagtcaaaaaggacagtgccaaagcaaacctttatcttgcacaggtctatgaagcggaagaagattctgcaaatgcggaaaaatattatcaggcatatgtcgacagtggtacggctgactctgtggcaatgaatgcgcttgccgagatccagatggaaaaaggcaactatgaagcggcgttagaggatatcagacagggacttgcgatggataatgtcacaaatcagcaggaacttttgtcaaatcagatcattgcttatgagtacagcggtgatttttcatctgcgtgggatgtcgttcagcagtacgtttccctttatccggatgatgaggcggcgcagagagaatatatctttttaaagaaccgccagaatacggatgcgggcagcgatgcagaaagtacggattcttcagatgaagggcaaaactctacgggaaatagttccacggacgatagctctgcacaaagtgataccacgaatgatagttctacaggagacagttctgcggagaatcgttcagcacagagtgattcgacaggggataatactgcgggagacagttcttcacaggatacaggaaattagaattagagacagcaagggaggaacacatgccagaacccattaaaatagaagaagtaaaagagcgtgtcattttagtcggtgtcagcgaacaggatggtgacgatgcggaagattccgtcgcagaattagcagaacttgtaaagacagcaggagcagttaccgtcggtacgctgatccagaaacgtgaactgatccatccgggcacctatgttggaaccggaaaagtgcaggaaatcgccgacatgatcgcggaactaggtgcgaccggtatcgtctgtgatgatgagttatcgccggcacagctcaaaaacttagagcagatgttagatacaaaagtcatggaccggacgcttattatcctcgatatttttgcggcgagggcaacaacaagcgagggaaagatccaggtcgagctggcgcagttaaaatacagactgagccgtctgaccggtctcgggcgttccatgtcaagacttggcggtggtatcggaaccagaggccccggtgagaaaaagttggagatggacagacgtctgatcaaagaccgtattgcgcagttgaaccgtgaattaaaagaagtgagaaagcaccgtgagatcacacgtgcccagagggaaaagaaacagattccagtggctgcgatcgtcggctacaccaatgcgggaaaatcaacacttttaaaccacttaacgggagcgggagtgttagaggaagataagctgtttgctacattagatccgacaacgcgtgtcttagaactgcctggcagacaggaaatccttctgacggacacggtcggttttatccggaaactgccgcatcatctgatcgaagcatttaagagtaccttagaggaagccaaatatgcagattatatcgtgcatgtggtggatgcgtccaatccacaacgggacaagcagatgcacattgtgtatgacacactctatcagctcgatatcagggaaaaaacggttattaccctatttaataagcaggatcaggtcacagatgaggagccgatccgtgattttaaggcagattatacattggcggtttccgcaaaaaagggaacaggattagaggagttgaaagaacttttctgtacgctgctgcgggataataaaatattagtggagcgtacaatctcttatcaggaggctggaattttacagcagatcagaaagagtggagaacttttagaggaagagtaccggccggagggcatttttatccgcgcctatgtcacgccggaaatctatggcagtttatagaggctttgtgtttacgaagatttttgcatatggtacactgatataaaatttgacagaatacagacaaaattttgcacagaagcgatgaaagcgtgcttcggaatggagaaattatgacaatattaattcaaaatggacaggtgatcaatcctgccacagggatgaatgaagttgcagatgtattggtggaaaatggtgttgtttctaagatcgaaaaagggatcaaagagaaagcagaccggaagatcaatgcaaagggatgttttgtcatgccgggatttattgacatgcatgtgcatctgcgtgatccgggatttgaggaaaaagagacgatcgagacaggctgtcgggcagcagcacacggcggatatacgacgattcttgcaatgccgaacaccaagccggtcgttgacaatcctgatgtggtaaattatgtacacaataaggcaaaaactgtcggacttgtcaatgtactgcaggttggtgccgtgacaaagaaccaggagggaaaagaacttgcggatatcgagggaatggtaaaagcaggtattcctgcaatcagcgaggatggaaaatccgtcatgaacgcccagttatatcgcgaggcgatggaaaaagctgcaaaattaggcattgtggtacttgcacactgtgaggataaaaatcttgtcaatggcggtgtcatgaatgaggacgaacatgcaagagaacttggattaaagggaatcaccaattccgtagaagatatcattgttgcaagagatatcatgctaagccacgacaccggggcaaaacttcatttatgtcattgctcgacggaagattccgtcatgatggtcgatcttgcaaagcagaagaatgtaaaagttaccgcagaagtatgtccgcatcattttacactgacttcggatgatatacgcaagatcgcaccggaaatggatgtggaaaagaatgtgattgctgcggatgcggatgcagatactaattttaagatgaacccgccgcttcgtactaaaaaagacgtggaggcactaagagtgggacttcgtgacaatattatggatgtgatttctaccgatcatgcaccgcatacttttgcagataaaaatacctccatgaagaatgcgccgtttggaatcgtcggacttgaaaccgcagcatgcttaacctatacagaactggtacttggcggttatctgacaccgatgcagatggcagaaaaaatgagttataatccggcgaagatcgtcggacttgacaagggcgatatcgctcctggaaagacagcagatatcgtgatctttgatccgaatgaaacttataagatcgataaaaacaaatttgcaagcaagggaagaaataccccgtttgacggaagaacggtgaccggaaaagtaaaaatgacgatcgttggcggtcatatcgtatatgaggaataaaaaagcgggtagataaaaggagaaaattcatgcagacaaagggcacaaaatttgaggaaactgcgatcatcatcaggcaggaagagatcgcggacgatatttacagcatgtggctgcgcacagagcatatcgcagcgcatgcaaaagcaggacagtttgtttctgtctactgcaatgagggaagcagactgctaccaagaccgatcagtatctgtgagatcgacagaaaggacggcgcaatccgtctggtataccgtgtagcaggaaaaggaaccgcagagttctccggcatgcgcaccggtatgcagttaaaagtggtagggccgcttggcaacggatttccacagaaaaataaaaaggcatttctgatcggtggaggaatcggaatcccgccaatgttagaacttgccaaagagttagactgcgagaaacagatcgtgcttggatttagggatgagcttttcctgctggaagatttccgtaaccgcggacagatctatattgcaacggaggatggcagtgccggaacagagggaaatgtacttgatacgatccgtgagaacggactgaatgcagacatcatttatgcctgtggaccaaccccgatgctgcgtgcaatcaaagaatatgccgcagagcagaacatcgagtgctggatttccatggaagagcgcatggcatgcggtatcggagcctgtcttgcctgcgtgtgcaagtcaaaagaaaaagatgcacacagcaatgtaaaaaataagagaatctgtaaagagggaccggtatttcttgcacaggaggtagaattctgatgaacatgaaagtagatttatgtggagtgacattaaataatccggtcatgactgcgtccggaacgtttggcgccggggaagaatattcggagtttgtggatttaaaccgtcttggtgctgttgtgacaaagggtgttgccaatgtaccgtgggaaggaaatccgacaccgcgtgtggctgaggtatacgggggcatgttaaatgcgatcggacttcagaatccgggtattgatcttttcattgagcgcgatattcctttcttaaagaaatatgataccagaattgtggtcaatgtatgtggacatacaacgtcggaatacatagaagttgtggacagacttgcagaccagccggtcgatcttttagagatcaatatttcctgtccgaatgtaaaagagggcggaattgcctttggacagaatccaaagatggttgaagatatcacaagagagatcaaggcgcatgcaaaacagcctgtcatcatgaaactttcaccgaatgtaacagacatcacggagatggcgcgtgcggcagaagccggcggtgcggacggtttatcgttgatcaacacgctgacaggaatgaagatcgatatccacagacgcacgtttgcactggcaaacagaacgggcggcatgtcaggtcctgccgtgcatccggttgcagtgcgcatggtatatcagaccgcacaggcggtaaatatcccgatcgttggtatgggcgggatcatgaatgcagatgatgcgatcgagatgatccttgcgggagcaacggcagtgtctgtcggaacagcaaactttaccaatccacaggtaaccatggagattgttgacggaatccgcgattatatggagcgttatcaggtaaaagatatcaaagaactcgtaggcgcagtacacgatagataaatcacaggggaatgtaagttatgaaaatattaaaaaaaatcatttgtatctgtctcgttgcaatcctggcagcagggctttttcccggtgcacagacagaggtttatgcagctggaaagccggtacagttagtatcctgtaaactaaattccggtggcagcaaggtgacagtaaaagcaaaagttgccggaaaacagaaaggaatgggaaacaagctttacctgttttcggtggatgccaatgtaaaagagaatgcaaagcttaccggaaaaccggtggcttcggccaactttaagaaaggtacagttacattttccgtaaaatataaaagcagcatgctttgtcagaaatttgtggctgcatacaaaaaagggaaaaaatatgcagcaataagcggtgcacagtacattaccaatccggaagtattagcatcctacaccggaaccggcgtaaagactacctctaaaaagggactgcagccggactgggcagaccatacatccgtaaaaaagcttcgtacacagcatgttgtcttaaactggtcaattgaagaaattttaaacaaagactgcggaaataaagaggtgtataaataccgcgggaaaaaatatacatttgacagggatcgtgtaaactggctgcaggatcaggtgcgtcagtatattgacgatggatccaaagtatatgtgatcctgcttcttggcaaagacgcaaaaggccaggcgggcaaaatgagttatggcggtggaaaaatattctcttccattaagacaacatcagcagcaggatgccgtacctgggaagcatttatgagttacatggcagagaaatttggcaatgaacagcatttggtgtccggatggatcttgggaaatgaggttgacagcccttatgactggaactatgcgggcggaaaaagtttaagtgcgtatatggatgattatgcgcgggcattccgcattgcatataatgccacaaagagtgtcagcagccattcaaaggtatatatcagccttgattataactggaatcaggatgtcgatggaggcggaaacagctttttctcgacgaagaatacactggacacattttattcgaaactgaaagcgcagggcaagatctgtccaaacattgcatatcatgcatattcacagggacttgtggagccaaaattctgggatgactctttagcaggcagtggtgtggattccacgatcattaccatgaaaaatatttctgtcctgacggaatatgtaaaaaagaagatcggcaaagatgcaacgatcatgcttgcagagcaggcgttcaattcgacacagggagaagagctgcaggcagcaacatatgcgtatgcttactatatcagcgaaggcaataagatgatcgaatcctttatctatgcgagagataccgaaccgcagtcggatgtggatcagggcttttactggggacttcgcgatatcaatggcagagagcgtaaaatatataatacatttaaagtgatcgattcaaaggagtctttggataagacgaagaatcttctctcctatacagacttaagttcatggacacagattcctggaattaaaaagtctacttttaaaaataaccgttccatcaaaaacaaatggccgctagtacagtcaaccagcctgtatgtgtgtcttgcggatgataactggcagagagagacaacttatgtctacgacggaaagaaacataaacctgcagtaacggtaaaacgtaattataccggaaagacggttccgaaaaagaattattccgtaaaatatctgacagactgcaggagtatcggagtgcatcgtattcagattaaattaaaaggtgatttccgcggaacgatcatccgggagtttacgatcgcaccgcagaatgcaatgctgaatgatctggtgatgacgtcaaattctgctacggtaagctggaatgtaccaaagaagaccaaagagcagattaccggttatatgatccagtatacggatggagaaggtggtttttattcgacaccggaaaaagatatccatctgatcaagatcaaaaacagcaataaattaaaatatacgatcaagggacttgccaagggcaaacgctattttgtaagaataacgacctataaaacagttatggtagatggcaaaccaaaagatatcattgccggatggggatatgatgatatcaaatatgattatgccacagatccggtcgtgccggaaccggatacagaagaggataccttagaataagcgattgaggtaatgtgaaatacgatgccggaattaagatttataatagcagacagactcccggagcgggaactggattatttaaaacagaatatcagaccggaaccggatctgaaactggtggtaacagggaaaaataatgccaatcgcagagcagagttttctctgttcccgccagaagaaagtgtgctcatctctacagatgggcacattatttctaatatggatcagcttggaatggcaacgctgggatatatcggaccgggcggagcagagaatgagagcacaggagaagtaccggacgatgtgattacagaaattggtagtcagaacgtgaattgtaatgacagcacagatgaagtgacggagggaatcgaagaacagggaatgcaggctgcggttatgttaatcgaaggtcttgaggaagtggatgaaacgtttctgcttcgtgcgtatgaacgtaaacatggtattccgtggacgatcgtcacgacagaacgctgcatcgtgcgggagatcacgctggatgatttagacggcctgtttgcactgtatgccggggagggaatgacggaatatttagacccgctgtatgaatacgaaaaggaaaaagagtatcagcggtcgtatattaactatatgtaccgcctttatgggtacggcatgtgggtcgtgatcgaaaaggcgacgggaaaactgatcgggcgggtcgggatcgagaatcgtgaggtgtgtgacggtgaaccggaacttggatatatgatcgacgtatcgtatcagagaaaaggatatgcaacagaggtctgtcttgctgtgatcggttacgcatggaattttcttgaattcgataaattaaactgtctgatccagaaaggaaataaagcatcggaatgtctggcagaaaaactgggatttatgttccgggaggaaatggatctggacggaaaatgcatgaaacgctataccataagcaaaagcggggcatgatatcatcaataaacgttgcattttccataaaaataaaatataatataaactactaaaaaagggataaagtgggtgaggcacatggcggatttttcatcagaatcactggatctgcaaaaaaaagtaaaagaagaggacgataacatcaagccgatgaaagagtttgagagtccggaaaaactatatgacgaactgatcgccagcgtgcgaaagtatcatccatcgacagatatatcgctgatcgagaaagcatatcatgttgcgagggatgcacatgagggacaggcaagaaagtccggcgagccatatatcatccatccattgtgtgttgcgattattttagcggagttagagctggataaggagacgatcgttgcaggacttttacatgatgttgtggaagatactgttatgacggatgaacagattgcacaggagtttggagatgaggttgctcttctggtagatggtgttaccaaattaggacagctctcttatgatgcggataaagtggaggttcaggcagagaatcttcgtaagatgttccttgcaatggcaaaggatatccgtgttatcctgatcaagcttgcggatcgtcttcacaatatgcgtacgctcaaatacatgacacctgagaagcagaaggaaaaagcgcgtgaaacgatggatatttacgcaccaatcgcacagcgtcttggtatttccaagatcaagatcgagctggacgatctctcactcaagtatttagagccggatgcctattatgatctggtacatcagatcgcacagcgcaagagtgtcagggacgaatatgtacagaaactggtggaagaagtgcgtcagcacatcaaagatgcaggaattcctgcacaggttgacggacgtgcaaaacatttcttcagtatttacaaaaaaatggtcaatcagcacaagacattagaccaaatttatgatctgtttgccatccgcatcatcgtggattccgtcaaggactgttatgcagcactcggtgtgattcatgagatgtataagccgattccgggacggtttaaagactacattgcgatgcctaagccgaacatgtaccagtcactccatacgactctgatcggaccgaccggtcagccgtttgagatacagatccgtacctttgagatgcatcgtacggctgaatatggtatcgctgcccattggaagtacaaagaggcaagtaacaatggcggtgtgtcacagccaatgaccgttaccgaagaggaaaagctgagctggctccgtcagatcttagagtggcagcgcgacatgtcggataataaagagttcatgagcctgctaaagagcgatcttgacctgttttccgatacggtattctgttttacaccgaccggagatgtcaagaatcttccgaccggttccacgccaatcgactttgcttacagtattcattccgcggtcggcaataagatgatcggtgcaaaagtcaacggaaaactggttccaatcgactacatcatccagaacggtgaccgtgtggaagtaatcacttcccagaattcaaagggaccgagccgtgactggttaaatattgtaaaaagcacccaggcgaaaaataagatcaatcagtggttccgcagtgagttaaaagaagaaaatattacacacggcaaggaacttttgatcgcatcggcaaaatccaagggaatcaatttcccggatatcaataagccggaatatcaggagaaaattttaagaaaatatggtttccatgactggaattcctgccttgcaacgatcggacatggtggtttaaaagaaggtcagatcgtaaaccgcatgtatgaggaatacaaaaaagaccatcttgcgtgtatcacggatgatgaagtgcttgagaccattgccgagaataaagataaggtcgtacagaaacattccaagagcggtatcattgtaaaaggactttatgatgtggcagtgcatttttcaaagtgctgcagtccggtaccgggagacgagatcgttggatttgtaaccagaggccgaggtgtttccatccatagaacagactgtatcaacattatcaatctgtctgatatggagcgtgagcgtctgatcgatgccgagtggcagcatgatgaagagtccggcagcagtggcctgtaccgtgcagagatcaagatctacggcaataaccgaaccggtcttctcgtggatatcacaaagatatttacagagcgtgagatcgatattgattcgattcactccaaaacaagcaagcagggaattgcaacaatcgatgtatctttcagcacgaagggcagggaagaacttacaagcgttgtggagagactgcggcagatcgagagtatcattgatatagagagaacgacgggctaaaagaactggttgtcagaaggttgtgggaaacatgaaccgcatccagatgggcagccagtttttctgtaaagaaaaagattttgtcagacaggaaaggggaaactatggcaccactgaaagtagaacaatatgtagttggtccggtacagacaaactgttattttgcgatcaacgatgacacaaaagaagtactggttatcgatccgggggcaagtgcagatcaacttgccaagaagattcgtcaggaaaagctgacaccgatcgcaattttgctgacacatggacattttgaccatgcgggtggagcggaggaacttgcaaaacattttgatatcaaaatatatgccgaggagcatgaaaaagagaccttagatacgccgtctctcaatttaagcggctgggaaggtgtacaaaagacctatcatgcggatgtatttttgaagaatgagcaggagatcgaccttgccggttttcatatccgtgtattccatacaccgggacatacggtgggtggctgctgctattatttcccgtatcagaatgtagttttttccggggacaccctcttttgcacatcggtgggacgcaccgatttcccaaagggcagtgcagcacagatcatccgctccattaaggagaaacttctgccgcttccggatgaaacgaccgtgtacaccggacacaatgatattacaacgattgggacagagcggatgtataatccgtatctgtaagtgagaggttttgggatgatagaagttttattaaataaaccggaatttgaatatgatattcattctctgatcaaggcatttttcccggaacagtatgtgggtgtatcggcagaaaaaaaagaatatgatggaaaaatcgatatccgcatgcaggtaaactacggggaagatacgattcagatcacatggcaggagatcgtgcatgcaaatgaggatgcgcaggcaaatgaaaaaccgggtcaggaagaagtaaaagagataccgggtgagacaattcaggtagatttttcggatcgcgtgcggacgaaaaatcagctgaagcagatgctgtaccgtatgctctgtgattatacgaaacgaacacttccatggggaaacctgaccggaatccgtccaacgaagattcctatgaaattgctggaggaaggaaaaagccgggaggagatctaccggtatatgaaggatacctatttggcttccgatgagaagattgaacttgcaaccgatattgcagaacgagaaaatgcgatcttaaagaaaattgattatgacaacggatacagtctttatatcggaatcccgttctgtccgacgacctgcctgtactgctcgtttacatcatatccgcttgtaagctggaagaaccgtgtggatgcttatttagatgcactggaaaaagagattgattatacggcggcaaagttttatcacaagcatttaaattccatttatatcggtggtggaacgccgacaacattagagccttatcagttagaccgtctgatccgtaaaattaaatgtagttttgatttgtcagactgccttgagtttactgtggaagccggcagaccggacagcatcacaagagaaaaattagaggtgctgcgcaaatggggaatcacacgaatttccatcaatccgcagaccatgcagcagagaacgctcgacctgatcggaaggcgccattcggtagaacagactgtggaaagttttaagatcgcaagagaacttggatttgatgatattaatatggatctcattatgggactgccggaagaatctttagaggacgtacgcgatacattagagcagatcatgcagttaaaaccggacaatctgactgttcactctctggcactaaaacgcgcggcgcgcttaaatatgttcaaggaagactataaagattataagatggtcaacacgcaggaacatatggacctgaccgcttcctatgcgaagaagatggacctgttcccttattatctgtaccgccagaagggaatggcgggaaaccttgagaatgtcggttatgcgaaagaaggaaaagcgggagtttataatattctgatcatggaagagaaacagaccatcgtagcttgcggagccggagcttccacaaaacgtgtctggacagaaccaaatccggatggcacacatcggatcgaacgatgcgagaatgtcaaggatgtcgggcagtatatcgagagaattgatgagatgattgagcggaagcagaaactttttgcagaagaataaaagggtttttcttcctgaaatagtacatcaaatgagggttagtacatcaaaagtacatcaaaaaattacccaataatacggaataacctgtgagatgtattgaaacaacctaataactgtgcctgaaaggacgaattcattttagaagatgagttcgtccttttctgttatagtcaattattttatttcaggaggaaaagaacatggacaacacagcgttaggagcaaaaaacacaaagaaacaggaaattgtatttatcagtgaagcacatgaaaaattctactatgaaaaattaaaagaggtgcggtatcaggatgtgggagtatcccaaagtttgtgtaaacctccaaac

SEQ ID NO: 5118 - DNA, 24092 bp, Unknown
  gut microbiota DNA sequence
catcaaccatcagaagatggagcttttcttcgccttcttcttcgtggatagcactgaggagcataccgcaagagtcaatgcccatcatagctctcggtggaagatttgtgatagcgataagcgtctttccaaccagttcttcaggctcataataagcgtgaataccgcttaaaatggttctgtctgtgcctgttccgtcatcaagcgtaaactgtaacagtttctttgacttcggtactgcaacacactctttaacctttactgcacggaaatctgacttactgaatgtatcaaaatcaacaaattcctcaaataaaggctctacctttaccttagaaaaatcaatcttttcagactcagtttttacatttttttcaggtgcttcagaagctgtattattgacatcatttttcttatttacaccatctaaggacttcattgtcgggaacagtaaaacgtcgcggattgctgcgctgtctgtgagtaacatcacaagacggtcgattccgtatccgataccacccgttggcggcataccgatctccaatgcatttaagaaatcctcgtctgtgtgctctgcctcgtcgtcaccggctgctgcatttgcatcctgtgctgcgaaacgctcacgctggtcgaccggatcgtttaactcggagtatgcgttacacatttcccatgtattgatgaaaagctcgaaacgctctacctttgtaggatcgctcggtttcttcttggtaagcggagaaatctcaatcggatgatccatgataaaggtcggctggatcagttctttctcacagaactcctcgaagaagaggttgatgatatcacctttcttgtggcgttcctcgtatgcaatgtgatgctcctcagcaagtttctttgctgctgcatcatctgctacggtatcaaagtcgattccggtatattttttaatcgcatcgttcatggtcatgcgtgtaaatggcttgccaaggtcgatctcaatgccattgtagctgatctttgtacttccgcagactttctctgcaagataacggaacatggactctgttagttccatcatgccctcatagtctgtgtatgcctgatacagctccatcagtgtgaactccgggttatgacgggtgtcaacaccctcattgcggaatacacggccgatctcgtatacacgctcaagtccgccgacgatcagtctctttaagtataattccagagagatacgcagttttacatcctcatttaaggcattgtaatgagtctcaaacggtcttgctgctgctccacctgcattcgatacaagcatcggagtctcaacttccatgaaatcacggtcagctaagaagttacggatctcttttaagattttggaacgtttgatgaatacttccttgctctcctgattcatgatcaggtcgatatatctctggcggtaacgcatatctgtatcagtcagtccgtggaacttctccggaaggatctgtaatgattttgacagcagtgtcatctcctcagcatggatagagatctcacctgttttggtacgaaaagcgtatccttttacgccccagatatcaccgatatcggatttcttgaaatctttgtagatctcctcaccaatattgtctcttgcaacgtatacctggatacgtccctttaagtcctgaatattgcagaatgatgcttttcccatcacacgtttgaacatcatacggccggcaatcgatacctgcttgccctccattgtttcaaaattgtcaatgatatcggttgagtgacttgtcacatcatattttgtgatgacaaacggatcttttccgttttcctgcagttcatgcagcttgtcataacgtacctgaagcagctggtttaaatcctgctggttattgttctgctctgccatgtttatcctccacttgttttattccacggacagacattctgcccttgcgtcatatctcttagtttgctctgtgaattgaaagcactttgtatgaaaactcacctgccggtgtctcgacagtaacggtatcacctacctgtttgccaagcagtgccttaccaaccggcgactcgtttgagattttaccttttaagctgtttgcctcggtagaaccaacaatcttatactctaattcctcatcaaattcgcagtcaaggatctttacgctgcatccaatgcttactttatctaagtcagcctcttcctctacaactacttctgcgttctttaagattttctcaagttcttcgatacgtgcctcgatatctctctgctcatcctttgcagcgtcgtactcagcattctcagataagtctccctgctctcttgcctctttgatcttctgtgaaacttcttttcttcttacaacttttaagttctctaattcgtcttccagtttcttgagtccttcataagtcagaatgtttttcttgtccattgcatttacccttctttataataattattgttcggttcatgtatacggcggcacaatactttgcaccagacgctatgaacgataaaaagccttctcaaatctgtcctgccacggcgcccccgtcttcttttttggtctcttaacaatcacagtattataaccgataggcactgctatgtcaagattttcagctgttcgccaggctcttttatggatggggatataatgttttcccagcgcaatctgtttttcataaaaggctccatcccactcaaaatcaaacaggaaaatactgctgcatcccactgttttttttgccagtccaaggtgcttttttgatacgataagcgaaaccagtccgttcttctcatacattgtttctacaaattcccaaaaatatgcagcccggtccgtataaattgtaagcgtgtttacgtcatccccgatctgctctaacacttcaagtgcgcctgccggctcaaacatgcccgctccctcctgctcctcatcgatcacctcgacgactgcacgctccggctttatgccttttgccgcaagaatcccctcgtacacaggtttaaaatcacataaaaactcgttggaaaaagacatcgcacttctccctgcaatatccctttttccatctttatgatagtattttccgtttcattactttccccataactttcattttataaagtttgggcgtaaaaaaggtggttcacaacttatcgatcgggaaatggcagacctcctgaaacagtgcctccagctgctcatacgtctccacctcattgatcctgccgcgcagcttcgaagaattgcggtagccggacgtataccacgccgcgtgtttcctgatctcacggatcccggtgtattcgcctttaaattcaagctgcatgcgcgcatgcctaagaagcatctgcgtcacttcctcgaacgtcggtttcggaagttcttcacccgtcttaaaataatgaaggatctgcgcaaagatccacggatttccctccgcaccgcgtgcgatcataaagccgtcacagccggtctgtttctgcattgcgatcacgtccgccgccgttaaaatatcaccatttccgatcacggggatggaaactgcctcttttacctgtcttatgatatcccagtcagcctttcccgaataaaattgtgaccttgtcctgccgtggactgccactgccgcagcaccggattcctgcgcaatgtgagccatctcaaccgcattgacatgttcctcgtcaaatcctttgcggatcttgaccgtaaccggctttttgattgcacgggcagtcttttcaatgatctccccggcgagctttggatttttcataagcgcagaaccgtcgccgttgttgaccactttcggcaccgggcagcccatgttgatgtctaaaatgtcaaatggtctgtcctcgatctgttttgcaatctcactcatgatatccgggtcagagccaaacagctgcagcgacaccggattctcgcgtttgtcgatcgtcaaaagttcttctgtatttctgtttttataaaggatcgcctttgcgctgaccatctccatgcacagcagtcccgctccctgttccttgcaaagcaaacgaaatggcaggtctgtcacgcctgccatcggtgctaatatcaggttattttctaacgttacatttccaatctgaagtcgtctgatttctcccatgccaccatttcctaaataattcactctcttatacccgatccaggcatcctgaatctcccggtcagatatctcttatttcttaatcttacctgatttacggttctgcttcttataaataaggttcattcccttcaatgtcaggttcggatcatacacatcgatcacatctgtctcatttgcaatgatacgtcccaatccaccggttgcaacaaccttgaccggtcccatgtcagcctcttcgatcatatgtttcacgatatattccgtctgtccgatctgtccatatacaagacctgcctgcatacttgagatcgtttcttttgcaagaatgctctccggtttgcggatctcgatctccggcagttttgccgcatcttcccacaacgcttttgcagaaatgcggattcccggtgcagttaccccggaaacaaatgctccgtttttatcgaccagatcataagtagtggcagtgccaaaatcaagtaccagtaccggtccgccatacagctcatatgctgctgccgcatccacgatacggtctgcaccgatctgccgcgggttctcggttaccacgcggattcctgttttggtacccggctccacaatgattggattgataccaaaatatttgatgatcgcaccctctaaggaatgcataacatttggaacaacagaagctatgattgcatcctcgatgtcatcatgtctgatcttattctgctctaacagatttgacaaaagcattccatactcgtccgaagtacgcggcatcttcgtcgtgatacgaaaagttgccattacctcatccccacggaatactcctacagtgatatttgtatttcctacgtcaatcgtgattaccatcgtattttcctacctttttctttacatttctgattcgtccacaccaatatataacactttataatacatctctaaagcgcgaagcagttcttcttttgtgcgctgcagctcacgtatttttagtccgcatccgatctcatcatacaaaagatcattctcatcactggaagtacggaactctaaattgccttcctcatcaaagacgacctgaaaaataccaccgatatcctccgtgaaaaggacacacataatctttaattcatctttgatcgagtccggcagtcccttaaaatcctgattcagataaaattttttattgtaagcgctcgctccgcagagcaccacttcttctctctcagacatatccgtatactcctctcacggaaacttcgccggaggataccagttttctgccttcccaggtatccacgatcagctcaccatgcggcgtgattcccattgcttttgcctcataaggttctttgggatctaataccctgacctgtttttgcatattgatcagatgtgcattatattctttgaccagaccgcttaaatcttcggtttctaaaaatatttcataataacgttcaaactgttctaacactgcctcgatcagctctgcacggttcacatgctgtccggtctccatcagaatcgaggtcgccacctgttcaatttcttttggaaatgactcattctggacgttaataccgataccgatgacaacatggttgatataatctaactgtgcgctcatctccgttaagattccacaaacttttttgccgttcatcacaatatcgttcggccatttgatctctgcttcctgtccagttttctccgagatggctttcgatactgcaagcgctgctatgagcgtcagcatagaagcgcgatccggtgcaaaatccggtttgagcaccagagtcataaatatcccgacacccgccggtgattcaaatcctcttccacggcggccgcggcctgcttcctgtttttccgcaacaaccagcgttccagtcggatgtccttcctccgcaagctgttttgcctttgtgtttgtggaatcaattgtatcaaaataaaaaatttcacgacctgcccactttgttttccggatgctttccagttctgccgtattcaggcagtccggtgtcgacacgatcttgtatcctttattctgcactgcctcgatcacatatccagcctcttttaactgcttcaccgctttccagattgcagtgcgcgatactccaaagtgctcacacagttcctgaccggaaatataatcatcggcttcctttaatgccgctagtagctgtgtcctcatctgtttcctccaaaatatccatacccggtacactgttctttgctcatcttacatttgtgtgccagcacaatttttcacactaatctccaagcgttgcaagcatcactgccttgatcgtatgcatacgattttccgcctcgtcaaatacgacagactgtctgccctcaaatacttcatccgttacttccaactcactgtaaccgaatttctcataaacttccttgccgatcctggtctttaagtcgtggaatgccggcagacagtgcatgaaaatggcaccctcttttgcatttgccatagcttctttatttacctgatatggcatcagatcgtggagacgctcctcccagatctcatccggctcacccatggatacccagacatccgtataaataacatctgcatcttttgttccttctttaacatcctctgtcagggtaatagaagcgcccgtttcttttgcaacaccttcgcaatactctaccagttttgcatccgggaagtattttttgcttgtacatgcaacaaaatccataccgagttttgcacaggtcaccatcagggaattacccatattataacgtgcgtcgcccatgtaaaccagtctcacaccttttaatctgccaaggtgctcacggatcgtcagcatatctgcaagcatctgtgtcggatgaaactcgttggtcaggccgttccataccggtacgcctgcatattttgcaagctcctcgacgatatcctgtccatatccacggtattcaataccatcaaacatacgtcctaacacacgggcggtatccgggatgctctcttttttgccgatctgggaacctgacgggtcaaggtaagtaacatgcatgccgagatcatgtgctgccacctcaaaagagcagcgtgttctggtgcttgtcttttcaaagataagtgcaatattttttccggtcaggctgtcatgcgggatgccctgttttttcttcgctttcagatctgccgcaaggtcgatcatgtatgtaatctcttccggtgtaaaatccattagttttaaaaaattacgtccttttaagttcatgtccttttctctccttttgcatggctgcgcatattttctttttatgccacaacggatggtacaccatgcgcaccatccgttctgataaatttttctgattttatttatgatctgctgcaatttccgtaacagattttgcaagacctgcgattccctggatctcggacggaataatgatcttggttgcttttccgtctgctgcttttgcaaatgcctctaagctctttaactggatcacattctgatccggtgcagcttctttgatcatgcgaagtccgtctgcatttgcctgctggatctttaaaatagcttctgcctgaccttctgcctcgcggatcgttgcctctttctttgcctctgcacgtaaaattgctgcctgtttctctgcctctgcgtcaagaattgcagattctttcttaccttctgcaacgaggactgttgatttcttttcaccctctgcacgcaggatcgcttcacgtcgctcacgctctgccttcatctgtttctccatcgcatcctggatcgctgcaggcgggatgatattctttaactcaacacggttgactttgattccccatggatcagtcgcaacatctaaagaagatctcatcttcgtgttgattgtctctctcgatgtcagtgtctcatcaagttcaagatcaccaatgatgttacgcagtgtggttgcagtcaggttctcgatcgccatgatcgggttctccacaccatatgcataaagtttcggatctgtgatctggaaatatacaacggtatcgatctgcattgttacgttatcttttgtgataaccggctgtggcgggaaatccaccacctgctcttttaatacaactctctttgccacacggtcgataaacggtgctttgaaatgaatacctacagaccatgttgcgagataacctcccagacgttctaccacgcatgcagtcgcctgtggaacgatcttaacacaggatactgcgatcagcagtgctacaataattaaaataatcagtgctacaattactcctggcatataaaactcctccctaattcaattttaaatacagtatactatctgttttgtgcctttattcatattactatatttactttgagattacaactaatcttttcatatgcggttaccagatattttttttcttctaaaatgcctgataagcacgacaacggttcccaccagaaatggaaatacaaatgtgccaaagcggtacaaaagcgatgctgaccccgccatgcccgtgccgacgattccggcaaaaagtgtcgtgaacacaaactctgtagagccaattcccgccggagacggaatcaccgccgcaagcataacggacagtgacgtgatcgcaagcacctgcgacagagtcaatgccggatttccctgaaactggacgcctttaaaaagaagatacgggattccataccagaaacagcatttcaacagacaaagaaagatcacgcctgtggttgcttttttatttttcagtaaatgcttcgaggcatcctcaagcatcatgcactgtcttttgatctccgcttccattatttcaaatcttccgtggaatttttgatttacgatatccagcagccggaagatcagccggtggaatttctttgaacagcagaacaggaacagaccgatggtgatcacaaatgtgaccgcatatccgcctgctaaaagtcccgcgtaatctccaaaccagcttttcataaattcccagttcatcacaaaaagaatcgcggaaaacaacgctatgctcattttatggagtgcatactgtatcatatacagcccaaatccaccgccgtattcgattccctgctcccccagataaatgatcgccgcgacaccggaaccgctccccagtgtcgccacccggtaaaaagagcataaaaacgcattcgtaataccatttttacatgcaaaagacgaccgatactgctttgcgagcacggtcgtgataatgccttctatgatctgatataccgctgccatcagacaaatgccaatgacaacggctggtgatgttttcgtaagctgttctaaaatcggtcctgccgaatcacggaaagtatacacgataataccaatgactgccagaaccagtccccattttaaaagctgcttttgtattttactgataacaatcgccccttattattgctgctcacactgcaactgtgaacaaaacttatttctttttgaaattggtgtagcctttttgtttgtatggatgctccttccagagtctgtctgcagtctctttccattcacatgcatatgcctcacattttccacataaatgttctaccggctctgcctcctcaacatctgtggagtgcgcacctgtttcatgtaccatacgctgtaagatctcaggattctcaagcatcggacatgggcgcagcatgttgtcgttgaatggctggttatctctgtatgccatgaataatggctgtttcaaacactctaacagtgatttttcacggatatttgcaccggaataatgaatgaatacacatggctccacgtcacccttcgggttgatatggcagtagtttcttcctcctgcaatacatccgcctacgaactcaccatcattctggaaatccataacaaagatttcttttccaccttccatcgcacgaacctcacggattctgtgatagatatattcacgctgttctttggtcggcatcagatccggagcagctttcatacctaccggcatcagatggaaataccatgcaaaacggcttccatgctcgatcagaagatcaaaaaattcgtcagatgtaacagcatccatgtttttgctagtatagcatacactgtttccgaaaatcaatccgttctcatgtaaaagatccattgcatgaagaactttatcatatacgccctctccacggcggaaatcattcgcatcttcaaatccctcaaggctgatggataaggaaaggttgccgacacgtttcatatcatcacagagtttctgatctacgagtgtaccatttgtatagcagtggaatgcacagtcattgtgtttctcacagagtttgatgatgtctgctttacgaaccagaggctctccaccggtcatcatgtaaaaataaataccaagttcttttccctgtgttacgatgctgtcaagctcatcaaaggaaagatttaatttattaccgtactcagctgcccagcatccggtacagtgaaggttacatgcacttgtcggatccattaagatcagccacgggatattacagtcatgaacctctctcattttacggatggtctttgttccataaaatgcagcctgaaaaccaaggtttaatgcggtcatttttgcaacatgcggatctgtctcatccaacagacgattgacatagcgcatccatttgtgatccggattctggatcatttttcttacaccatcataagcttctttacggaagttatctcccataaatttctctgtaagatctacgatctgtaacaatcctttctcacgatccttgttcagacttttcagtgcagcatcgattgcgacgctgaatgcttttctctctactgtcagtgctaaatttgccataactccgacctccgttatttttttcacattcttttactagaagcaagtataaaaaaattgcactcttttttaaatatgcaatgactttttaatgtagccatctaatatacaaatttgcttttttgtctattttccgactacatcagacaatatttgcatagcattcatgtgtcatcatgtagtattgataactatgttgtattatatcattccaataaactttgtcaatcagcgattattacttttttcttaaatcttaactgccatgcttaacagttctttccaaactggttataataacgatggttcatttcatggaaaggagatttttgatcatgcctggatatgttacccattatatattcggaagagaggtttatcataacctgaaaaataattctttaaaaaagaatctttattataatcgcgctgcctacggtctcggacttcagggaccggatattttcttttattatcttccttcctatgtgttagaaggtcacaatatcggtgctcttgcccatgtccgcgagaccagtgcctttttccagggtctgattgaaagccgtaaccagttttcctcccgcacggatcttaacattgcagaagcctacctgattggttttctcggacactataccttggatacaatatgtcatccgtatatttatgccatgacacactataaggataaaaaggaaaacgcctatttttcaagacatgcctatctggaaacagatatcgataccgcactgctcgatttaaaactgcaccgccagccctgcaatttccataccgaggacacgatccggctgacacaccgccagaaacatgttattgcaagtatgctctattatgcctaccgctatgcctttccggatgtcaaattccgcaaatataccatgtaccttgctattttttccatgcagcttggtctctggctgatgcacgatgattccggaaagaaaaaggccattgtccggctgacggagcggatctgtctcggatatccgctgttttcaccactgatcccgagtgataccttgtttttccgcacggatccatttaatttaagacatgcactgtggaaaaatccatgggattcttccattacttccaatgagagtttctttgaactgtatgataaatccaaagagctgtacctgtcccggatccattcgctgtatgctgcacttcatgcaggtgcaaatgttgccaaacaggatgctgctatacaggtttttttacaggaatatggaaatctttcgtttcacagcgggttaagttctacgatcccaagttaatcggctgggtaatgtctgctcaattttccagagcaaaaggtggctcttcgtttttggcattcagatcccacgcaccaataaaaataccgcacagatttgcgcggtattttttatttctgtattttgtttttgtattttacttctgataacagaccaacaggctgtttgcaaagtgtccattccagtgtttatttatcacttccatcaaagaagtcacggatctgtccttcaatgatcttcatcagtctcgtgcgcgcctcaaggcttgcccacgcaatatgaggggtaatgatcagacggtcgctgtccttgatccgtttcaatggattttctgcactcatcggttctacggtaagtacgtcaagtccggctcctgcgatcgttttattttccaacgcatctgcaagatctctttccacaacgatcggtcctctgccgaggtttaaaaagatggcagacggtttcattttagaaaatgcctctgcattcatcagcccttctgtctgctctgtcagcggcgcatgtacggacacgatgtctgattttgcaagcagctcatcaaactccacacgctcataacccggctggttatttttccctgttgtagaatagtagatcacatggcagccaaacattttggcaatgtccgcaactcttcgtccgatcgctccaagcccaataattccccatgtcttaccattcagatcatggaatacattatcaaaatgggtaaatgtgatatctccaacgtatttttctgatttgacatagtcatcatagtatcttaatttttcccagagatagaataacagagcaaatgtgtgctgtgccaccgtctccgtggaatatccggcaacatttctccaggcaatgccatgtgcatccagatatgctttgtccagattgttcgttccggttgcagtcacgcagaccagttttaagtgctctgcctcaccgatcgatgtctcattgatctgtactttatttacgatcaccacatcggcatctttggtgcgctctcttgcctcttccgttgtggaaaatccatattttataactgttccaagtttgtcgtacccggagagatcaatgtcttccccgatagtttttgcatccagaaatacaatgttcatcttttttctcctttgcattatttattcaaataggcgcgaagggcgtctgtctgttctgtggcaatacgataaccttcatcataaagcctgcgcaattttatggtatccgtctccgtcctgccaactccataggtcgactccggtgcgatcacaaatactttttcctctttctctaactgcatcagtttttccatggaagcattgtagcgctccgcgcgaagtttcatatcctccacgatcttcggatatcgctgataaagacggttcataacgcctgccgccttttcctgtgtctttacatagccgcgttcccttgtcagaacaacaaccagtttttcacagcccatttccatagcatgctcataaggaaccgaatctgcaagtccgccgtccagataataatgtctgccgatctttaccggctgaaaaagaatcggcagtgaacaggttgcaatcagcagatccttcatctctttcccacgcgggacttccatgtattctgcttttcctgtgtgaatatttgtgactgccgcttcaatctctcctggaaaacgtgccagagcatcataatcaagcggaagaagctcattcggtacttcttcaaacacaaacttcgtattgtaatacgcatgttctttgcggtttagcagatggcgcatacccatatagcgcttatccgccatatatttttccatcagttccagattacgtcctttctgcccggaaagatacgacaatccatatgccattccagcggaaacaccgatgtaataatccggcatgatattttcttccagaaatttatccattactccacaggaaaaaaccgtgcggtttgccccgccttcaaataccattccaagtttcatttctatttatctccattcatctgaggcatatcactgctctccgtcacataaagagtgacacccttgatttcctttaccatcacgatcatccccggctcgaaggtcttttcatcatccaccgagcgggctgtccattccagaccattcataaccgcggttccggttcccctgacattatcaatctgctctgtgacacagacattttttccaactgcttcctcataatttgtcttaaccagatgcggttttaaatatttcagagcccagggtcttgtaaaataaagcagtacaaatgacactgctgcaaacacgatgatctgtcccgtgattcccattccaaatgccgcacaaatcagtcctgcaagacttcctcctgccagccagatcgatgtcagaccaacggtagcgatctccaataccacaaagaaaataatcaatgccagccaaactattatctccataatcttctccctcctgtcgtaatatttctgctgtttctatagtagtataacgcaaataaattttcaatgccatggttaattatctacgcttttcgaccgaaacatataacagatgatttttaaggaggtctttcttatggccaataccgcttatgtcggagccggaaccacacttggtacatcctattatatgcgtcgtttttatgcagcaaatgcggatgcacgtaccaccacatcacgcagtaatctgaccaattccaccctcacgggtgccgattcgcatgcgctgcgccgtgcgatacgttcccttggctcatttacatatgatgacgataatgaaataaatatcaaaaacagtgtttcagcgttcatcagcacctacaataatatgataaactcatccggtgcatcagacgaccgtaccgtcaaaaacacccagaaaaatctgaagaatctgactgcagagtatgaaagccagcttgacaagatcggtattaccgtaaaagacaacggcacgctcgaatcgcgcagttctctttttggttccgcggatatttcaaaatttgagtctctgttttcttcagattcagagtacatgcagcgtgtcaattcctatgccagacgttttgaaaacaggagcagcattctgacacagatcgaatacaatgatgcactggcaaagcgcaatgcaaataaacagacatccccgtctgtttccgacagcaccaccggcaaaaccgattctgctgataccggttctaccgctgtgaatgcacttaacatcgcatctgttacaccggtaactgctgatttaaacacactgctcaacaccggaatcggcagcaatgtgaatgtcattttataatttgggggaaatctatttccactgcatatttactttcaacgcatttccactgacactgatgtccgcataacttccgcagacaagcggcatcatcggtgggatatgtccgatatccgcatccataatgaccggtacctgatacccggcaagcaggtctgtaaccgcatggtactggtctaatcccatcatttcctgtccgaacaccgccggtcttccaatcaaaaaaccttttacatgcgtaaaccatccggcatgtttcatctgccagaccgccctgcggatagacatcacattcagatcacaggactctaaaaaccagatgattccgtcatcctgatacttctctgtaaattcctgtactttatcaaattctgttccaagcaggttgaccagacaatccatgcagccgccaagcagtcttccctgcatggtgatttcttcctgtaattcctctgccggctgcaccaatggtttgtactgcacattatttttctgtttttcaggcagacataccataagttttttctcttctgtcacattgtatggttcaagcggatgttcctcgtctttttttccttctttttcccacagtgcatagccctctatactgcttttttctccacgcagaagatgataggcatcccaaaggctctcatgccacggttccatgccgaatgccgccgcacatggcccatatacagatgccgtatcacacagcgttgcaagcaggaatgtcatattagtattatcggaaaatcccatataccactttggttttgtcaccctgatcctgtcaaaatctactttgtctaagatttcacacatcagttcaccgccgccacaggagatcagtatgtcatttttatcgctgcaataatattctgtcagctccgccccgcatgcttccggagtgctgctgatgccgattccttccgacgcataacagtttggtccaagttctaatctatgtcccagtccggtaaatttcttctgtgcatttaaaaatgctgtatggtacggctctatactgcagccaaaagatggtgccacaaaaccgatcgttccgttttccggtaaaaattctggatatttcatatcgttatcgtttcctccaatgtttctctctctcagtttacaccgtcaaaaaaacggttgcaatcttttttcgttttgctataataattagtagttatttcattacgggcagacatagtacatcggtagtatatcagcttcccaagctgaggaggcgggttcgattcccgttgtctgctctcttttatttttcatagaagttcttattttcccttgtgacacattgacaatataatatatttacccaggcagccggtggacggttgcgcctgctcctccgagtcttgatataggaggacggcaatatggttacatactcagacttatttacatttgttatcatgatatgtgcgatcattacgcttattagagataataggtaaaaaaacaacccctatttcttttgcgcaatctcatatacctgcacaattttctccagatcctccacaagcccctcttttgacaatacccgcttcgcctgcatgccgtagcttatcgccgcctgtacattttccagacggtcatcaaaaaacaaacattcagatggatttaactcatatttctcgcagagtgccgcataaatcgccggatccggttttgctttgtgcaccatataggacacgatcagtccatcaatatcattcatgaaatccgcgtattctgtatgctttttgaataattcctctgaatagttggatagcagatacaccccgtacccctgctttttcagttcgtgtacaagttcccagactgcaggtcttgctacgggcatatactctccatgcccgataaaccagcggatcaccttttcatctgccggatattttctacaataatgctcaatgatctcctgctgtgggacggttccaagatcgagcagtccccacaatccttccgggtcatcaaacatttctgttccaatgcgcactgcttcttcctctgaaagcccgtaatccatcagcatatatttccaccggtaggagagtaaaacatcccccacatcaaaaataatattttttatctgttccataatcttcctcgtttctatccttttagggacaatgcacagtcacacgatctccatcttcaaactctcattttttaatttcgactgattctaacacagaacggattccaatgtcaaaaataccgcatctgtccattgcaaaacagatgcggcagccgtcttatacctgatttcccacaattttataataacttcttgatgtaactgcaaagacagccagatagatcagtccaaataccagcactgtgcctgctaagcaccatgcaaacagggttccgttatacaaagccaccagtgcaagcagttttttcagcatcggatatgctgctgcaagatgacatgctgccgtgacgagcggcaggaaaaataccgtgcgcacctgggaacggatcgaggcctttacctctgcgttgctcattccgactttctccatgatggcaaaccgttctttgtcttcataaccttcggatatctgcttgtaataaataatcagtaccgtgatcatcaaaaacatgcttcccaaaaacagtccaaggaaaaacaaaccgccattgcttgactcataatctatgcggccctccgctcttgagactacattatactccaaccgcataatctgtggatttgtctcatcattctgccattcattgaggtgctcccgcacagcatttgcgcaggcaattttttcttccacagatccactcatatcaaagttcatcatataggtaaggtcaacttttcgatcttccccataggcagccgtctccatatctgataactgctgacgcatcttttctaatgcagtttcatcttttgcaatcacgattacagtacctcccactaattccgtcattgcatctttccccggaattttcatggtctgttccaccggatactcatcatcaccaatcacaatgctctccagctcatacacaggatctgccattattgccacgcttccatctgaaatatccgggattgattcctgcatatattcctcaaatccctgttttgtcataacttcaagcatatacatattggaaaaatccatattcgaacgatccagtgctataaccttatttccagacagcatgactgccgcccccgcatagattcctttttgtctgcctgttattactctgccattttcttttatcacattttcaatctcatctgtcatccggtcaaatgtcccggaatcctgctgtccatccgggtcataaaacagtacttccagctctgccggatactgtgtttttaactcatcttcaagtccggcgtacatacatactgtcatagaaatcacaaccagtaccattgttgacaaaatacagatatttgccagtcccacagcattctgtttcatccggtagatcatgccggaaaccgttgtaaaatgtctggtctggtaataataacgcttgtttttccgaagtaattttaaaaatgcgatactgccggcattaaacagccagtaggttccgataataaccagcatgactgcaacgaaaaacagagtaatcgcctttaccgggttatccacagtgattgccatataataaccggctgcaatacaaactactccaagcactgcctgcagaattttggttttcggttcacgttctcccgtacttccgctatgcagcaattccaccggatttgaaagccggatctgcatcagattgtaaagaagaatacatacataaatggcaccaaaaagttctgcggtatgaaggcatccccatcctgaaatgtaaaacggaattgctgcatctaatccggtcagccggtacaaaaacatggtcagtaatttctggaatacgataccgagtatcaggccgccgccagctgcgatcaggaaagaaaaaaacgtttcccatgccatgattttggcaatatggattttttccatgccaagaatattatagatcccaagttctttttttctgcgcttcataataaagctgttcgtataaaacaaaaagatactgacaaacacacctacgacgatcactccaaagaaaagaaccatctggacactggttcctccgcgcatctttgagagcccttcattcccctggatcgcacacatcgtataaaacatcatggctgacaacattcctgcgatcacatatggcagataaaactgtctgctgttttttaagttgctccatgcaagtttcagataaagtttattcatgacgctcaccacctgtcgttaaaatagtgagtgtgtcggatattttcgcataaagttcctcggtactcatatctccgcggtacaactgatggaatacttctccatctttgataaacagcacccgtttcgcatgacttgctgccttgatactgtgtgttaccataaggatcgtctgtccatcctcattgatctggttaaataatgccaggatactgtcggtcgccttcgaatcaagtgccccggtcggttcatccgctaagatcagctgtggatttgtaatcagtgcacgcgccactgccacacgctgtttttgtccaccggagatttcatacggatatttttccaaaagttcttcaattccaagtttttttgcaagcggatatacctttggctccatctgctccggttttacaccggcaagtacaagcgggagcaggatattgtcctttaagcagaactgatctaataagttaaaatcctgaaaaacaaatccgagatgatcccgtctgaatgcagagatctctttctcacggagcgtcacaatatttttcccgttcaaaaggacttctcccgcagtcggcttatccagtgcggcaagaatattgagaagcgtcgtttttccagagccggactctcccatgatcgccacatactcgccttcctccaccgaaaaattcatcgattttaatgcctccacctggtttcctccaaaccgcgtggtatatattttctttaaattatttacctctaaaagtgccatatcaggttcctccccgtcttttctactctcatattttttctgctgctgtaagcatcgtttttaccgcagcaattttatttcatttcctcaaggactgtacccagtatagcaaaacagggaaatgtatgccatcgaaccagcttacatttccctgccgtatcttacattcctgtaagattgcatttttattccattatacatttttacctgaaatagccgctttaaccaatttttacaaccgttcccacctcttcttttgaagtaatggaaaatgtgtgccccagtttctttaaaatacggttgcacaaatacagaccgattccactcgaatgctgtccctcatgtccgttacagccggtatatcccatctcacagatacgcggcagatcctctgcccggatcccgattccggtatcctcaatgacaaggcgaaccgatttcatgccgctgttctccccatcatcttcttttctatgagatgctttctgcactggcaccgacatggttccatccccatccttcagataaattttaataccgcctgtttttgtatatttgaccgcattcgatatcacctgttctatgacaaatgagagccattttttatcggtgatcaccgttgtttcaaccggctcatagctcagactgattttttttgcaataaactgcctggcgtattttctcacggaagtccgtatgatctcatctaaatcggtctcctcaaatacaaaatccgtcgtttccgaatcaagacgctgatactgcaatgccatctccacatactgttcaatcccaaacagttcggaaagttcctctgtcatctgcccctcatcatttttattctgaagcagaagccgcagtgctgcgatcggtgtcttgacctggtgaacccacatggcataatattcctgcatatttttctgtcttgtggctgcccggctctgcgcccctgtatattcatccgataatatccgaagaagcttctggtattcattttccagcaggtctgcattttccggcatcccgtccgtggagagcatgatggtatgctctaactcctttaccttctgataatgcctgtaatacctcatcgcatcaaaagccagaagtatcagcagcagaaacagtgaaataaatattccataaccaatttctgcgaatggtattttattgagcatcatcgtgatgatcatgatcgtttcacatgcaatgacaatgcacagccagacaccaattctttttacataagaaataattccgctcatccgatctgatacccgattccttttctcgttacaataaaatcacaaagccccactgattccagttttttccgcaaacggtttacattgacagaaagcgtattttcatccacaaaactgtcactctcccataattttaccatcagcgtatctcttgatacaactttctgtttattttccatgagtacctgcaggatcttaaattcatttttcgtcaattctattttttcctgctcataaaataatgctgcctctgtcagattcagcatggcacccttatgctctaaaacagcactctgtcctgtaaaatcataggttctgcgaagcattgcctgtacctttgcagtcagcacctcaagatcaaatggttttgcgataaaatcatctccgcccatactgactgccatgacaatattcatattatccgacgcggacgatacaaaaataacaggcacttttgatactttacggatctcactgcaccagtggtagccattgaaaaaaggaagtttcacatccatcagtacaagctgcggatcaaacgccgcgaacgtaccggccacattggaaaaatcttcggcacagcatacctcataattccaactttccagatgagttttgacactccgtgctatactttcgtcatcttctacaatcaaaatacggtacatggcatttaccacagttctgccagctcataaataagcttctctgttttctcccagccaagacaaggatctgtaatggatttgccatagcagtgctctccaactttctggtttccgtcctcgatgtaactctcgatcatcagtcccttgaccagcttatgaatatctgccgacatcttacagctatgcagcacgtccttgctgattctgatctgttcctcaaatttcttaccggaattggaatggtttgcatccacgataactgccggatttgcaagtggattgcttgacgaattggcatcctcataatgctccagcagattctgcagatcttcgtaatgataattcggaatatttcttccgaatttatccacataacctctcaaaattgcatgcgtatatggatttccctgtgtttttacttcccagccgcggtataaaaatgtatggctgttctgtgcagcaatgatggaattcatcatgactgcaatgtcaccgccggttggatttttcatacctaccggaataccaacaccgcttgccgtcagtctgtgctgctggttttccacggaacgtgcacctactgctacataagaaagcagatctgacaaatatctgtgattttccggatataacatctcatccgcacaggtaaaaccggtctcttccactgcacgtttatgcatctggcgaatcgctatgattccttttaacatatccgtttctttttccgggtccggctgatgcagcatacccttataaccgattccaatcgttcttggtttgttcgtgtaaatacgtggaatcataaaaatcttatctgcaactttatcctgtactttgcgaagtcttgaaatataatcaattaccgcatcctcgttgtccgcagagcacggtccgatcaccagaattaatttatcttcttttccctcaaagattgcgcggatctcatcatcacgctctgccttagttgcaacaacctgtgcacttaccggatattcttccttcaattctgccggtgtcggaagtttccgtaagaactccatttccatttccattttgtcctccgtttctgcgccgtttttctatatcagttatcgatatcatcctgttaaaagacattttgttctctttgcgctgacttttttatttatatcaatagatttgcctgtaaaacattgaatctattgtgttcataatgcgtttttctttttcactttaaagcattgcagtatgaagttcctttaaataatactttgttctttgtgatctgtcaatcccttttgaataatttaacagcttcttccttaacataggaaaacgatcgagtaggagggaaatctgagtgatttcccgacctctcacaccaccgtgcgtaccgttcggtacacggcggttcaatcaacttaacaagta

SEQ ID NO: 5119 - DNA, 82632 bp, Unknown
  gut microbiota DNA sequence
atcttcggtataaaattcaaggctgtgagcatctccacaatgatcataaatcttatggaaagatttttccggatataaagttacactgttttcttcgaggacgatcttaccttttcctttttcggaatagtccgtatcaatcatatccgccgtttttacggttaccttaaacacagcttttactttcttgttgattagggaagttacggtgatcgttgcctttcctgctttcttgccggttacttttcctttggatgataccgttgcaacttttttgtcactggaagaaaaggcaatgttcttattgctgatccctttaaaggattttactttgatagtggttgtctttccgacaacgatggatgcttttttctcttttaaagtgatctttgctttctgctttcccttgcttacagtcagactcaatgttccttttacctgggaatcatagatggatgtcacagtgatcttacattttccttttttctttactgtcacaacaccctttgcatttactgttgcaatgctggtgttcgaggatttgtatttcagttcaccggatttgataccgtctttactgttttttgatcctaccaccactccatttttaaacatggcaaccggaacaatcgtgaacttctctcctgcataaacagttttctttttcatgcagtgataatgattgtatgttccattgtttttggaaacattacagcagccttcatttgctttatgccatttggcatcatccgatgttgcaaacacgatttgatttttgggcttatctttgccatagtaatccagatatgctgcctgttttgccgatacctcttccggctgcggtactacaacgctgctgatacacacgataagtgcaagcatcaatacgactgcttttttccatcctgccagcattgtggcactggttctgttctttcttcctctctctctcataacttctgattctcctttatcctttatttttgattcttttacttacgacgttgacaaacgaattggaaacttttataatatacctatcaagacagccgggtgataagcaaatacctatctgctccggtgaaacaagtttataagttacaaaaataaccgtcaacttttctcaggagctggacggttatttttttgtcttatcatgggtatcatttctgacacttctgacaagcgttatgatggcacatatcataataacaaatgtgaacaagtcactatatgtaaccatgctaccacccctttctccgaatctcggagcagatctaagtggtaaagccgtcctttcggctgccttgatcagtatactatatctgttttccttttctttattataaacgtcatgtaatggaaaagcaactttctctgatcgaatatcttcctatttatttgtcaaggtacagttcttgtataatgcagataaaagcacagttttcactttcattaccatggaatattcttaaaagtatctgtaatgaataaaaaagattgtttcagatatgccgtctttacctataaaaccgacatatagaataccaagattgtattgatgtcttaatctttcatatacgaatttagtatagcaaattttttttataaaaaaagaccttttcatttatttaattttatttttatatttgtaatttatttttaatataaaatggaagttcgattcgagctcccatttttaccatacttttatttctttacagacaggttattatttaatagttataacctttaaagaataatttttatccaaatgccatccactgtaccatttatagtcttttttattaaatgtaatcttctgcgtagtcactcctgaaatctttaaatcatccacatatacatatccgctggtctttgagcaggtgcctgtgacaccaatcctctgccccaggttatatttcgtttttgtgttaattttcgatgtctgttcatccttataaacaacattttccagcggcatatcattgatcgtgatcacataatattttccggattttttatagctggctgttttcccaggcttacactctttttccttcgccagatcccacagtgcaacacgcatttttttgccatctttgatcagcattaccgtatattttgtacggatatccccaacataattaccgtttttactattttccagacctatccacgcatccacatgtacggtatctccattcttttttaaggctgctgccggaacatacacttttgcggacattttcatatttttctttatttttgaagcttttttgtaacctgcctgcataacataattgttattcatccacgcttcatcagattctttatctccattgaatacaacttttgaacgaagagccttatttgcggctgcaaatgtctgctctgacggaacagatgcaaatacaccgatcagcaatgctaacaccagcactcttgccattaacacaatactttttttctgttttaccatacgcaaatcctccatttctcattctcccaatttcacgcactgcacctcatcttccaatacaatatctgccaatgaaaataattactatccagacatgtaaattatcaaaatcatcgttatttttgattatttcatctgttttctgacctttttgacaagttattgtattcaaatgaatttatgcaatatttatatatgtttcatcataatgtgtcaacaaataaacattccaacagcgttgtttttatgctaaaaatccgttataatatcattctgcgggaaatccgtggaaacacattccgaaaggagatctaaaaatggcttttgatggattagtaatatccaatcttgtatatgaactgaatcaaacaattttaaatgcaaagatcagcaaaattgcccaaccggaaaacgacgagcttctttttaccttaaaaggaagtaacgggcagttccgtcttgccatgtcagcgagtgcttcgctgccttttctgtatctgacagaaacaaacaaaccaagtccgctgacagcaccaaatttttgtatgctgttacgcaagcacattgcaaacgggcggatcataaaaatttaccagcctcacatggaacgtatcattcattttgatatcgagcacctcgatgaaatgggtgatctgtgtcagaaaacactgatcgtggaactgatgggaaaacacagtaacattattttctgcagctccgacggcacgatcattgacagcatcaagcatgtatcctccatgatgagttccgtgcgtgaggtccttccgggacgggcttactgcattccagccacgcaggaggacaaattaaatccgcgtgaagttacagaggaagttttcatggaatctgtcatgaaaaaacctgtttccatcacaaaggcaatttatggctcttttaccgggatcagccctgtgattgcaaacgagatctgttaccgtgcttcgatcgacggagatatgccggtagattcgctcgatgcagacggcaagaaacacctgttccataacttttcatggatgatggaagatgtaaaaaatcacaattactgcccaaatatcatcacacgcggcagggaaccgatcgatttttcctgttttcgtctgtccgaatatgtgcacactgctctggatcaaaaaattatgcagaacacggatcatgctgacacgaatgcttataccatgacggaatacgattcgatttccaaagttctggaggaatactatgcttccaaaaacatttacacgcgcatccgccagaaatctgtcgacttaagaaaaattgtgtccactgcgttagagcgtaaccgtaaaaaataccagctccagcagaaacagttaaaagatacagaaaaaagggataaatacaaagtatacggtgaactgatccacacctacggttacgatttagaggaaggtgcaaaacaactggaagcgcttaattactatacgaacgaaaacgtaaagattcctcttgacccgaccttagacgccaaagcaaatgcacagaaatatttcgataaatacggaaaattaaaacgtacttacgaggcactgaccgacctgattgaagaaacgaaatctgagatcgaccacttagagagcattgccacatctcttgatatcgccctgaccgaggacgatctggtacagatcaaggaagaactggtggaatatggctacattaagcggaaacgcactgacaaaaaagcaaagatcaaaagtaaaccgttccattatatttcctcagacggctatcatatgtatgtcggaaaaaataattatcagaatgaagaactgacatttaaatttgcaaccggaaacgactggtggttccatgccaaaggaatgccgggctcccacgtcgttgtgaaaacaaataacgagacagatctgccgaaccgtatgtttgaggaggcaggaaaacttgccggttattattccagcggcagagacagtgacaagatcgagatcgattatctccagaagaaaaatgtgaaaaagccaaacggaagtgctccgggttttgtggtatattacaccaacttctcactgacggtacaccctgatatctccggtctgacactggtggaataaatcaataatccaatacgccatgacctgcgtgcaaaacactatcatcgtaagcaatagaatacacgcttcgcgaaccaaaccattatcatgaaaaaaacgcagccgtgaatttttatacgattcacgactgcgtttttttcgcttacaatgattgagtaatttacgcttctttccttttctgcagtaacaaaaatgtgatcactgcaaaaatcaggtacgctgctatggaaataacagaagattccacaccgaaatctccacctgtcaacagaaaagaatcggtatcaagaacataattataccagaccgcactatctgccgcagatccgatatgaatcagtcctccgatcatcagacaattccagattccatgcatgagtgcggaataccagatcgttccggtatagcaggtcaccagagaaaacaggattccaacgagacttcctgctatcactacctggatcattccgggaatactcattccttcttcaatatgcagacagccaaacaggacagatggagcgatcactgcaattttccggttccatgcatattccaccgaactcataataattccgcggaataccgtttcttccacgattccagttgccaatcctaaatatgcaacacttccggcaacaagctgttttaatgtttctgcttctaaggttgattgctgccacgttcctgcaaataactggtatatcagaatcaccaacagtggcattgcaaaagcggcgatgatccaaaacggatacagatccggtttcccgatcttaaaatctgccattggtatttttaacatttttttacagatcagaaagactcctccaagtaccagacccacatataaaattccagtgaaaatatttcctgtcaccgctgacattccgcctgccaccagcatatttccaatcagaagtgccaaaagctgcgaaaatgccagaagacaaagtgcaagaatacttacgcctgctgcctttgttccactaaattttgtttgtttactactgctcatatctgctcctttttcctttgccggcaaatgttctgatttattttacatttccaatcgtttcatctctgtataagcaagtaaaaacggaccaacgccctttgcgtcatccttaacgaccggttcggacatataataatcaaaagttccggaacgtctgttcgcaccgcctagtcctgcaaccagacagattccgtctaaatgaagttcaccattctcatcttccgataagtacttctcacaaataccgtgaaatgccttctcgccataggtacgataactttccggaaggaatccaaggcgcacaccttttaacagtgcatatgccatgatcgagcttccgcttgtctcaagataattgcgatccatgccgccgacatttacaacctgataccacataccgctctcatcctgatattttaacatagagtccatcagctccacaaaaatctgtttcattttctcatatggttccccgacagatgcatccgctttgtccaacgtgtcgagcagagccatggaataccatcctaatgcgcggagccagaaattctggctgagaccggttaccttgtcacaccagaacatttctcttgagaaatcatatgcgtgataataaagtcctgtctttggatcgcgcatattctttaccacattaaaaaactgtgaaaaaatatcgtcataattttttttgtcatgaaaacgcgtctcatattccatgtaaaacggctggcacatataaaggccgtctaaccagacctgattcggataaatatttttatgccagaaatttccttcttttgtacgaggcattttctggatctgactgtaaacaagatcgattgccttgcggtatttctcttttcctgtcaggtcataaagttcaaacaacgtcttacctgcgtttacattgtcaatatttaattcttccaccgaatatccttcgattgaaccatcctccatgaccttgcagtcaataaaatgatccgcaaatgaaaaatatttttcatcttttgtgatggcatacatctctaaaattgccttgatcatacatccatcgatgtaattccaggttgattttttcccctgtaaaatcttttcaatgttccagattggacgatccggcgtactcttttctaaaagttcattgatgtatttttcaatcttatccatactgttttctccttctcccgtgtgttttgtccccttgtattatgagccggttcacacaaatcactttactcttatcatagcttatataatccagtttgtaaatattttttgtaagcgcttacaaattttattataattcaataaaatattttgtcgcaaacagccttttcattctgtaccgaaaatttaaagtttatgtatcacttgttgcggatattacttgcttttttgacaaaaaatgcatgtttagctgctgtaatatttcacatactatcactgaacaaaacaaaacgtgatcaaaagcaccgcagcaaagtacaaacgccgcggaacctatgattaacgcggcgtttgttcaaatcatacaaatgataccttataaaacaaaagatgtatcatacactaaaggaggaaactattatggcaagtcgttcatctaacagagcagcagttcctgaagcaaaaagtgcattagaccgtttcaaatatgaggtagcaagcgagatcggcgtacctttaaaggacggttacaacggtgaccttacttccagacagaacggttctgtcggcggttatatggttaagaaaatgatcgaggcgcaggagagacagatgtcaggcaaataattttgccacaaataattttgctgcaaataatttttgctgtaaatgacggttcttcgagccactaagatctatgatccgcaaggatctatgcctttgggcacacaaaaacgggatctttcctatggaaagctcccgtttttgtaaccgtattattatttccaatttacaggcagtatgtaaatgaaatctatcatgaaatcaatttttaaagattgagcctgctcttctgatcttcaaagaaaatttccagatagtgctgcaggtttatattttcttcctcacatagttccgggtctgtcgcaagcagatcctgcacctcctcagatgcctgctgtaatacagacgcatcctgatagatatccgccagtaaaaactgcatctcaccggactggcggatgccaaagaaatctcccggtccgcggagttttaaatcttcgcttgcaatcttaaatccatcgttggatttatttaaaatatcaagccgcttcatggaatttttgctgtctgaggcattgaccataatacaatacgactgggcatctcctcttccgacacgtcctcttagctggtgaagctgtgcaagcccgaaccgttctgcattctcgatcatcatgaccgtcgcattcggcacattgaccccgacctcaacaaccgttgtggaaacaagtacctggatctcattttttacaaactgatccatgatcttatttttctgctctgctttcatctgcccatgtaaaacgccgatcacaatgtcttccggcagttcttcccgcagacgttttgcataatcggtgacattttctgcttccatattttcactctcttccactaacggacagatcacatatgcctgatgtccctcccgtatttcatgctcgataaaagcatatgccttggggcggtatctcctgtcaaccacacagtttttgattggaagccgttttgccgggacttcatcaatcacagaaatatccagatcaccgtaaataataattgccaaagtacgcgggatcggtgttgcactcatgacaagcacatgcggttctgttccttttccggcaaaagtctcccgctgacgcactccaaaacgatgctgttcatcggtgatcacgagcgcaagattctgatagattgctttctcctgaatcagcgcatgtgtcccaatgatcatagcattcgaataaacctctagtgcctcatatgcacggcgtttctgttttgccgtcatggaacctgtcagaagcacgatcggaatatggagtccaaactgttcacacatgctctgataggactcataatgctgtcttgcaagcacctccgtcggtgccatgattgcagactggtagccattgtgggcggtatctgccatcgcaagaaacgcaacgatcgttttaccggaacctacatcaccctggatcagacgctgcatgaccgtctcggaacgcatatcgcgttttacatccgcaagtgcctttttctgtgcattggtaagttcataaggcagctgctctatcagttcatctgtaaaatcatcttccgcaaaaacaaactcgtttttttctttaacgtgcttttccttctgatactgcatgcttagaataaaaaggaaaaattcgtcaaacacaagccgccttctcgcagtaatgagtgtctccatatcctccgggaaatggatctggcggatggcataattatactcacaaagaccgtatttctcgcggatggcatgcggcagataatccataaacaagtgttcgtctccaagtgccgcacgcaccgtctttgtgacaaggttattggaaagcccatttgtcagtgtgtataccggcaaaaacacctgttccatggaagcatactgttcttcggtaaacattgctgcctgttccatgacaagtcttccattctttttattgacttttccataaaaaatgtaaatactgccgacttttaaattatttttcatataaggcatccggtaccataccagctctaaggaggctcccatctcactgatcgtcgtaactgtgatctgcatggtgcgcaccttccgcactaccggtgttcttgtgatccgtccaagaaccgccgcctgttccccgtcgagtacctcatccacatgttttgcctgcggatactgtatatatgtccggggataatgaaggagtatatcacctacggtgtatactcctatcttatgaaataattcttctgttttggcgccgacacctttaatttctcttaaaggggaattgcgatccatttttactccattcttattctactgaaatcacataatagtagatcggctgtccgccatagtgaacctcgatctcgacatccgggaatgcctctccaatcttctcaccaagtgcattggcgtcttcttccttcgtgtcctcaccgtaataaatgctgacgattgcagaatcttcatcgactaactgtttcatcatatccataaccgtcggctctaaattctgtcctacggaaagaataccggaatcgccgatacccataaagtcatcctgtttgatctctttgtcatcgatcaccgtatcacggactgcataggtaacctgaccggtctttaccatggagatttcagaactcatgcgctgctcgttatcttccggtgtactgtcaggaatgtaattgatcagcgcagtaataccctgtgggatcgtctttgtcgggatgacaatgatctttttatcctccacaagggatgctgcctgatttgccgcaaggataatgttcttgttgtttggcaaaataaataccgtctttgcatttactttttcaatggcatttaacatatcctcggtacttgggttcatggtctgaccaccctcaatgatgtaatcgacaccaagacctttaaagatctcgttgattccctcaccgatgctgacggaaataaatcccatctcttttggcggttctgccggtttttcctctttttcctccggaatgccggctgactgcatctctttttctttcagggcggaaatcttctcatcacgctctaacttcatattttcaatgatgatcgttgtcagggaaccataggtaagtcctctctgcattgcaagtcctggatcgttggtatgtacatgtacctttacgatctcatcatctgcgacaacaacgatggaatcaccgatcgtctctaaataagacttaaactcattctcctgctgcagtgtgatcggtgtgtcaagcatgataaggaactgtgtacaatatgcaaatttgatctcctgatttgcctgcgcttcgatattataggatgttcctgtgctctccggtgcctttttgattgtttcagcgccctcaatggtataatctacctctttgccgagcagtgcgtccattgcacccttcatgacctgcataagtccctgcccgccggaatccacaacacctgcctgttttaaaacaggcagcatctccggtgtcagatctaacacacggtcaccttccttgatgacctcttcacaaaaatataccagatcttctgtatcatcacaaagttctaacgcacggtcagacatcccttttgcaacggttaagattgttccctcttttggcttcataacagccttgtaagctgtctcaacggccttctggaaagaatctgataaaatctgtacattgatctcatcatattctgcgatcaccttggtaaaaccacggaacagctgtgaaagaataacaccagagttacctctcgctcctcttaaagaaccggatgaaatagcttttgccagcgctttcatctccggtttttccaacgcacttacctctcttgccgccgacatgatcgtcattgacatatttgtaccggtatcaccatccggaaccgggaatacgttcaactcattgatccattctttctttgcatccagattctttgctccggcaagaaacatcttcgccacaagctcagtatttatcgtagtgatttccaccttctatgtcctccttaatcaattacacgcacgccttcgacgtaaatattaatttttttgatttccagtccggtaaactcttctaccttatatcttaccgtttcgattaaattgtcggaaaccgtactgatgctgacaccataggatacgatcacatgaaaatcaatcgtgatcttattatcctcgtcaatcgctacattaataccatgtgtcaaataatcttttttcagtaacttcaccagaccatctttcatattgacagcagccatacctacaatgccaaaacactccactgctacagagcctgcataggttgcaatcacttccgggtctattgaaactcttcccaactgggtatccatatgtccattcatatacgttcctgctcctttcaaagccatattaacgctagtttattgtctattataaccgctttttaccaaaattcctagtcctgtttactatttttaatattttttttaaaatttgcttgcaatataaaaatgaatctgttagaataaacatgttgtgagtctgatagtacaggcaggcttagtgaattacaaggaggtgcaaaactatggcaaaatgtgcagtttgtggaaagggcgctcatttcggaaataatgtcagccattctcatagaagatcaaatagaatgtggaaatcaaacatcaagcgtgtgagctgtaaagtaaacggaacacctaagaaattatatgtatgtgcttcctgtttgaaatccggcaaagttgaaagagcttaattttgaacactgaaaaaactgtcgtatccgatttgatatggcagtttttttgtgtctggattttccactgaaacaaaaaatccaaaagaccggatctgcattccagtcttttggatttttcctttttcctattttaccttaaccttccatgtataatattgcgtattcttgaaagtctttgattttttatttacctttacatttttacttgcgtcaattcttacataataagtttttccgctctttaatgcctttttcccgaattttctgatagttgcacttgtctttttgctgttataggttccaacctttttgtaaccagagttctgtttatcggaaatatataccgtataatttgatgcgcctttcactttcttccagtttaactgaatcttttttttggaagtctttacagacagtttgtaagacggatcctttgcaaaatacagtacgtcagaccattcaccatatgctttcttgttattgcttaagttaacgtaacctcttaccttgatctggtaaaactgttctttttttaatttatttgtagaaacacggagtgaggcacttgaagtacatgagcccgaataaattttctttttggaattgtcataaataatatattcataaccatttgcagcatttgcttttttccattcaaaatatgcagcatttgatgccggataaaaagccgtgttctctacacctgtgatcttagtaggtgtcactgctgaatttgaataataaccaccggaagttgcatatgcggtataacctgtactgcttgttcttcctgcataaatatgtccctgataacgactgttcttctttaatcctgtgatcttgacactgttctttttggaaacaatctctgatgcattgttttcgctcgttccactctgataacaggtcagtttgtaacagtttgccccggaagcagcctgccagctcagcgaaatggatgtcgtgcctgctccggtctgttttacagaattcgataccacctgctccggaactgtcacaacttcgatcgcttttgaccatgcagtatcatccggtgcactggatgattttgttgtagatgttccgacctggacataataactctttcccgcagaaagaccggaaatataactttcggatgcattataattacgtttgcttctggtggtattgctcttaaagcctgcatcatcactgacgcggtaataatagcagatatcattctgcataacagcatcccactgtactgttacagagctgctgcccgcttttacctgtttcacgcctgccggtgcagcagtctgtgcattcgcatcaactcttccggcaagaactaatgtcagcgcaaacagcataacaaataaaatcttttttgtctgttttcttaacatttttattctcctcttttttatattattaatcttattttacatcttatatcacaggaatgcaatcctactttcttcccagcctgattttttctaaaaaacttcttttaaatccggcacgaatcatacaatccctgaatatattctttagactgtactgcattctccggcgttgtattttcaagcgtcacatgtatatacggctttctctccttaatgaaacgaataatcttctcatagttcatctcacctgttcctgcagcgactgacaccagtttcccatcctgcaccacaaaatctttcatatgaaccattgcaatatcatctccaagcagctctatcgcttcttctatgatcgcatccctgttctgataattgctgatatccaaaagattgaccggatcaaaaatgatctgaagatttggagacgcgatctcatcaagcactctccgcgctctcttcggattacatacgatatgtttccacaccggctcgattgcaaaaataacgcccattttttctgcataggaaatcaccggtttcacattctgtataaaaatatccagcgcctcatccgagtgatttttttcctcaaacttatatgcctcgttgacagcacctgtctctgttccgactaccccgacgccaagcagtgatgcaaaccgaatatgcgccagataacggtgtgtgatctttgcaagctgtccttcatctggatttgcaaggtttaaataacatcccagtacggcaatatcaagatcgttttttgcaaatatttttttcaagtacattgcataccccggagtcagtgccccatcatccaccggatattccgtgattacttttgagagtgccagatgtccgcacaaaaacccctgctcctttgcgattgcaaggcgctcctcaagtggtgcttttttgatatcatgtaaacgtattcctaactgcatatgttttcctctttctgttctactgcacgaaatgatcaattccctctgtaacaagaagttctccatcctgtccctctatttccacgttttctaataccagttctttgatgttgcgcgcaaagattcccttctttgtacactcttccacaccggaagacatggcaggaacgccggatttcggattcttagcatatgtcactgtaatatttttcataatgatctgctcaattttctgttccggcagtccatcaaaatatgcagctgccacatgacagttttgggctttaatatcctcaaaatcaagtcttaagatcgcaggtgtaccatcatctaccggcattttttcacgactctggacaaactcggtcttgccgtccggatcacagaaataaaaacagtttatcacaaacggcgtcataacctgattcatatcgattttccggaaaataatctgatctaaaacggcatcttttccccgtcctctgcgtgtcttgatacgtagtccccggtctgtatcgtaaaaccggcattcttccacgaccagatttttgacaccgccagccatctcacttccgactgttactgcaccatgaccattttccatcaggcattgtctgatatggatattttcagaaggtgtcttatatttctttcccatatagatcttaccagacttaactgctatgcagtcatctccaagtgagaatttcacaccgacaatatctacatttttgcatgattcaggatccaggccatccgtatttggcgaatcgcttggattgttgatcgtaagtccgtagaatttcaggttatctgaaaaatacggatgcagtgtccaggacggactgttcttgaaagttacaccacaaagtgtcacattctgacaatggcttaagaaaaacagacgcgggcggaatgctcctaccatgactttcggatttttccaccagttttcttttgaagcattgccatttatcgttcctcttccgtagatcaatacattttctacatccagtccggtgatgatgccggcaaacatcggtaatggatttccttcccatgttcctaaattatattcaccctgttcatcataactttcaatcataccaggaaatttcggataggccaccctgtctgtatctgcgataagttctgctccctttgcaagctcaaggcgcagattactttttaaaaacagactggtaatgcgatagcttccctttggaataagcacgcggctttccttcggacaggctaggatcgctgcctgtataaacttcgtatcatcctgttttccatcgcctgtggcaccaaaatcacggacatttaatgtgacaaattcatatgctgtaacaaacgataccgttcctagctcggtaccatctgctgttcttacagaaacctcataggaagtctgcggttttaaatcaaacaatgaatttataaccgtatccgttgaaaatacctcttcaccgttcagcagaacatgatatgtttcttttgtattgtaaattccaccatctgcaatttcaatgaccgcattgcgggcagatttcataatcagttttacttccatgactcttttcctccctattccgactgttccatcgcaagcagatcatattgttccattgtccttgctgtaatgtctgacagatattccgtctgatctgccatgcccgtatttttcagatgccctgccattaaaacacctgtttctgcatatttttctttcagcaaaattccaatattgcagccttttaatatggcataggtgagttccggtgtttcttctccctcagctaacgcatcctttaatacgcgtttataaactgcggtcaaagtccggtatttttcataaatctcaaaactgatcccatcaatcacatccaccagggctgctaaatatgcatttcttgcttttgcatcggcaaatccggttgacgcctcatcttccatccggtcaacgatcttattgtaccgctcttttttcccacataccgtttcatattccataaaaaaaggcatggcatagatatcctccggcaattcgccctgcgctgcacggatctgttctgctttctccttatatactccatctcctgtttctttataaaacatgactgctagtcttccgagccggtctgcctctgattcattcagagaagcaatcgcctcttccggcatctgcataagttttctgatatcttcctgtctttttgtttccatttgtctccctcgtttttctgatactgacttttttatgcttcgatatcctgataaataaaattaaaaaaatctgcatacaatttgtgttctccggcaaccgcataaatacctgtcattgccccggtaaagcgcttacccatatgaattccttcatcgcatagataataaacattcgcaatctctgctgctatatgtttttcttccccctgcagccggtaagtaaaacgccgctttaaatactctgtttccactttcaggctgatctttttccctgaacaatcacatggaagcatctgtctctcatgcagaacatctttatccccaatatgttcttttacctggatataataagaattttccctgcagactgcaagacacacccatgtattttcgtcataataacagactaaacctgcttcctgaccacctgtaagttccggtatcacaagttccgtttccgcagtaaaacaaaacgaagtctgtctctgcaataaaatatttttagcagccacatctctgagtggaaaacagctccctttgatacggattcctgatgagagaaaacggattccttccggctccggtgcacgtggtgtcatccattttgggttccagccaatatccggctcttcttccggcatccacaccggaaggtccggtcttttctgcaaaacagaaggaccttttaatccatttacgaccggccagccatccgctgtccagcttaccggatcaagtgccgtctccctgccaagcatactgtaaccatctccgatcatcctgccacagagatataccatataccactccccgttctgtgtgcagaccggctttccatgaccacatctctggatcgctgccccctcatccatctgccgcatgatcgggttgtatggacacggttcataatttcccataagtgtcttacttctcgcaaccgaaatcctgtgccccattccggttcctccttctgccaaaaacagataataataaccgtcttttttcaacagatgtggtccttccggcgcacgtttctgatctccgtaatacaacaattttgcctcagagatctgctttgtgcagtcatcattcagttctaaaatcctcgccccacggtttagcagcatatagtgtctgccattctcgtgaaagatagacggatcaattccatcctcatcaatgaccgccggtttactgtacggtccctccggtctatctgagcttaccacgatctgtttacggtacacagtgcctgtgtcattcaggcggtaggttgccgtgacataaaattttccattatcataagaaatatccggtgcccagtagcctctgccgccttccagttcatccagtgccgcccactgtggatctgtgatcgcatgaccgatgatctcccagtggatcagatctttcgaatgtgagattgggatacatggaaaaaagataaacgaggaattcaccatataatagtcttccccgactctcacaattgatggatccgggaacatgccacggcgtatcggattatgatacatctcctcataagatgcacctatgcgctctttataataagaaagaagtttctcatcttttctttcatatgcaatctgatatggtgtcacacaccatctgtcaccggcagtaatatccattccgaccttctccaccagataccggttcatctccagattcccggatttcgccgcataatgcaggatcgtccggtggtcttcatccattgtgttcatactcgctctcgaatactcgacaatatattttacaatgggaaaatctccaagttctgcggcatataacgcaagcggcacacctttttccgtcgtatcatctatacaggttggattttccgtcagttcccggatcacaccatctaaatttttctgttctaattctctcaaaagccccatattaatcttctaatgcctctacgtgcagatattcaaaatccccataaccgccggcttctttatcgccaacaatattcgcaaacagaccgatctttgcgccgacccaggtatggtcagacggtgtgaactctgcccgcacctccgtccaagaagctggatccgtatcatcggtcagtgaataataacaatgaaatacactaccgttatcttcctcgcgcatcgcaaagatcagataaactttttcctgtccctccggcagtaccaaaagctgctctgccttctcgcgcattccatcctcactgtcataggattttccaaggatcagacgtttctgacctctgatcatgcggactgcaaggtatgcatagtgaccgcccatcatgaccattcccgcctgctcctgttcagacaatgctgaaatgtcaacacagacagacgctctaaaatatgggcagaccagtttttccgtcagcacattcgaacactcccagaggatcggctccgcttttccggatggatttttacagtataatctcaaaaaaccctttctctctttcaaagaatagaaatcatccttcggattgccaatccactgccactgcaagccgagtttttccgatgaaaagtcatctcccgccgcaagataacaaggtttctccgtgattccggtatttggttttttatggatgatacatggctccccacagccatccactgcgttgatccccataaccggccagtcattttcccatacgaccggctgcatatggacaatacgtccgtaaagtccgcgatcctgaaaatgaaggaaccattcatcgccgtttaccgtatctaccagtgctccctggtgcggtccgtttacgatactgttcccctgatgaagcacatttttctcctcatacggtccgtaaatgttttttgagcgcagaatcacctgccatccggtctttacaccgcctgccggagcaaaaatgtaataatatccgtttcgcttatatacctttggtccctcaatcgtcggctgtgtcttaagtccacagtagaggatatggtcctcccccgtcgcctttgttccatcccatgacatcgggaatatgccaagatggctcttaaatccaatacggctcttcgcataaccatggatgatatatgcatttccatcctcatcccagaacgggcaggaatcgatcagaccttttccggctaacacaagtaccggtttttcccaggtcccaagtgcatcttttgcgcgcaccatgtaaataccctcatccggcattccgtagtaaatgtaaaaatatccttcatggtaacggatcgcaggcgcccagacgccctttgcatgctgcggcagatcatagcccggctcatcgatcttttcgatcgcgtaatttttcagttcccagtttaccagatcttttgatgttaagatcggcagtcccggcacatagttaaagctggacgccgtcatataataggtatcccctgcgcgtatcacatccggatcggaataatctgcaaaaagtatcgggtttttataagttccatcttcctgatctgatttccataataatgacataaccctcaaatcctcctaaacactggttttatttcctgatacaaaaatggcaagggatcactcccaagccactaataaatcactatagataccgccaagttcttttaaacctctcgcaatacatcctgcatagacaacggcacccatatatttcagatgcgtattgtcggtcagcccgtccatatgggacggataaacacctgccggcagatgcatataccattctttggttttctcagctccagcctttcgcatttccgcacggctcatgctgtaaagatcgaccagcggaacatttaaattttcagccgtctgtttcattgctgccacataatcggtatgttctccgatatctaaatgttcctcatcaataaaacatctgcgctctaatggcgtaataaaaactggccatgctcctttgtttcttgctgcatttacaaatttttccagattcaccatgtaatcggaatgtggatctgtataccgctccggatcattttttttctcatcgttatgtccaaactggataaatagaaaatctcctgcggtaattttgtcataaatcggtgtcagtctcgactcatcgataaagctctttgtgcttctgccgtttttggcatggttctccacccgcacctccggctttaggaacaggttcatcacctgtcctatgccggtctgcggaaatgtaagaatgtcattgtattgtacggtagaatctcctgcccagaaaatggtcgtcatacaaacatttcctccttattcttttacagctccgatatttacaccttttacgaagtatttctgtaagaacggatatacgatcatgaaaggaatgatgataacaatgatcgccgcattctttacggtgttctctgttgcaccaccgtttgcctgtggaagatcactacccatgatgatacttcttaacttcatctggaagttgtaaaggtttgaatctgtaatgtaaagtttgtaatgtgtatagtcgttccagtatgtaacggcaaacataagaccgatagatgccaatgctgcttttgacattggaagtacgatacggataaatgtctgcatcggcgtacatccgtcaagtgttgccgactcaaacaggctggcaggaataccttcgaagaagttcctcatcaataccaggttatacacgttcagtgccgggaataagataacgacccagatggtattggttaaatgtaatgattttaatacgaggtaggtagggatcataccaccctggaaaatcatggtaaaaagtaacaagtttgcaaataagttacgtcccggcatatcccactggatcagtacatatgcaccaaatgtagataaaatcaaggcgatgatcgtacctgcaatcgttgtgattacagaaatcattaacggatgggacagcgtagggtttttgaatacggaaatgtatcctgcaagaccaaattcctccggccataatttcataccatatgcggtttttaaatcgaatgagtcaactaatactttccacatcgggatgataatcagtaaacttaagatgataaatattaacccgtttacgatcgggaaaacttctatttttttcttgcttttcatatctgctgctccttcctagacgattccgcgtccatcacgtactttcttgcttaagtgattgcagaacagtaccagtacacaaccaaccagagatttgaacagaccaacggctgtcgtataaccgtaatttggaatcgcaccactgttgaaggtctgatagtaaatataggtttcaagtacgtttgcagtacctaaaacagcatcgttctgcattacgaatgcggactcgaacaggttcataacctttgcaaggtttaagatcaaaacagtaaggatcgtattctgtaaagccgggaaagtaatatatctcatcttaccccagcgtcctgcaccatccattgctgcagcttcgtaaagctctgtatttattccggcaagcgtagccataaagataacggtctgccagccggtttctttccaaatattaatgatatagtacgcaagtctccaccattttgaatcacccaggaaataaattccggagtcaatcacaccagcattgataagaaatgtatttacaagaccttctgctgtcggtgccaggatcaaagtaaagacagatgcggtaactacccatgacataaagtgtggcagataaataattgtctgcacgatctttttaaaatgaatatttgcgatctcattcaaaaagatagaaacaataacagcagctgctgttgtcaaaaacaatttgataatactaatctgtaaggtattccagaatgccgtccagaaatttggcatggaaaacattttctgaaaatttttgagaccaacaaaacttgcctctttgattccgttataatcggtaaatgcaaaacggattccaagcattggcaaataaaagaatattaatgcaaaaattaatacaggaagaaacatcagatagaatcctctgtatttatagatttttgctgccaggtggttcttctttccaccggttgtagccgttacggctgatttttcattactttttctcatatctgttcttccttttcaatcaaacatgaatttgtgatccatgatctgtgccggctgcggatatccgcagccaggacaccaatcatagttcttagttccgtttaccggaaagttttattatttgtttaaagaatcaacgattgcctgtgaccactctgcaccgtgatttgactcaaactgtgcatatgcatcatcaacagttaactcgcccataacaacttttgcgatcagctcgttctttaatgttgttaaatcaccattgtactcgctcatctcatctgtggtaggaacaagatcagcagctttgcagttatcattgaataactgtgcagactcttttgcttctgctgctacagattcttcctgaggatcgtttgcaagctcaactaaagcaagcattggatcgatgtgagctttggtgtactgtgtaccctctttctcacggttctctaacatatggaactcaccatcagcatatgttttctcgttctctgttccagcaaataatgtctctgctgctgttgaccagtgaatgccttctacaccgtatgtccataagaactgaacgtctccgccatcctgcatcggctcgatgaaatatttgaatacgccttccgggttctcgcatgcagatgtgatgcaccatactggtggaacacggtcaaggtactgacctacttcagcgatcggaggtaatgctactaactcaccgtctttaccgtttgcttcaaggtttgtctttaagttggttgcccatgtacctgcccagtaagtaaatacaccaaagctgtcatcatagaatttgttacggcagtcagatgtaccatttgttaatgtggtaggatcaatcacgccctctttgtaagcagctgccattctctcaagtgcgctcttcatagaatcctctgtgaatccatctttccatgttccgtcttctgctttatagaagcttgggtttgcatcctgatagaactctggtaagtagtttgtatatggagcctctgttccgatgaaaccagcagcagatacaccgtaggtatctccgtttacaccatttccatccgggtcaccggttgtaaatgcttcgagcattgcaagatactcatcatagtttgtcggtacatcaagtccgcagttgtctaaccatgctttcttaacatatgtaacacatccgttaccacgagctgccggcataccgtataacttaccatcaagtcttacaccatcgataactcctgtgctgccgtatgcatcctgtcttgtttttaaatcagaagatgcataagcgtctgtcatatcccacagaactccctgctctgcataacctgcataataggtagaagataagatcataacgtctggccagtcaccacttgcaactgtctgtcctactacatcatagtaagcatcatgatccggctggatcacattgatcttcattccaagaagatcttccaatttagcaatgaactctgcctgtccgttttcctgtgtgaaaacagttccatctaccataatggtgatctcttctggtttctcaacatcagaatctgttgctgtgcttgcggaagcatcaccgctctctgtggttgcttcattatttgtagaagcatttgaatttgttgttcctgcgttaccagtgttgctggaaccgcatcctgccataccagctaccatagcggcagccataaggactgatactaccttctttttcataagaacctccttattaggaaaaaatttgtttcgacactgctctgatgtaagtgctttcatgtcttgctcatacattaccatcttatgggattttcagcaagaaacaatatttgacagggggtacaaaatttgttttaacactacgcaagccattgattttactgggtttttgagtttttgttgtatttttttcatattatgataaaatagaaaacgtacgattaaaaaacatgaaaaaaggacatttaatacctatgagaataaatttgaatccaccagcggatgccacagcaaaaaatgaatccactacgtttctcatgattcgctttgctattacatacagtgtctttttacttatcattttacttctgatggtacacctccaccgtgtctcaacaacacgctctgaagaggatttctggaatcaggatcagtctacctttgaaagtgccgtttcacttttagataataatttcacaaccatggattctatcacaagacagctcagcatgaataccaaactataccatcttgcaacgatgaagtccacagacgataatgatttttatctgtcaggtctcaccatgaagcagtcccttgcctcttatatgtattcctacaatgagcttcctttcagtacctattttgtttatctgagaaatagcggctatattatcagtgtaaacactttcaattccgaacagctttattatataagaaactatttatcttccggggcgaattttaatgaatggcatgatctgctcaacagcaatctgacaaaagattctgccctttatccactttcggattttatgcttcccgaaagcggtaacgcatatctttatgtgttaaatatggacgtactgacctacaaagatattcctgctaccgttgctttccatatcaatgagcagaccttacgcaaaattttcagcggtgtttctttaggtgataccggttacattattgcagtcgacgcacaggatcagccagtgttttccctgtccgaagataagaatacatcatctgaaaaagatttaaatacgcttaccgaatccgtattatccttatcctatgatgacaataatacctgtgttcacaatgacacacatattatgcggatcgcatcaaaaacaaatgactggactttctatctggtacagccggaatccatttatccatccgattatcagtttatttttctgctgatcctttttgcagcaatcatcggtggacttatcatgatatttattttagtccgcaacaatatgcgcccgattcttcatttagatgaccagctccaggaaacactgcatgcaaatacgcagttaatcgaagaagctgctgcaatccgtcctgttttatatgacaattatttgagacagctgatgagtggagttatcacaaccccggatgagctttcatttatccagaattatctgcatttagaagatccatcgcttcattattatgtattgtacggtgtaacttacgaaaatgatcctgctgcagatacttttccaaatgaaaatacttccactgaaagttctgaaagtatgaaagatattatcgccggtcttttggccagatatttttcttatgaaaataacttatatctgtgttccccaaagaaacatatttatgctgtgttaatcccttttagtggaactgccgatgagatactgatcacacttcaggaaaaagcattaaaatttcatagtgaactgctagaagagtattcgatctggttttttgcaggaatcggtctctcctgctccttcaccaacatatgggaatcttaccaacaggcgaaagatgctgcagggtataccagtaaaaactatattttccttccatatgaaatgttgaaaaaagactcccatgtttactactatccggctgaattttcaacccgtctgattcgttccatcactggcggaaataaatcccaggtgattgaaattttcaatctgatccaccaggagaacattgaagaacgttcgcttccgttccagttattacggtttttacttaccgatatccgcaacactctgttgaaagcacgttttacatatacgggagaaagtactccgcagatagtggaaattgatactatgctttcacaggacgagttaactttccgtctctgtgaagatatcagcattaaactgtgtgatttctttgcatcaaaatccgaaaagaataatctgattgacagcattgtgacttatatccgtgaaaattacaaaaatccggcgctctgcttaagcaagatctccgacgagttccacatatcagaaagttatttttctcatatgtttaaagaaaatatgaatgtgaacttctctgtctatctggaagatctgcggctcacagaggcggcacatctgattgaaaaaggcgaatccggtatcaatgaaatcgctttggaagttggttataacaaccagacgtctttccgacgtgcatttaagaaaaaatatggcgttacaccaagcagctttggcgttcagtcttaataagaaatggaggatattacaatgaatttcaaaaaaggttctccagaaagtgctggcatcccatccggatgccttcttcactttctggatcgtttacaaaaaaaacaggttccaatgcacagttttcttttaatgcggcatgacacactcattgccgagggctactatgcaccatatcagaaagacacgctgcatcgcatgttttcgatcagtaaaagttttacatccattgcgatcggtcttttggaagcggaaggaaaattatcactggatgatccgatcgtctcatattttccagacaagattccagcgaatgtacatccgtggattgcagccatgacgatccgggatatgctcatgatgcgcacctgtcatgccgcgacgacctacaaggtcgatatgaaaagtgactgggtagaaagtttctttaccgtaccaccaacccatcctgcaggaaagctctttcattatgatacgtcctccgcacatacactcagtgcgcttgtagaacgtctttccggcatgccaatgctcgattatctcaaagaaaaactgtctgttttggaattttccgatgaatcctacatgctgacagatccttttggtgtctccatgggcggaagcggacttgtcgctcttccatccgacctgttaaaattcggttatcttctatctcacgatggaaatattgatggaacacagctcgtttctgcctcctacatcaaaacagcaacctcccatctctctgacacacgcatcacggcacctcttccaagtgaagcctgcggctatggttatcagatctggcgcagtgaaaaaaatggttttgtctgctacggcatgggtggtcagttcatccattaccttccggattatgatctgctctttgtcactaccgcagacacacagggacttgcgggtggaaatcaactgatttatgatgctctgtatgatgagattcttcctttcatacaggcagatccactcccggaagatcaaaaaacgcatacagagcttctttctgtgctctcttcacttgcgattgcacctctgggtgatagtgcaatgacggcagcggtcacttcacaagtttcggggaaacgatatatgttcaaaccaaacagtagtgagtttacaaattttacagcggattttacaaatgatgagggatgttttacgtttacactgcacggcagaccgtgttccattcatttcggttttggaaaacttgtctgcggacagtttcccgtctatgaccagaggtatgctgccagtggagtgtgggtttcggaggacactttatatgtgcgggcacatgtgatcgatgcgttcgtggggagtgtgcattttgaggtggtgtttggagatgcggatgtaacggtgtttatgaggaagcaggaggaaagtttatttggggagtttcagggacatctggttgggatggtttgtggatgcctgtagtgaggcggcaaaagtcttaacgccacatggacggggcgtttaagacgtacacgtcactccgttgtaatctaactcaggcagacttagattttcttattttcggacatcagaacaaaacagacccgactttgtgcaatttgccaatcaaaaacttgaagccaccttttgacacccgaatcctacacagcaaaaaacagcttcctgctttagcagtgaagccacaatcaatatcatctaaaatccatcagcaacttggagggtgtttgcactaaggcacgccgacagtgcaccggaaccggcagattttgtgatgactttgggaggaaattagaggttcttagtgcccttgtcacaaaacagcgttttgctgccacggatggcagcaaaaatccccgtcgagccatggaaggctcgtccggggatgcacgcgtcactctgccacaacccagatcaagggcacttagaacctcttatttccgtacaacggaacccaacaaaacctgccggttccggcgcacgtcccaaggctcagccacctcctgactgggtgcagcatcaattcacaacaaatctcatctggttttttactgtggctgcttaccaatataagctaaaataccaccatctacatacagcacatgaccatttacaaaattagatgcatccgatgcaaggaacacagccggtccctgtaaatcttctgcgtttccccatcttgcagccggagtctttgcgatgataaactggtcaaacggatgtctggaaccgtccggctggatctcacgaagaggtgctgtctgaggtgttgcaatataaccaggtccgataccgttacactggatattgaattcaccgtactcagatgcaatgttctttgttaacatttttaaaccaccttttgctgcagcgtaagcggaaacagtctcacggccaagctcactcatcatagagcagatgttgatgatctttccgtgaccttttttgatcatagacgggatcactgcttttgatacgataaacggtgcatttaagtcaacgtcgattacctgtctgaattctgccgctgacatatcgcacattggaatacgtttgatgatacctgcattgtttacaaggatatcgatcacaccaacttcttcctctacttttttcacaagttcattcacctgctcctcgttggtaacgtcgcagacataaccatgagctttgatccctttttcagcataagctgctaatcccttgtcaaccagttcctgtttgatatcgttgaatacgatggttgcgcctgcctctgcataagcagatgcgatagcaaatccgataccataagatgcgcctgttactaatgcaattttaccctctaatgagaaattgtttaaaaatgacataattctgtctccttttttgtgttatgtttaagattctttcaataagaatccagtttctactttttctgccggatgtttctgaaataacagattgaattctgcacaaacattctattgtagatatccatcatatcagattgacaacttttttccgtttccttacaaggtaacaccctgcttaaagatcgccatatcatggaatccggcttcctcactgcgtaccttcttaccagatgcaacgtcgatcacatagtcaaataatttctgacctgtctcctctaactctgcatcctccacaagaacgcccgcattgaaatcgatccagttctttttctttccggcaagtgtactgttgctggaaatcttaacggtcggaaccggggaagcaaacggtgtcccgcgtccggtcgtaaacagaacaatgtgtgctccgctggctgctaatgcagttgcagcaacaaggtcattgcccggtgcgctgagaagatttaatcccggcgtatgtacgcgctcgccgtaggaaagaacgccttttactgcagcacttcctgatttctgtgtacatcccaaagacttatcctctaaggttgagataccgccttttttatttccaggtgacggattctcgtagattgtctggtgattatctttaaaatactgtttaaaatcgttgatcaggttcaccgtctgctcaaatagttcttcattttcacagcggttcataagcagtgtctctgcgccaaacatctccggcacctcagtcaggatcgttgttccgccctttccgatcaggatatcagagaatttaccaaccagcgggtttgcagtgattccggaaaatccgtcactgccgccacacttcatgccgatgatcagtttggatgcactgatcggctcacgggagaatcctgccgcataattgatcagttcctctaggagtttttcgccctcttccatctcgtcttcgcattcctgacagattaaaaacttcacacggttctcgtcataatcaccaatgtattttttcagttcaccgatattactgttctcacagccaagaccaagtactaacacgcctccggcatttggatgttttacgagatcagcgaggatcgttctggtgtgttcctgatcatcacccatctgggaacatccatatggatgcgggaatgcaatcacttcctccacagagccatgtacctttgcgttggcacgttttgccatcgctgtggcgatgttgttcacacagccaacagtcggtacgatccatacttcgttacgcacaccgacacttccatccggacgtgcaaatcccataaaggtacgctcctctgtctttttctcctctgtttttacaggctcgtaggtataagtgagcagatcgccgagcgctgttttgatattgtgtacatgcacccactgaccggctttgatattctcttttgcatttccgatacggaaaccatatttgatcacatcaccgccctgcgggatgtcacagatcgccatcttgtgtccggcagggatcgtctcagccgctgtgtattcttttccatcgactgtgactttctctccctccgcaagttcttttatggcaacaatgacattatcattttcattgatttttataaaatctttcataagtgttctcctgcttatgcgttaaaagttttttccattgctgctctcataccaagtgcacggatatcttccatataaccggttacagcctcttctactccggctaatttggtaagatcttcgccccagaaatgctcgttggataaaacagcatgtgtatactctgctgcgtccttagaactgtttgctgcaaagaactctaatacagcagcgtcatctaagatctggtattcagtaccgtcacgatgtccgatcagagccttgtcacggatctctgttcctgtgtagaatgccatcagtgcagccagtgagaatgtcaggtgtgtcggaagttttccttcattcttaatgtactctaagaaactcggcatacatcttgcgcgccattttgaaacagagttcagggaaatggataacagcgcatgttttacatatgggttgttaaatcttgtgatcactgcctctgcaaaatcaatcagatcctgtttcggaagtgtcagtgtaggaatgacctcatcaaagatcgttgctttcataaagttgaaaatcagttcatcctgcatagactctaacacgatatcattgccacagagataagatgccagtacgaaggaagtatgtgcaccgtttaagatacggacttttctctgtttgtatggcttttggttgtctgtaaagatcaccggaagtcctgcatccggaagtgggaactctttgctgatatcttttgcgctctcgatcacccagagagcaaatggctcacctgttacgatcagattgtcctgataaccgaactctttgcagagctcctctgcctcgtctcttgggtaaccggttacgatacggtcaactaatgtagaagtaaatacacatgcttcatctaaccatgtcttaaatccatcttctaaattccagagtactgcaagtttctctacacactcttttaagtggataccattgtcatcgatcagctcaaccggaagcatcacaagacctttatccattgccccgttaaaatgtttatatctttcatataagaatttggttaatttgcccggatagcttttgggcggttccatctctaatcggtctgtatcatcataaacgatacctgcttctgttgtgttcgaaacaatgtaacgtaagctgtcaagttttgcataatctgcatatttctgatattcaccataagcgtctacagcatctgcaacgctggttacaatacggttgatgcgttttggctcaccgtctacgattcctcttaactgtacggtatactggcactcctgatcgtggaatctgtcaaggcttccaaattcgatcggttttacaagtacgatgtccccgttaaatttgccctgctcatttgcaatgtcgatcatatagtcaacaaatgcacgaaggaaatttccctctccgaactgtaatactttaactggtctttccacttttcctgttttctttctgtttaataattccatgataattcctcctgcttatcggatcattactgcacaatgtcattttgtaagcgtttacaatttgtattcttacacctttttgccgttccgtcaatatgtaattttgcacaatttagtgatttttgttatttttctttaaaatcaccatattttcttctacactttttctattttcacaaaatccgatattgctttattttttttaatattgtataatcagaccagcagcaatgaaactgctttcatttttgtttacattctatatttaatgtaatccgaaacgtttcaggatgcaaatttgttataaaaggattttttatatgactatatatgatatttcaaaaaaagcgggtgtatcgattgctaccgtatcccgtgtattaaacggcagtgacaaggtccgcccttccacaaagaaaaaagtcatggatatcattgaaaaatatgactacacaccaaatgcttttgcacgcggcatgggactccactccctgcagacgattggtattctctgtgcagattcctcggatctttttctcgcaaaggcagtttattatctggaacaggagctgcaggcaaacggttatgagtcactgctctgctgtaccggatataatctggagctcaagcaaaattacctgaatttgatcctttccaaaaaagtagacggcatcattcttgtcggttctaatttcatcggtactacagaggatgaaaaccagtatattaaagatgtttccacgcaggtaccgatcatgctgttaaacgcttcctttgattatccgaacgtttacagcactttatgcgacgactacacgactatgtttgaggctaccgagtccatgttagattccggtatcgccgatccagtctatatttacaattctatttcatatagtggccgcaaaaaattaaatggtttcaaagacgccttaaaaaaacatggcatctctgatatagaaaacaggatccacaaatacgacggagattcccagcaattcaatgaaattgcagattttatggatcaggttgcaaaagaggcccctccttttcatggagtgatcgctgcggatgacgtactcgccgtcggcgtagtcaaatacgcacaacgcaatcatatttctgtgcccgacgatttatcgattattgggtacaacaactccatgctgacaacctgctgtattccggaactcacttccgtggacaaccgcttagaaacacagactcatcagttagtacagaccttagtcggtgttctttccggtgaagaaatgccgaagaaatctattttctccggcaaactgatcaaacgtggaactactttattctaaaacaatttttatggaggaaaaaacaatgaaacaatttatggatgaaaacttcttacttcagagcgagactgctcagaaactttaccattcctacgcagcagatgtaccgatcttagattatcactgccacatcaatccgcaggaaatctacgaggaccgtcagtttgaaaatattacccaggtatggttaggcggcgaccattacaaatggcgctttatgcgttcctgtggtgtcgatgaaaaatacatcaccggtgatgcttccgacaaggaaaaattcttaaaatgggctgaggttctcggcaaagcgatcggcaacccgctcttccactggagccatctggagttaaagaaatatttcggttacaacggcgttttaaataagaaaacagccgaggaagtctgggagttatgcaataagagacttgcagagaaagatatgtctgtccgcaacatcatcagacagtccaacgttactctgatctgcaccaccgacgatccggtcgactccttagaatggcacaaaaagattgcagaggatgattcttttgacgttcaggttcttccggcatggcgtcctgacaaggcaatgaatatcgaaaaagttacatatttagattacattgcacagttatctgacgtttccggcatcaaagtagatacctttgcagccttaaagaaggcactttcaaaccgtatggatttcttcgcttccatgggatgcagcgtatctgaccacgctttggaatatgtaatgtacgcaccggcttccgatgatgagattgaagctatttttgcaaaacgtctctccggagaaggtgttacccgtgaggaagagttaaaattcaagactgcatttatgctgtttgtcggcacagagtatacaaaacgtaactgggttatgcagcttcactatggatgcaaacgtgacaacaacactccgatgttcgaccgccttggaccggataccggatacgactgcatcaacaactatgcaccatcttctgagatggcagatttcttaaatttcttaaataagagcggaaatcttccaaaaactatcatttacagcttaaacccgaacgacaaccaggcaatcggcacgatcttaggatgcttccaggattccaccgctgtcgcaaagatccagcagggttccgcatggtggttcaacgatcacaagaccggtatgcaggatcagatgatctcccttgcaaacctcggaaatctttccggttttgtcggcatgctgactgactcaagaagtttcttatcctatacacgccatgattacttccgcagaatcctctgcaacctgatcggtggatgggtagaaaacggtgagttcccagcagattatgatacattagaggagatcgtaaaaggtatctgctacaacaactctgtaaattactttggatttaacttaaaaacctgctaagatataaaacaggatgcatgcagctttaataacctgattttcagcgttttggattcatatattaagatatttgtgatgcgcacagaaaggcgcaggaaaggatttttatggaacttcgtactgcagcatctccaagagatgtcaaacattacacaaccgaacgtttaagagaagaatttttaatcgatgatctgttccagccggatgtcatcaaacttgtatacagccatatcgaccgcatcatcaccggttcagctgttccggtaaaggaaactttaaaattaaccgccggcgacgagctgcgcgcacagtatttctgtgagcgccgtgagctcggtgtgatcaatatcggcggtgccggcgtgatcacgatcgacggaaaggaatacaatgttgcccacaaagaaggcatgtacatcggcatgggttcaaaggacatttcctttgcaagcgaaaatgcagatgctcctgcaaaattttacttaaacagtgctcctgcacatatgacctacccgactgtcctgatcaaaccggaaggcacaccggaggacggtgttgtcatcgtaaaagactgcaacaaagtagaactcggctccttagagaccgcaaaccacagaacgatctgcaaatatatccttccgggacaggtagagagctgccagcttgagatgggtatgacaaaactcgaaccgggcagtgtatggaacaccatgccatgccacacgcatgacagacgtatggaagtttatctgtattttgatatgccggaagatgcacttgtaatgcattatatgggcgagccgacagagacaagacacattgtgatgcgcaatgagcaggctgtcatctctccgagctggtcaatccactccggatgcggcacacaggcatatactttcatctggggaatggttggcgaaaatcaggactttgatgatatggatgacgttgcaatgacagatctgatgtaacttttatcaatgtcggaatatgggtgtactgccactattccggcaaaataatataccggcagtacagaaaaatgaggatattcatgaaaattgcattaatcaacgaaaacagccaggcagcaaaaaatgaaatgatctgtgccaccttaaaatctgtggtagagccaatgggacatgaagtgtttaactacggcatgtactctgctgaagatacacatcagctgacctacgtgcagaatggtattcttgcagcagttttattaaactccggtgctgctgattttgtgatcacaggatgtggaaccggcgaaggcgccatgcttgcatgcaacgcattcccacaggtactctgcggacacatcgaatcccctcttgacgcttatcttttctcacaggtcaacgacgggaactgtatcgctcttccatttgcagaaaactttggatggggtggagaattaaatctgacctatatctttgaaaaactgttctgcgccccgggcggcggtggatacccgaaagagcgtgtggaaccggaacagcgcaacaaaaagatcttagatgaagttaaaaaagtgacccaccgcgatctcgtatctatcttaaaagaacttgaccgtgaccttgtagtcggtgctttaagcggcgaacatttcagcgagtacttctttgcaaactgtaaagatgaaacaatcgctgcctgtgtaaaagagctgatcggctaacagtcatcacagcagaacaggtaataacctgcgagcatacataaaatcatgagcacaaacccacagaaacggttgtgaatgacgatcatcacaagcattcccattgcgaagcagaacagtgcaaatccgagcatccgtttcatggcagactccaataaagaaacgcatatattactgataatatatgcgtttcttttgcgtttctatactgttttaaaaaattatttgtttgcggaatcctttaagatatcctccatctcttttccagctgctgattttgcggcatcatcggtctgatccgctgcggagtcctcagaaaccacatcatttttcgaggtaaatttgtttacaaaatccggcaccatatcaaggattttcgtgattccatcctgattcttgatatttaccagttttgttgtcccgttctggatcacaagaactgcactcggcatgatctttccacccataccaccggcaccgttatttttcttttcctgtgaaaaagctccggctgcaacaccaaatgaaacatccaccagcggaaggatgatcgtatcaccaatatggatcgcatcacccactactgtttttgttgtgataaaactgtccatccccttaaacaaggactctactgttgtatgaaaactgttgtctgccataataaaaacctgcctttctctttttctttacttaaaaaatttctttataaaattccggatatcacgctcctttaacagacggataccggatataagtacatgtacgagacggatgtgcccctttaccagaaaagtacctttcacatatgtcttatctgcttcaaaatcgggataaatcccaatatcatactgatagattgccggaaacatggcaaggattccaagtgcctgtccggtcgctgacggctcccacagtgcaaaattcagttctgtgtcaatctttcgaaaacgcgaatgtttcagtaaatatttaagttctttccagattgcagaaacactattacggttatgttcatcggtcagtgcagcctttatttttcctgcctgcccggacaggtctgccagttttccacgaatacctttgattttattagtgatatcgtgaaatttacttgttatcctctgtccaaacgatactttttcagaatctgtctcatctatattctttcgtactatagacgtctgctctttcgtatctgtaccatcttttgaatctttcttttcattggcttctgctgcatcttttacactgacatcctgccgttgcatttttgaatctgatggaagtatgttttcaacctctgcttttgtctcatgcactgccgtgtctgtactgtctgcatccggttcttcctcttcgtcctccagcttctcccccagagcgatacgttttccaaagagtttcagcgtataagaaaaaccttcctcgttataagaaaagccaaacgacagaatatgaagcagccaatgcattttcccctgaacccggatattttcttctatgcttccatccgtcctgtaacgaaccggcacaactaatacaagaaaaacaatcagcagaaaaagtgcaggcagcgtcagcaggatccagccgattatttttaatatgagcaatataactgacattctacgctccttacccctgtttttctgcaagataggcgcggacggcaaatgtgccggtactgtggtacacttcatccacaatggatgctgcgacctcaatcgcttcatcatagccctttgccagtcccacaaccaccatatcttttttcggataccctttttgcatcagttcgtatgatggtatgatatcaagcagattctgtgtgttagaggctaatgtgatcacataaatcccaatctgtccggcattgtgcataatcttccatttgaccttctttgtcttatgtacaatactttctccaacatacaaatccttataccatatcatacatcctgctccatctttctgatgtgttttgtttattcatacctgtggctgccccacagattattcttctttaattcctgatattcctcatacgctctttctaacatctgtttttcattcggaaatttcaaaagatgatacgcctcatggtatttgtaataaccggaatcgacaaaatattcttcacgctgtggtttgctgtaataactgtctgccatcatcagataccagtgcaccgtcttctccacaacatcctccggtaccgtaaatgaatactgacttttcccgatatatttcatcagggttgctttcacaccagtctcttcatatacttccctcatcgctgtatccttatattcttctcctgcttccacagttccctttggaagtacccatccctcgtatttatttttgtaatttttgtacaagagcaatattttgccgcgaaatattaccacaccaccacaacttgttgcctcgatcatcgcaatacctcctgatgtggttttttataatactgtcatgctaataagtataatacttttcaaaagcacatgcaacatttcattcattataatatgcatcaaaaacctcttttgcaatcggcacggcatattcacttccgacacctgctttttccacgatgacagcgattgcaatatcggatttatcatcccggtgtgcatatcccacaaaccaggaatgcgaggaatctgcaccggtagaatactctgctgatccagtctttcctgccgcctcatagctttgaccgctcagttttttaccggttcctgtctccaccacataattcatataatcttttaaaattgctgcctcatccgttgtcataagcgtaccgtattcttccggctcatactgctcgaccagtgttccgtcgctgctctccacacggtctaacacatatggcttcatcagtactccatcattattgattgcactgacaagcaacgccatatgaaacggtgtcacaagtgtctgtccctgtccaatggaggttgccataattgccgaagatccgtctgacttatctaacacaaaactgctcttagatgcctgcagatccgtcggaaggctggtattaaacagcattttattacacagctgtccaaactggtcgatgtcaagttccattccaagcgatgcgtaaaatgcattgcaggaattggcaaatgcctggcgcagattctgcgttccatggctcttgtttccatagcagtggatcgtatgatttccaaccgtataactgcctgtacaggtataactgtaattttcatagtctgcatgttcctgaatatactctaaagttgtcaggatcttaaatgtcgatcccggcggataaagtccctgcgtcgcacgatttaagagtgctgcatccgtgttttcatctgcggtcagattatcccagtcggctgcaatcgtgttcggatcaaaatccggttttgacaccatcgcaagaatctttccggtggaaggctctaatacaacgattgctcccttataataccccaatgcatcgtatgccgttgcctgcagtccataatccaatgttgtgaccacattgtccccaggacttttctccccctgcatctcgtctccaactttatctataaaagctgtatttgaccgtaacagattaaaatttgccagtgactcgatgcctgattttcccttggtagaatacccgactatatgggaaaatatactgccatacggatatctccttgtctcatttccctcactgtccgtcaccgtctccgcaagcacctgtccatcattcgtcaggatctgcccgcgcacgatcttctgtgcaaatgtctcctgtctggtattataaggattattgataaattcctcgctcttaaaaaactggaagtaagaaaaatatcccatcagacagataaacagtgccagaaatgaatatgtgatcactgcaaattcctggttttttgtattctttttcttttttcctgtcttagtagagttcttcgacctgttgtctctcgtatccggtctttcgctgtttttttctcgcattgttttctccctcatcctgtcttaaaatatacagtccctgaattaccgcaaacagcatcatggttgccagtaatgaacttcctccatagctgactaacggcagtgtcactccagttgacgggataaacttagtcactccgccaatggtaagaaatacctggaacgcatatactgtacccagtcctaacgccacgagcttgtaaaactgttctttcatctgcattgcaatatttaaaaacatcaaaaagcagctgatgcacaccatgatcagacaaattgcgaaaataccgcctaattcttctgatattgcagaaaaaataaaatcctgctcaacaaccggtatcttattcggcgacccctgatacagtcccgttccaaaccagccgccggttccgattgcaaacagcgactgacagatctgatatccctcgttgtcaatcacactgagcggatcccgccatgccacaactctgacacggacatgtgaaaacagtccatatgcagctactgcagcaatacatccgaccagcagaccaccggcaaaataaaacagttttctggttgcaacatagagcatgaccagataggtgacaaaaaagatcaacgcacctccaagatctctcgacgcaactaagatcagcacatgcactgccgccacgatcgttgtgacacagactgttttaaaatccgtatttttatagagcatgcctgccacaaaaaatacaaataaaatttttacaaattcagatggctgtatcgaaaacaggccaccgatcgtaaccgagatcttcgcaccatagctcgtggaaccaaatatggtaactgcagcaagtccgacaatgccgatcatcgcataaagccaggtcagtcttcgtaaggaccgcactttccgtatcagtaccggtatcacaatcgtaataacggatgcacagatcgcaatcgcatactgtctgatcgccttctcgtaagaaagccttgtcagcataataaagccgaccattaaaagcatgcacatattatttgtcacaagtctggacgcttttggatacagtaactgataattaacgatcacgatcgtcactaaaattacctgaagaaaataaagaatgatcagattaatttcatccgtaactgtatagagcactaaaaatgcatccagatggatcagatacattaaaaaaatctgtctgtcaaaaatatgattccgcttttccgtactgatcctgctgcgaaatgccgaaaaacactcatatgcataacatgcaaacaatatgatcatcagatattttgaaacttccacgataagattttccataccgttattctactcctcgtttatagtgtccaccggtatattcgcctgtatacagttcctgcagactgttttccccattcaaaaatattttttcatataaatgtaaaatctgttttacctgtgatccctgctccgtcgtaaagctgatccggtacgcatggatccccattttctccagctccttccgatatgggaacaggatcagcggagctgtattataaatcgtattataacattccgtacagttatttttgaccgggaaatattttccataacggtcctttaaataagtaactgtccgcattttgtcacacccccggtcagccccggcattggcatgtacacactgtgccgacaccatcagcggcagattgccatacagaaacatctcactgtgtgtattgtcccttccatgcagctctttccggttcagttccaagggaacggtatcgcgcaccggcttcctatcccaaaactgcttttgggcataggagttccatgtatacagattatgatctaaaatcacatccatatccgacagattctgacggataaacgcaagttcatcatagctttttaccacaaatccgtctaccccggtctgcttcattccggaaagattcctttcataaaatgaaagtgcagaaagccggaatactgccggcatgatataatacgcctttttccccgccgagtggatacggctcacatcttcttttaatgctgtgaaaagattttccctggtataacagctgctgtcaagataaatggcatctacataagatgcatcaagcaaaagtgtgatacaggaacgattctcgatggaaaccgaaagatacggtgttacgctgcctttctctgtctttcgctcttttttcacagataccgtttccttctgccattcttcgccggatgtttctcctgccgccatttctgttttatgcgaagcttcccttcttcgcataggtgcggtcaatgcctcgctcaaccgttcaagtgcatttctccgcagcacattcagtgcctgtacgggaaggaatatatcgtcatccatatctatgtcaagttctgcaaactcatacggtgtatttccggtcttttttatgcttgcagctactttttcttccgcaagcggctgttttaatgctgcctgtaccacatctccatccacagaggtccggatatcatttaatgcaacttccagtttagcaggacaatctttttttaatcttaagattccattgattttttcttttttttcggaccttacatactgttcttttatttcttcccagagtgcttcatttccttttgtatgtgatggcttatcaagtgtgatcatctctctgccattatgtcttttatagtatccatcggtaaatccactgcggtttccaaaatcataaagatgctgtatatcttctttcgttactttgaaatctttctttgcagtcacctcatccgtgcgcaggcatgcattgatgtaatagtctatatatttgcgataaaccgataccacaccggctgcatattcgggctgtttcattcttccctcaattttaaaggaatccactccattttcgatcagttccgggatcattgacaccgtacagagatctttcgggcttaaaatgtaaaggtcacgctcttttttccccgtttttaccggatgttttttctcatccatgacctcataagaaagacggcacggctgtgcacatctgccacggtttccgctgcgtcctcctaacatactgctaaacaggcactgcccggaataacagtaacagagcgccccgtggacaaaactttcgatctcaatatccacatgatctttgatatcccgtatctccgcaaaggacatctcacgcgcagtcacaacacggtctgctccgagttctttcatcatcattgcaccatagcggtttgtcacggtcatctgtgtactcgtatgtatggaaagtcccggaaaagcatcccgcaccagccgaaaagcccccatatcctgaataatgactgcatctaatccctgctcataataaggcagcagatacgaatataattcctctgtcaactcacgttctttaaataatgtatttaccgtaagatacacttttctcccatgaatatgcgcataatcaattaccagaagcagttcttcctcagtaaaattattcgcataggcgcgtgcaccgaatctgccgccaccgaggtaaactgcatctgcaccggcatgtatcacggcctgaaaagtttccatggaacctgccggcgctaacaattctatattctgatatcgtttattactgttcattctgattctctccatcaaaaacataaaaggacgaaaataacctctccgtcccctcactttttcctgtatggcagttctctgctacaggtacccatctactattaatcagcggtatcttcctgttctgtttcatctttttctgaggtatcttcatcctcaatcttcccaagaagcgactcctctaatgacgattccaaatgcgccttattcaacagtaattctcgattttctgtatctaaacgcttgatctctttcttatcattttccgactggatctgttctgcgatcagatcgtgtttcaggttataaatttctttttcttttgcctcaatctcacgctctaacttttcagcttgggcttttgccttaaaataatcatctgcgatattaagctgtaacaaagttgccttcatgtcagccggaaatctctgataaccctctatactgtcaaattcatttaattttccattgatatagactgcaaccttctgaagatattcctcgctttcgtatccgcttaatgtatatacttttccgccgatcacaacttctgcacttgttttctctgccatttatcttctcctccggtcttctgcagtttttactgtttcttgtaccgaacatcacaatatatggtatattataatgacattcaacgttaaaatcaactattttgtcaatccgaaatgctgatatgcaaaatcagttaccatgcgtcctttcggtgtacggttaataaatccgtttttgaccaggtacggttcatacacgtcttcgatcgtcccggaatcttcgccgatcgccgctgctaacgtatcgagtcctaccggcccgccggaaaatttttcgatcatgatctttaagatattgcggtcattctgatcgagtcccatcttatccacctctaaaagatccagtgcaaaagcagcaacttctttcgatatctttccatcatatttcacttctgcaaaatccctgacacgctttaacagacggttcgccagtcgcggtgttccgcgtgaacgtctcgcgagctcaaatgcaccttcctcatcaatctccactccaagtgtttttgccgaatgcaggatgatcgtctttaattcttccaccgtataaaactccagatgatgtaccacaccgaaacgatcacggagcggtgccgacaaaagtcccgcccttgtggttgcaccaaccagtgtaaatttgggcagatccagacggattgcacgagctgttgcacctttaccaatcataatatcgatcacataatcttccattgccggatatagcacttcctccacctgacggttcagcctgtgtatctcatccacaaacaggacatccccttcctgcagattgcttaagatagccgccatctcgcccggctttccgattgcaggccccgatgtcaccttaagatgcgtccccatctcatttgcaatgattcccgcaagcgtcgtctttccaagtccgggaggtccataaaaaagtacgtgatccaacgcctcgcctctctgttttgcagcttcaatatatacttttaaattttccttcgccttctgctgtccgatataatcatcaagcgtctgcggacgcaggcttttttcaattttaatatcctcttcctgcacctgcgtggaaatgactcttttttccatttaacttttcaccacatttctataaaaatgccatcttcttcaatgccatctttaatatttcttccacgtccgtctcttctgtaatttcaatgccgtttaatgcacgcagcgcctcggaggacgaatatccaagtgcaactaaagcctgcaccgcctcgtttttggtgccctgggcatgattttctgccggttcgcccgtcttttcaaacttctgttcaaacgcgtcttctaagctcattttatcttttaattccagaatcagtctctgcgccgtctttgtaccgactcccggtgcctttgcgatcgcttttgcatcatcaccaaggactgcaaaccgcagatcatcggtcgtcatcacggacagaatcgcaagtgctcccttcggtccgatcccgctgacacctaaaagcagcttgtagattttcaattcatctttggtcagaaatccaaaaagcagcatggcatcttccctgacatgcagataagtatatacttttacctcttccccgacagaaggcagataccggaacgtttgtccggttgtgtaaatatggtaaccgatccctccggtttccaccacaatgctctcctcatccatatctgtcaaaatgcctttgatatatgaatacatgttaatcctcctaatgctgctgtccacacttatcgtgtgagcagcaagctctaattacaccatccggtttccaatccgttttatcatttcctgtgccgcaatgccgatcaggaaaccggtcagtgccccggcaaataaaagcaccggcatataataaaaaatattataattttcaacaacatacgctgccacaataagctgtccgacattgtgaaaaattccaccgctcacactgacaggcagaacgccaaaccatttcatcctttttaatagatacattgcaaggaaactgagcagtccgcctgccagactatataaaatgctgaacatatttccaaacagaaaacccgccagcacgatacgcaatgtagaaactgccagtgcctcttttgtgccaacgcaatatagcatcagtaccacaacaatgttcgtcagtccaagttttacacccggtattccaaaataaaacggaatcagtgactccacatagctgcagatcagtgccagtgccagatatacacctaagtatgccgtttttttcttatctcgcaatggaatccaactcactttctcctgcaccaatcacctgcaccaccactttgtttggaagacagacgattgtttcgtttgtttttgaaatagccttctggtgcacgcagagcttgtccgggcagtccgcctctgtcacatccgcttttccatctctgatcacaagcagattcgttgttttcccgtctttctggattgaaatctcctcatccttatcaagcgggtaggttccatagatttttccatctaccgtgacttccacacttgccccggtatcctggtgtgtcagataaaatcctgccgcaatccctgccagaccgatgaaaactatcattaagaaaataatatctttttttttcattcttgctcgcccatgtaatagaagccaaaggcttctttttatgattttatatacactcccccatataatagaagccaaaggcttcttctcaggtttttatatacactcccccatatagtagaagcctttgcattccaacagtttcacattcacgatttttccgatcatatcctcggttcccggaagatgtaccacagagttattgctgagtcttccggtcacaagtgacgcatcctgctcatttttttcttcgatcagaaccgaaagtgtctgtccggtcagcgctcctgctttttctgcggagatcgtctgcacttcttttaacagacggtcaaaccgtgccttgatcacgtcctccgggatctggtcttccatcactgccgcaggagttccggtacgtttggaataaataaaagtaaacgcactgtcgtaacgcactttgcgtaccacgtccatggtctcctcaaaatcttcctccgtctcacccgggaatccgacaataatatctgttgtcagcgcgatatccggcactgcggcacggatcttatctaccagttctaaataatgttccttgtcatagcggcggttcatcagctttaaaatacggctgcttccggattgcagcggaagatgcagatgtttacagatttttttggaatttttcataacctcgatcagatcatcggaaagatctttcgggtgggatgtcataaaacggatacgctctattccatctactttttcaatttcctgtaaaagctgtgcaaatgtcatcggctgctctaaatttttaccataggaattgacattctgtcctaagagcataatctcaaccacgccatctgccgcaagacactcgatctcacggatgatctctttcggttccctgctccgctccctgccgcgcacataaggcacgatacagtaactgcagaaattgttacatccaaacataatgttgacaccggacttgaaagaatattttcgttcgaccggaagatcctcaacgattttgtccgtatctttccagatatcgatcgtcatggatgtgccgtgacctgacgaatgctccgggaaactgttttctaacgctgtaacgatcagctctgcaaatttgtaaatattgtgtgttccaaagatcaggttcacaaaacgataactctgcttgattttctccaccaccgtcggttcctgcatcatacagccgcagagcccgatcatcataaacggatttttcttctggaaaccgtttaaatatcccagtcttccgtacactttattattggcattctcgcgcacagtacaggtattatagatgacgaaatccgcttcctcggagtcctcctccacaaaaccgatcttctctaaaataccgactaacttctcggaatcccttgcattcatctgacatccgaatgtggaaacatggaaagtcagcggatttcccttttcttcggaaagctgtcttaagtactcttttgcgatatccataaagtaatactgacgctccggctcagttgccgggatctggtttttatctgcgatgcgcagtgtcgggcgcactcctgttgtaactttctgactcataaaactgttaattcctcactatttctattactttttcttatggtcttacctgaccatttccataaatgatatatttcgtgcttgtcaatgcctctaagcccatcggacctctcgcatgaagcttctgcgtactgataccgatctccgcaccaaagccaaactcgaatccatcagaaaaacgtgtcgatgcattgacatagacacaggcggcatccacctcgtccaaaaacttttgggcattggtataattttcggtaatgattgcctctgaatgtccggtattatagcggttgatatgctcgattgcttcatctacagatgcaactgtttttgcggagatcatataatctaaatattcttttccccagtcttcctccaccgcaggcttgatcagcgctctgttcagtgctgtatccgactctgccgcagcaaaacttctctcatccgcatgtaattccacgttctttttctgcagcgcctctgtcagtttcggcataaatgtatccacgatcttttcatggatgacaagcgactcacaggcattgcagacaccgatacgctgcgtttttgcgttcatgataatgtttaccgccatatcaaaatcagcggtctcatccacaaaaatatggcagtttccggttccggtttcgatcacagggatcgtcgcctgattcacgaccgcacggatcagtcctgccccaccacgtgggatcagcacatcgacatactggttcattttcataaatgccgcagcagtatctctcgacgtatcttcgatcaaagatgccgcttcttttggaatgccaagctgttctagcgtcttttgaatgacggaaacgatcgcaatatttgaatgaatggcatcacttcccccctttaagatcacagcatttccggtcttaaagcagagtccaaaagcatcgacagtcacgttcggtcttgcctcgtagatcatgccgaccacgccaagcggtacacgtttttttccgatcatcaggccgttcggacgttttttcatggaaaggacttccccgatcggatcatctaaagcggctacctgctgcaatccttcggcgatctgggcgattcttgcttcgtttagcatcaggcggtctaacagtccttccggcatatggttctttttgccattttcaaggtcttctttgtttgcggcgatgatgtcggcggatgcggcgacaagggcggatgcgactgcagtgagagcccgatttttttcattggtgcctaatgtggcaagtttttgggatgcggctttggctccctggcatatttgttcaagttccatggtgatacctttcctttctgtgaaatgtttatacggtgttgcagcaatacttgggcgaaactctgcagtagtctatgtgtattgtggcgatacttgaggcgaaactctgcaacgggctgtggttgtcgtgaaccgggcacctgtttaaaagaaggtgcccgattcacaacagtcgaaggttttgggagcgtttcgctttgggtagtctcaaattatatcatattcgccagtttccgtgtaaatgcgatgcatttttatatctgtatcaagtacttccagctctggttcaagctggttctcgtaagctaatgcaaagcggtttagctttgcatatctcgcaaagtagcggtcgtaaaagcctttgccgtagccatagcggctgccggtgggagtaaagacgacgcccgggactaacactgtgatctgcgtgttggatagatccatgggatttatacggcggcattctgcggtcggttccatgacgtgaaatgcgccttctgcggtctgttccaaggaggtgatctcataaaattccatggtacagtctgctcctgtacggggcaaggcgacatgtctgccatcggacagtgcttttttaagaaattccaggcagtctgcctctttcccaagcggatagtatccgaagatccagtctgttatggcataccagtctgaggtcagcaatttttcgcagatggctctgctcttttctgccgtttccggttctgacattgcatttcggatggcaagatgttttttccggatctcttttttatcaggaaagctttttcttgtttccatattcttccccaaggtttgtgacggtaccgtccggattctgcatgtcaatattgtttaactgtgctacaagattcctttttacatctgcaacataggctttgcgcagcattgcctgttcttctttttccgcctcggtaagtccttccgcctgtgatttgcggtaaagtgcgttgattctgtcgatctgttcctgtttcataaaaatctccattcctgcgtgtgaaaaatttattattcacataaattttttctatccgattgtttctaatataaaatcctgaatacggaatgtttcctttttctgtgctttaaaaatggttcccctaaagctgtcatcaaaaatatgatgcagtacgcagacgtccgctccgtttgcaatgatcatatctgttccggaaagtgtcgcgatctttgccgctgtcagcttggtcgccatgccgccggttccgacatcacttccggtcgtactctttgccattccaagaatgtctgaatccattttttcgaccacttcaatcagttttgcatccggattcttatgcggatcatccgtaaataatccatcaatatctgataacaaaatcaaaagatctgctccgatcagggaagcaacgattgcagaaagcgtatcattgtcgccaaactgcatctcataagtagataccgtgtcattttcattgacgatcgggatcgcacccaaacggaacagttcatcaaatgtattcttggcattttccctcgaaaccgggttgaccatggtatttttggtcataagtacctgacctgccacctgattatattcagcaaacagcttctggtagatcatcatcagtctcgcctgtccgaccgctgcacatgcctgttttgtggaaagttcccgcggccgctctgtcatgccaagcgattgtctgccgactgcgatcgcaccggagctgacgagacatacgtccatgccacggtttcttaaattgcaaagctcgcgcaccaggtgctctagttttgtaaaattcaaactgccggtctcctcataatttaacgaagaagaaccgattttaactacaactctttttttctcatgaaagtgaaaactactctggtccattttcccaacgaatcccctttattcctgattatgctttttcgaacatatgcactgtattatactctatcatatctgattcaaaatatcaaagggaaaaaagagaatatctgttctaccttggcacatccacaacgaattgcagtaaaaataatatattatggtatacttgtggcatttttatttttatgctaaagtgttgttcggacaactcaagttgttttccttgaaaatcaggtaaaaatggagaattttatgaaacgaaactatcgattatttttatgtatactgctgtctatgtcggttttactgctatctggctgtgatctgccatcccggctcaattttggcaaaacttccggctccggcgaatcgatctccaaatcgggtttttattttaataccgttatcaccgtcaccttatacggaacaaaagacgaaaccctgctcgatgactgtttttctctggcagacacttatgaaaattatttttccaacacgatcgcagacagcgatgtgtcaaaaatcaatgcagcaggcggtgcacctgtcaccgtgcatgaagagaccgcagaactgatcaaaaaaggtctttattatggagatctaagcaatggaaaatttgatattacgattggaaaattatcggatctgtgggatatttccacaaaggctttgttagatcagacagacgcctccatgatcccatctgatgatgagatcaaaaaggctttaacgacagtagactatcagaatgtagttgttgatggcaataccgtcaccttaaaagatccgtccgctaaaattgatctcggcggaattgccaaaggatatattgcagaccgcatgaaagattacctgaatcaaaaaggagccgcctgcggctatatcaacctcggcggcaatgtgctctgtcttggtgcaaaaccggacggttcttcctataatattggcatccagcgtccgtttgacgaggaaggcgctgcaatgctcgctgtatccgtgaccgaccagaccgttgtgtcttccggtgtttatgagcgctattttgaggtggactgcaaacgctatcatcacattttagatactgctaccggatatccctatgataacggactgctgggtgtttcgatcatcacggacgaatctgtggacggcgacggactttcgaccacctgttttgcactgggtttagctgacgggatggcgcttgtggaaagtctggataatacagaagccgtttttattacggaggattatgaactgcattttagttcgggaatggggactaagattccgtatcaggtgatggagtgatgatctgccatggtatggattttataactgtatgatctgattattttcttccgtaaagtttccaccatccatattctttctcacaaaaggaactcccttgcgaacataaaatatattatctgtaagcagtgcatccgggttttcggacgggctgatggttccacctaaatcatcataactgacgttattacgaaatgtgttatgaatggcctcctgcatacaaaacatcacacaaccgccttcattttgcctgctgtaattatactcatacaccgttccatccccggaatctgcatcgtaagccatcccgtcctgattcagccgtgtgtctgccacttcattataacgaaacaacgcatctttacatttccatggccagattgccgcagcaacctttccaccacggttgcccggattgcaataaatacggtcattgatctcacatgccacagaatcggtcatattatgttccacaaacgggcgcagtgcatacatgaccgttattccatctccacctgccattttcacataattatcccgtatcacaatattctcatgaccatatttcaaaaacctttttttatccagttctgcacccgcaaatttctcatgtgcataactatacccgactgcgatcccccaacggctcacacgatatacatagcatccctccaccaggatatctgaaaatcttgccactcctgtcattgcttcttccgctggctgtaatgctgtcatatagatgccgccattattcatatgcttgtcataaacatttccatgaacatcatggattttaagatttcgaagtgtgattccacatcttaaacctttctcttttgcaacgactgcaacacctgtacgctccattttatctgcctgtgaataattttcgccgatcactttatccgcactgtttgtaatctcaatatcctgtatgataatatactcggcatcaaatagaagtactgccgaggaaacataaccatggtaaacatgcgtcggcgaatccagttcttttccataatcctgataccagattccctgtccatctgtctttatcagaggatcttcaccacatccataacttccaattacaatcggcatctgctttgttccgctgtcacgaatctgtaaaaactgtttttcaaaaacacttccacacgcaagcaatatgtgatcccccggttttagtgcaagcctattgacggcaaaaagacttgcgaatgcactgttttcactcaaaccgtcattggtatcatttccgtttatcgaatcgacataatatttcctgcacaagtctgtcatacacttcctcccgcaatcttttttcaatgatctgctctacctcttcataagaaaaaagatctccaaaatatcttccaaataaatctttattccgctcatagaaagcttttttctgattttctgtaatctccggactgattcctgattttctaatattttctgtcggctgtacgaaatccaaccggaaacgcgtcaattcatactgtagatacatcggcaatgaatatctgcgcggtccgtaaaatacctttttctccatttcaagcctggcattctcttcatttttttctgcacatcttttttccaacgcctctatatcggcgttttcaatcaaccccagcttttctgcaagaacaagttcggctttcgcatatgcccactcttctggtgtaaggcagtatcttttttctatcatttaacagcccccgtaattccatttgcaaaacttttctgcagacataagaaaataatcgccgtcggaagtgtacagatcagtacaccgagcatcaacatcccataatcaacactgtagccgctttttaagtttgccacaagcattggcattgtgatggaatcattattttgaaagacaatctttggccacagataactattccatgcgttcataaaagtaaccgtcattgcagctccatatgttgatttcataacaggcacaaacatccggaaaaaaatctgtatttcacttagcccctccagacgagccgcctctataatatcatgagggaaagaccgcgccgcctgacggaacatcataatcataaatggcgttgaaatagacggcaaaacaaatgcaatccagctattgaccagattccaggaagagatcattttaaaaagcgggatcatgattgcaacaaatggcagcatcatagctaacaacaatacactcatcaatatgtcttttcccttatcatgataaatttcaaatccataacctgcaattgaacagaccaataatgtgataatcgtcataagaatcgcatttcgaaatgaattgatcattgccagccccagattctgattggcaatcaatgccttaaaattttcgactaaatatgttccaggaaacagttttcccctgaccacatcaatactttgattggttgcaccacaaaccatgtaatatagtggaaatacagacaaaaaacttgcaaaaatcaatacaatatgtgatatacataattttcctttactcacgtttgtcacctactttcatttgaattgcagacaaaattgccactataataaggataaacactgaaagtgctgccgcataattaaattttggtgtctccacaaaagaaatgttataaatataatgcgtcaatgtcattgttgactttcccggtccaccagccgttaaatttacagactcgtcaaacaactgcagtgttccagacgttgacataatagccgtcagtaatatggtaggctttaacagtggaatggtgatctttgtaaactgttgaaacggtgatgccccatcaatacgactcgcctcatagacggaataatcaatattctgcagccctgcaagataaaacaccatattgtaaccggtccatctccagaccaacgcgattataattacaaatcttgcagcccatgcattctgaaaccagtctacggtcggaagtccaatcgcagaaataacgtgatttaccagaccatcctgcgcaaacagtgacttaaaaatcatagaatacgataccagtgatgttgcacatggcaggaaaatcatagttcgatagattccttttccctttatattcggattgttcagtaattgagcaagaacaagggcaatgatcaacatgactggaacctgtatgataaaataaaatactgtattgaaaaggcactgcaaaaatgttttgtccttcagtatcctgacatagtttgcaaagccaacccaccttacagaatctcccataccattcttaaatgacagcataagcgcctgtatcatgggataaaaacaaaatacaaaaatcaatatagctgccggaagcaaaaacgcccaaccagtgaggttatgttttctttccagacttaattttctttttttctccatatattttctcctaatgtaataccgggaacataaaatttgttcccggtacaaaccactttacatatttaattttcaatattaaattctaatgtttcctgtgcattattcatttcaccgtcaatatcagcattattctgaacaacatttgtgattgcatctgtcaatgcacttcttatgtccgaatagtatgcaccacagtcaaatgctggaaccgaacctgcatatccaacgatatctttatatactgcctgtccaccataaaaatctgatgcctgattatatacatcagactgtgcagccggaatgtagcttgcaatcgcacctgcattcggcaacagatcatcatataattccacactgcttccaaatgtagattttaagaaatcaaatgcaagttctgtattcttacagttagaagatactgcccagcttgcaccaccacaatttgcataatttgtggctccatcaactccatccagttttggcatgtttacaattgcccattttcctgactgatcctctgccgcctgaatggatgacatgatccagcatccattgatcactcctgctgtttttccgtcattcatagaggcaatatactgatcccagtccgtatactcggcaataataccctcatcaactaattttttataaacttccattgtcttttttaacgcttcattgtctgcaatatgaacctttccgtcaacaattggtgaggctcctgccgactgcagcatttccataagtaattcggatcccccggaggaagcgatcattggcactccattcgcctctactactttttttgcaagttcctcaaactgtgaccatgtagtatccttaaaatcgtcaaccgtaagacctgccgcctctaccatatccgaacgaattgccataatcgttgcaccattatcaaaaggaagtccataattttttccctctgccgtggaatctgcaagttttccctctgtaaactgtgaaaaatcaattccggaatctgttaattctgtaaaaattccaggaaaattggcaatatttttatggaatgaataatcctgcatcagaaaaatatccggtaaagtactgtaatctcctgacgttgcagctgtaatcagctttgtctcaatatcattataaatattttcctgaatatccagtttaaaatctggatggtctttctgataaatcttttctgcctgttccatggcataaatattaaaagtgggatcccagcaccataccgtaagtgtttcatctccattttcatttgtttctgcggaaacactctgcgtatcctcattactgttcgtaacattttctttttcgttcgtgtttccttcattttggttcccaccacatccggcaagcacagatactgtcatagttgctgccaacatgaatcccaatgcttttttcttcataaaaaatacctccctgcaaaaattattatttttttattttataaaatatgacggtatgataccactcataaattatcaatagttacattgtctcattcaaccaccgcatttctcctggttctagtgtcaaccttacgataaaatcgccattgatatacagatctgtctgacattcttttcctgaattatttatgacagctattttttgcgttttctgaaaaacagtgacctcagtatctacatttgttacgtaatatcgtttcatctcctgttccattcccgctgcataataaattgcacgaagcaaaatacggcagttctgaggggaatacggcaatcctgcaaagtaaacaccgtgaccttttccgtattgattaacaaccagctggctgtattctccatccattgcaagaatctgataatgatctccctgcgcataaatgcgggtcgtaccttctccgaaatcaatatccccttcaatatcttccaagataaaatgctgcggatttttctcgttatatttatctgtacttagtgaaaaacccatctcacgatctacaccaagcacatccgccagctggaaaaatcttccctgatgctgatatgctgtcggttctcctactccgataaatccaccaccttcatccacaaactgtcttaacgttgttacaactgcttcatcaatccaattttcagctccactgaatgacgtatatgcatctccaacattgatgatcaccctgatatcttttgggattccttttttcacatcatcaaaagagataaattccacatcaaacggcattccactcagacattccagcactccctctgcagaataagtttctctgtgccatattgcatgatgcacctggtttgacatccatttccgcaaacctccccaacagtttaaaactgctactttaaatggtgcaacataagatttcgtcccgttcatattttcatgtatctgtctgaattccccgacaacactttgaatctcttctataaatccaggccattcactggccaattttaaatatccgccatatccgatgcggtcaagcggagaacgtaaaattgcccttctcgctttcatccagttgtcctttgcctcccctatgggatctccgccttctccaaacacgtcggggaaaaaatatggcaaaagccttccttctgtatatttaaccccttttatatctgaaatcatacggagtgtcacaccactgccaacagaaccaactactgcatccagaccaatttctgcaaaatattttccgtatggttccgtccctatccaatgatctcccaaaaacatcatcgcttcttttccataggaatgaacaatatctacaagttccttggcaagcgcacaaacttcctgctgctggaattcaataaaatccttaaactcacgacttggcacacggaacatgctgttgtgatatccctgatccacaataaattccggtctgaatttataccctgcccacttttcaaatttctctaatatgtatggacttacacttgcactatatccaaaccattctacaaatttttcacgttttttatcatcaaaggtaagtgtaaactggtgaaaaaaagtcgtaaatcttaccacgtcgatctgcgggttttcttcacaccagcgttttaatttttcttttacgtacttctgggttttcggctgccgcacatcatatgtcagttgatgtggtgtatctttccaatcatttgtaataaaattatacatatgtacaggatcccatattaaaaatgccagaaaacttaccgtatattcatgataaggaatggtttttatttcaacttcttcccgttcttttttaaattcccagtcatcgacagaaaccacttcacccgttgtgcgatcaattacttcccaccatctttttggatcatccaacgtattgacttttaactgctgtgtatgaaatccttccatcaatcttatgcatagtttttcacttcttgcagttacacgattgctgatcaggtattcctgttgaatctcttccggattttgctcggcccaggcattatcctttctggtcgtataatacgttgcatatttctttaccggctcattcaataacgcatccggcatctccgttccgtcacagtcacgcaatgcatctgctccaagaagatttttcaatcgtatagtttcctcgacaatgtctgcatcggtcggcaatgtcagtctgcctgtttgttttgtcattcccgtcttctcctttcttgtctcatcacctgatgtctttaagtatatctgtctgcatcaactgcttcaatttttatgttgctctaatttttatatatcttgctttatgctcaataaaatatttgcatttatcataaattactgtatacttgcaataagaaaccctatttaattgctattttattcatcagtttcacaacattattttagtaatattgcggttttaatctataagatataaaatttgatacaacaggaagataatacaaatgagtaatgaattaattaattttgagtacaaaggagtacccgatcctgattttaaacttcgttatatttctatttctaaatacgaaggggattggcaaagccaccctcacacccatcagttttctgaacttttctatgttatcagtggaaaaggtgtattttacattgaaaatgatacggtttctgtatgtgcagacgatctgataatcataaatccacatattgaacatacggaaaaaacgatgtcaaacgatcctatgacctatattgtatttggtgtagaagggctcgctttctattttaattcccaaaacgctgcaaacccaaaaggatacagctactataattatggttccgccaaaacacactttattaatttttcccagattatgataaaagagtttaatgcaagaaagccaggttttgaagcaatctgtcatggtctcctacaggttttgcttgtttatattacacgcgaacagcatctttctgtcatatctgataccactttgcaaatatcaaaggaatgttttgttgcgaaaaaatatattgatgctaattatgcaaaaaatattactttagatctgctcgctgaaatcacccatatcaacaaattttatttatcacattcttttacggagtatgttggaacatcccccatcaattacctgatggaagccagactcgctgcaagcaaagaactattgctcagctccagtcgctcgattgcagaagttgcatccagcacaggtttttcatcacagtcgtatttttcgcagatttttcgaaagaatacaggtatgtcacccctgcaataccgtaaactgaaacaaacagattcgaaacccatgcaggatgattcctattatatttgaaaattttatagaaacatatagacttaattgatcatttcatgcacaaaatgatacacattttctttattacgacaaaacaaaaaaatccgccaaagccccactgcatagaaatgcagtcccagtctttgacggattttcttattcattcattttcattttatttctggttaatatagttgaccagtccctcacagtcaataattttctgcatgaacggcgggaacgcctggccctgatatgaggtaccctttgtcacatctgtgatcacacctgtgtcaaaattaacttccacttcatcaccagcttcgatctcttttgccgcctgcggacattcaatgatcggaagtccgatattgatcgcattacggtaaaaaatacgtgcaaatgtctctgcaataacacagcttactccggctgcctttatagaaatcggagcatgctctctggatgaaccgcatccaaagtttttatttgccaccatgatatctccagctttgacatttttcacgaaatctttatcgatatcctccatacaatgcaatgccagttcctttggatcagaagaatttaagtatcttgccggaatgatgacgtcggtatctacgttgtctccgtatttgaatacatgaccttttgctgctttcatgtttactctcctttttcttaaacctatgctacttcatccggtccggaaagctttccggtgatcgcacttgcagccgctactgccgggctggcaagataaatctcagactccacatgtcccattcttcctacgaagttacggtttgtggtagaaacgcagcgctcatgctctgcaaggattcccatataaccgccaagacaaggtccgcaggtcggtgtgctcacgatcgcaccagcttcaataaagatcttcaacagcccttcttccatagcatcaagataaatctgctgtgttgcaggaataacgatcacacgcagtccctttgccacttttttgccttttaagatagaagctgccacacgcagatcatccattcttccatttgtacaggaaccgatcactacctggtcgatcttaatatcaccgacctcgtcgatcgtctttgtgttctccggaaggtgtgggaatgcaacggttggctttaaagtactaaggtcgatcgtataagtctcctcgtactctgcatcctcatctgcctcgtagacaacatatggacgtttggaatgtgcttccatatactcttttgcaagattatctaccgggaaaataccattttttccacctgcttcgatcgccatatttgcaatcgtaaaacgatcatccattgaaaggtaagaaatgccatctccaacaaattccattgatttgtagagtgcaccatccacaccgatcattccaatgatatgtaaaatgatatcttttccgctgatccattttgcaggtttgccggtcaggacaaatttgatcgctgcaggtactttaaaccatgcttttccggttgccataccagccgccatatcggtactgccgactccggtggaaaatgcacccagcgcaccgtaggtacaggtgtgggaatccgcaccgataatgacatcgcctgccacggtaagacctttctccggcagcagtgcatgctctattcccatctctcctacatcaaaataatttgtaatatcatgccggcaggcaaactctctgacgcatttgcaatgctgtgcagatttgatatctttatttggcacaaaatgatctaacacaagtgcgatcttatccttatcaaagacaccgtccaccttcattttatccatttcatgaatcgccaccggtgaagtaatgtcgttacctaaaaccagatccaaatctgcctcaataagctgtccggcactgactgatggaagtcctgcatgagctgcaaggattttctgtgtcatcgtcatccccatgggtatatcctcctaaaaaattaaaatctgtgtcaggaatggtgtgtgcccgttccttttttgtgtgatgtgtgtgtagaacaacactcgctgtcctatctgtatgttattctaacacaggtattactataataaaaatacataataaatatatttgccataactaaacttcatggtataataagaaaaattattgatgtatccagtatcagaaaggaattttatcatgaaccagaatttatcatcttaccggattttttataccgttgcaaataccggcaacatttcaaaggctgcaaaagaactctacatcagccagcctgccatcagtaaatccatccagaaattagaggaaggtgtcggctgcaagctgttttccagaagttcccgcggcgttgtcttaaccgatgagggaaaactgctctacgaccatgtgagcagcgcctttgagactttaaccctcggtgaggaaaaattaaaacgctccattgaactcggtgtcggccacttaaagatcggcgtcagcgcaaccctctgtaaatatctgctgctcccttatctgcaggagttcatacgccagaacccgcacgtctctatctccatcacctgccagtctacaaatgagacacttgagctgcttgaagacaataaaattgatatcggtctggtaggaaaaccggataatttaaaaaatatccattttgattttctcgaggagatcgaagatatctttgtctgcaccaaagactatctgcggaatttgcgcgcgcgcggcgtccacaaggatcagattctgacaaactcaacactgatgctgctcgataaaaacaatatgacacgccagtatatcgacgactatctttccgacaaccagattcaggtcaaagaatccatcgatatctccagcatggatcttctgatcgactttgcccgtatcggtgtcggtgttgcctgcgtcatcaaaagttttgtaaaagaggatctcgcctccggcgccttagtggagattccgcttggcatcccaatccataagcgtgaggtcggttttgcctataaaacaacgacaaaaccttccaaaacactcgccgaatttatccggttttataaaaacttttaatagatacaatataatagaatgcacgctccgcgaacattctattatcatgaactatacagccaggttggcaaagcgaattggcacaacaaactctactttttctcaaaactatacagccatattcgcaaagcgaattggcgcaacaaactttactttttctcaaaactatacagccaattcgcttttaagaagtaaatcaaaaagatcaccgaactgattgaccaggtcagcgggtacgcccagaagatgacctggattttcgggataaaatgcacggtaaccgtgatgtatgtaatccttatgatacaccaggatgcaagcatgacaaacatcggtactgtggattttcctgcaccgcgcataataccggcaatacagtgcgaaaatgccagaaagcaataaaaaaatgcttctatatgtgcctgtctggtcgcaaattcaacaacctgcgcttcattgttaaatgccgctgcaagctgcgggatcgcaaaaaatacgatcacaccgacaacttctgcaagcagtgtcgaacaggtaatgccaaaatacgcacctttttttgccctgtcatactgttttgcgccgagattctgcccgatgaacgttgtgagcgacattgcaaaacaggtgatcggcaaaaatgcaaatccttctattttcgaataaacaccacatcccgcaactgccatcacaccaaatttgttaatattcgtctgcacgatgatattggcaaatgaaatgatggagttctgcataccggacggcagtccgattccgatgatctgtcccaacattcccttatgaaaacggatctgtgagatctgtacctgatagacatctttggtgcgcatcagacggagcatacataaaaatgcgctggaaaactgcgagatgatcgtcgcaagtgccgcagcaccaacgccaaatcccagtaacccgacaaacaataaatccagtacgatatttacgatcgatgagaagatcagataataaagcggatgtctgctgtccccgaccgcctgcaagattcccatcacgatattatacatgacaaatgcgaccgatcccgcaaaatataccctgaaatatacaatggagtttggcagcaccgactccggcgttcccatcaaaacgagaatctggggtgccaatatcattccgaccgctgtcaggatacagccggacaccagaccaaatgcaatattggtatgtactgcttttttcaaaccttcataatccgccgcgccgaaatattttgagataacgactccggcaccgactgcgattccattgaaaaatccaaccatcagaaaaatcagactgccggaagaactgacggctgcaagtgcatcactgccaagaaaattaccgacgatcagggaatcggcggtattgtataactgctgaaacaggtttcctaagaagagagggattgcaaatgacacaatccccttccagatggaaccctctaataagtttgttccttttttcatcttatttcattacaatattgacaattcttcccggaacataaatctcttttacaatgtttccggtcagtttatctgcgatagattcttttgcctttgcaatcacatcctcttttgcatcatttctgccgattgccaatgttcctttcgtttttccgttaatctgtactgcgatctcaactgtgttttcgactgtttttgcctcgtcaaactccggccatttctgctgatatacataacctgttccgccgataatctgccagagttcctctgtaatgtgcggagcaaccgggtttaagagaattaagagtgtctcatactcaccctttgtcacagcatttttcttatagaactcattgatcagagccatcatcgctgcgattgcggtattgtatttcaggttctcataatcgctgctgacttttttgatcgtctggtgcatctttgtctcaagctctttggaatatccagtctcttctgtcatgatatcctgtaatttccatacacgctctaagaaacgacggcatcccttaacgccatcctcagaccaggatgcgcttaaatcaaatgctccgatgaacatctcataagttcttaaggtatctgcaccgtactctcttacgatatcatccggatttacgacatttcctctggattttgacatcttctcaccgttctcaccgaggatcataccgtgggaagtacgtttctggtaaggctccggacatggaactactttctcatcatagaggaatttgtgccagaatctggaatataacagatggagtgttgtatgctccataccaccgttgtaccagtctaccggcatccagtattttaatgcctccggactagccagtgcctcatcattgtgcggatcggtgtatcttaagaaataccaggaagatccagcccactgcggcatagtatctgtctctctctttgcagggcctccacagcaaggacaggtcgtatttacccagtctgtcatggctgcaagcggtgactctccgttgtcagtcggcatgtaactctctacctcaggaagcatcagtggcagctcgctctcatcgatcggcacatagccgcatttatcgcagtgaacaatcgggatcggctcaccccagtaacgctgacgggagaatacccagtctcttaatttatagttagtctttgcggtaccaatgcctttttcctctaagaatgcgatcatttttgcctttgcatcctttacttccagtccgtttaaaaactcagaattgatcagaacaccggttgcaacgtccgtaaatgctgcttcgttgatatcaacttcctcgccgttctttgcaacgacctgtaccattgggatattgaatttctttgcaaattcccagtctctctcatcatgtgccggtaccgccatgatcgcaccggttccgtaagacattaatacataatcggaaatccagatcgggatctcttttccggttaccggattgactgccataagaccgtcgatttccacaccagtcttgtcttttgcaagctcagaacgttcaaagtcagatttctttgcggcttcctcgcggtatgccgcgatggcatcccagttctttaattcatctttgtatttgtcaataatcggatgttccggggaaactaccatataagtagcaccaaataatgtatcgcagcgtgtcgtgtaaacacggagtttgtcctcttttccggcgatcgcaaagtctacctctgcaccctgtgatttaccgatccagtttttctgggaaaccttgacacgttcgatataatctacatcatttaatccctctaacagcttctcagcataatcggtgatctttaacatccactcgctctttaccttgcggacaaccggagcaccacagcgctcgcagacaccgtttacaacttcctcgtttgccaggcctactttacaggaagtacaccagttgatcggcatctcttttttgtaagcaagtcctgctttaaacagttttaagaaaatccactgtgtccatttgtaataactcggatctgtagtgttgatctctctgtcccagtcaaaagaatagcccaaagaatgaagctgctctttgaaacgctttacgttattctcggttacaatcttcggatggatcttatttttgatcgcatagttctcagtcggaagtccgaatgcatcccatcccatcggatacagtacgttatagccctgcattctgcgctttcttgctacgatatcaagtgctgtataaggtctcggatgacctacatgaagtccctgtcctgacggatatgggaattctaccagtgcataatattttggtttgctgtagtcgtctgtcgcagcaaaagccttattgtcatcccagactttctgccattttttctcaacgactttgtgattgtaaagttctgacatataatcctccttgtttttcgaagaaaaatgcgactgcccttgcaggagcagaggatttccctccttgttttgcggagcaaaatccgagtcctttgacgaggagaggattttcctccttgttttgcggagcaaaatccgagccctatggcgaggagaggattttcctccttgtttttgcgaaaaaaaactccgtctccgaagatatgcttttaaaattgcacatcctcttagagacgaagtctatcttactccgtggtaccactctaattcgtattcttttgatttcatttcccatctgtcaatatttaaaatccatctgctcatctgtcagatcaattttaacatgaaaacaagacaatacgctcttatgatccttaacgcggacaacacgcttttgcttacacactataaacctgactgatagcttgggcaaaaggactcaaaggcgagttgggaatttttctttactgtctcgcagcatccggcagctctctgaaaaataaaaaattcttactattccttatcaaagtctgatgtattttattcacaacatgatttattttatcatataccatggttttgtcaagtaccaaccgccctgccggaaacgtttcctccagctgtcataaaagtttttctgataccggttcacaagttcttaaggtaaaaaaagaaccatcatatgaaatgtaccacatgatgattctttcttttatctttccaacaataaatctatactctaaagtataatatccattgtctcattactcagctaaaaattagttgttgatcagtttgtcctcttcgttgttccagctgtacagtttacggatctctttaccaacctgctctgatggatgctctgcagctttctttctcatagccttgaagtgaacctgacgtcctgcaggagacatatcaagtaagaaatcttttgcaaatgtaccatcctggatatcggaaaggatctgtttcatcgctttctttgtatcctctgtgatgatcttcggtcctgtgatgtaatcaccatactctgctgtgttggagatagaatatctcattccctcgaaacctgactggtagattaagtctacaatcagtttcatctcatggatacactcgaagtatgcatttcttgggtcataaccagcttcgcataatgtctcaaaaccagcctgcattaatgcacaaacaccaccgcagagaactgcctgctctccgaaaaggtctgtctctgtctcggtacggaatgttgtctcaagaacaccagctcttgctccgccgataccaagtgcatatgctaatgcaagatcctgtgcttttcctgttgcatcctgctcaacagcgatcagacaaggtgttccttttccaacctgatactcagaacgtacggtatgtcccggagcttttggagcgatcatggtaacatctacatcctttggaggtacgatacatccgaaatgaatattgaaaccatgtgcgaacattaacatgttgcctgcctcaaggtttggctcgatatcttttttgtacatatctgcctgtttctcatcgttgattaagatcatgatgatgtcggctttctttgctgcctctgctgttgtatatacttcaaatccctgtttctcagcttttgcccaggatttgcttccctcataaagaccaatgataacatggcatcctgaatcttttaagtttaatgcatgtgcatgtccctgactgccgtagccgatgattgcgatcgtctttccgtctaacagtgaaaggttacagtcttcctgataaaatatttttgctgccataattaatttcctccagttttggtttcttaataaaaaatatgtatttgcatattcttatctgcttattttgttataatgatactcttttgccgtcttcgtctaacataacgacatcggaaatgcctctcgacaatccggtcagtccggttcgcgcaagttctaaaatctcatatccggacagaagatctaaaaatgcatccagcttgtcctgatggcctgtcaattcgatcaccatcgaatcgtgggttacatccacaacttttccatgaaagatctcggttacatttaagattggctgacgttctgtatctttcgcacgaatctttactaagatcagctctctcgtcacggatgaaccattttcaagttttttgatgtctacaacatcttccagcttcgcaagctgtttttcaatctgctctaagatctgttcatcgccggtcgcgacaatcgtaatccttgtatatctcggatctgcggtcacgccggaagaaaaactgtcaatgttgtaacctcttctgctgaaaagtcctgaaatatgacttgtcacgcccgggttattctccactaatagagataatacctgttttctcattctgcatctccaatagtttaatactttaatcacacatcacactaaagctatgatatcacatcgaaatattttgtcaataaacaatttttcatctgcccgaaatcatagtcgattttcagaaaaattttgcggtaataatccatatgaccgctgctgccacaaaccagatgccaatctgccgtatccttttttctgcattcagatcacctctctggtcttttctcgtgcacgcccccggcacaactgtcataagaagtcctgtcaaaagtaataccattcgaatcagtaacattttaagctccttcgtgtgggatcagatcatgatctccgtgttttccttgctcttttcaatgacatggttcagtttacggaacggtatcgcaataagaagtccaatgaccagcgaaacgaccagataaattgcaagttttccaacatagatccagtagttcatctgataaattccaccgattgtctctctcatggcattcattccatacgggaatggcagatatttataaagtgactggtatacctgcggtaatgtctcaatcgggaatgttccgcccgcaccggcaacctggataaccataacaacgattgcaagtgcctcaccgacatttccaaatgcaacggtaagcgagtaaataaacagcgtaaatacaaaactgctgactgctccggcaagccagaacaggaatggattatgacactgtatccgcacataaaacaaatctccaagcaccgtgatcagtgtctgtgtctgccctatcaggaaaaacaggatatagcgcccgaaatatgcctgatatggttttatatccgtgatgccctcttccggttctactttcacatgaataatcgcaaccagaatcagcgcacctacccacaatgccagaatcgtataaaacggagccatggcagagccataattttcaatctcataaattccgacagtgtcaagatttaccggagaagagatgaaactgcccagctgctgtggatctgtctctaatatctccataaactgttgatactgttcatcctgtctcaatgtggtgaaatccgcgatgatctgcgtcagtttattatataactcctgcgccatttctaaagaatcatataaatctgcacttccccttgagagcgtgtcctcgtattttgacagcaccttttccacatcgccaaaatccgcattgattccgtttaaaatcgatgtcgttgcgatcatggaattctgcattgcattcatcgtggaatcaagctgtggttttacggtatactcaaacatatgctgcagcgcatccagagccgtcttacaattttcaatctcggttgtaatctgtccttttaaggtattgatatcctccgctgtggcagttccgttttctgcaagtccgttcagttcaagttcaatcatctttaactggtcacgcacaccctggatctgcattcttgtctcgtcatctgctggcccctcccagcttgaaaccgagtcattaaacattttttccagataaggcactacggatattgtcgcattcagtccgtttcctgccgcatcttcgtattttcccagtttttccatgtcattttgtatcaccatggacacattattcaggctgttctcaaccagatcaaaactgtatgtaaccatctgggtaaccgtatccgtcgttgcatttccggcaagtatcagactttccatgctgtttatcgtgtcctgacctgtagaaaccatggaatcaagtcccggaagcatgacctggcttgttgcgacgatactctgtgcagaatttaaaatacttgcaaatgaatttaagatgttgatgtagctctgcagatcaccgcttacatcgtttaaccgctgcgtaattgtatccgcaagtgaacctccgtcaacatcgtttcccgcaactgcatccccgacctgcatcattgcctccgcaagtgtgctcacgaagcttgcattcacctgttcctgaacagacgttttggcttttgaggtaatcttcggcgctatcgcatttttcttttcattttcataataaataatatccgggtgttcgatctgtccaccaaggaagctgatcatctcctccgtaaaatcatccggaatcacaagagccgcataatattcaccgctgtatacaccatccaccgcctcgtcggatgtctcagtaaatacccatcccataaccttgttttcctgtaacgcttcaacaacggatgaaccgatattgacagaaatacccgccaccgttacaccttcatcttctgataccactgcaaccttcaggtttgaagtcgaactttcaccatacggatcccagtttgaaaatatattaaaccatgcatagaggcatggaatcacacaaagtcccatgataaccacaaccgcaaccacgttctggaaaatccgtttcacatcggagataaagattttaaatatatttttcattctgttttctcctttgtatcactctctgttattttgggtatctctgcctcggaattaaacttttcatctaatttctgaatggcattcttaatattttcctctacttcgtcaagctgttttcccataagaacatccacagctttatcctcttcatcccgcagttcgtttagcttctcctgcaggttataatctacatactctacaaggatcagataagttgcaagtgcaaataatgatacgatccataaaatcaggaaaaccaccttgttactgtctgtccagaataacaggatcaaaaatataggcggaatgatcgcaatacatttgagtccgatcttgatccgtttctgattctgcaaatggatattctgttcatatgcaacgagttttccatacatttcctcgtatctgcttttttcttccattcttctctctccaattctgctatctataaaaaagacttgcttttcacgctttgcttccgctacatcatttttgtatcttccattcgtttttccacaaagtgattcagtttcacaaacggaatacggattacaagtccgatcagaagtccaactaccgcaaagatcatcagttccgccagattcttcatataatcgcttccatacataccaccgatcgtctcacgcatggcattgatcgcatatgggaacgggaaaaatatgtagatattccggtaaactgccggtaaaagttcaattgggaacgttccgccggatcccgcaatctgaattaccatgatcacaaccgcaagtgccttacccacatcaccgaatgaaagggcaagtgaatagatcaatagtgtaaatgtaacgctggcaagcgatgccaccagccagaaccaccccggatataaaatctgacaatgcaggatatagatatctcctaatacaatgatcagtgcctgtaactgtcccatcacaaaaaacagcagatatcttccaaaaaagagctgataggattttacatttttcagatttttcggttctgccttcaccttgatcagcgcgacgagaatcgttcctccaacccagatcgcaagaatcgtgtaaaacggagtcattgccgagccatagtttggaatcggataaacctcctctgtcgtaaccagcaccggctgggagaaaaactcaccatatccttccggatcgcccttcatgaactccataaatgcctgtactttttcatcatcctcaaccgaatttaaccggtctaacagcttcgttaatttttcactcacaccatcgataaccgtctgaatctgttctaaactgtcatttgctcctgtagcggtcgtctcaatgccggaaaatacagaactcatatctcctaacgtgtcatctagtcttgtcagaatatctgatacattgttcaacatctgactcatgctgtcgatcacattatctaactgtggaaccaggcttgtcgtatacatttcctgcatatttgtgattgcctgtgaacaggtggtgagaacctgcgtcatatccgacaacgatttgttgattgcatccgcaaccatactgcccgatacctgtgtattgattgtatccgtctgggaatctccggagaatcccattgcgatctgattaatgctgctgatcgctttttcaatatctgttgccccgccattgatcgattcaatcgtctcaatgattttctgaatgacggtacggtctgcatccgacacgctatcttcaacgaccactttttttaaatgttcctgcaaacggttcagttcccgctgcagttccactgcatccagtgctgcctgattcagactgtctgccgtctgctgtgcatccccggcaagattcgtcgcattgatactcccctgaattttattcatagaatcattgatgcttgtcatggtctggttcacattttcactgaatgattttaaggatgtctttgtatcatccaggctgcttctcgccgtaccaaaactctttgcaccgtcggataccttgtcactgagtcccgggatgctgcctttcgcctctgcaactgcctgggaaagttccgaatttccggcaatgaacgtatcgatcattttactgtaaccgatcagattttcattcagattttccagtttattctgaaaataagcaaacttatcgttctcttccatctgttcggaaatatgatttgtctgctcaaatatattgcttgtaagtacttctatgaactgctcattgatgctctgttttaaggtggacaccgcagaatccgtaatctttgtcgccacggcattctttttttcattttcataataagagatggtcggtcccttaaaatcttcacgaaatacattatacatactgtatgtaaagtcagagctgatgatgaccgctgcataatattcgccgctgtatacaccctctaaagccgcatcttttgtatctgtaaacacccatccgatcttatcattttccttcaaactctcaatgaccgaatcgcccatattaacagtagttccgtcatccatctggtaacctgtatcctctgtggctactgcaatcttgatatttttggtatttgcgtacggatcccagtttgagtatatattaaaccacgcatacaacgaaggtatgatacaaagaccgatcgcgatcaccagcgcaaaaggattccgcaccagtctcttcatatctccgctaaaaatacgccatatatttttcatgcctcacaagctccttaactcatccatattctttcatagagcaaaagtccctattatcggggagattataccatccgaaatattgattgtcaaatttacccagctgtccttttcactctgtatccccaaatatttcgccatccatttcaaaaatatactgcatgtgaacttccgttccatcctcaaataaaagtctgcgcagataagtatctattttccgtatcctgccacgatgcgtaacataagccccaccggctttcttttcatccggcacaaaataagtaaccataatctccggcttttccgaaaaatattcctgtaaaacatgcattttttcatcaagctgttcttttttgtcctcatcgagttctaagaatgcttctgttcgtcttgccgtctcacggatagagtcctcatgccctgtaagtgctgcgaaaggcgaaaactgtgcagccctgtctgataacgccatctgcggatgttttgttgagacatgatgtggcagatggatgatatcatcatatttatgtgtttctttttcctgaaatatatttttccctttcatgctttatgccctccgatctgccggttacgctccacactggtagccccctcctgcagattcatcccctttagcatggcatttttcccatatttctttttcacactgaggactgcctcctgcagttttctctctttttccttctttaccttttctgcctgctttttctgttctaatgccgcataatccgtaaacagatcaagctgttcaaacgtatcttcctgttttgccgatgattcatccgataacctgcaggctaccacatagatccggcggatcagaagattcggatttacaatacggtcatacaactccatcactgcatccatgatctgtttcgtggaggatgtctggtttttcagattgatcgttccgtgtgcgtgttttggcacccttcttccatagcggtcaatggtcacttccccgtgatacgcatttctccgttttggatccgtcaggttatcaatatcatagccgatcgtaagcaccatctgatctgtgactaagtgcttttccaccagatccagcacaagcagatctgtcatttcccggacgatcagttttcctttttcaaactcataaggacactgcagcacctgcccggaactgatgctgtttgtctccggcttgtacgctttgatcaggtcaatcgtggtcggttcatatccccacgcgtggtcaatcaaaagttctgcattaataccaaacattttataaagaaaatcttcattataaaaatcctgttcaccgcctaaggaacagcgtgcaatatcccccatcgtatacagtcctgccgcctctagttttttccggtaaccaccaccgactctccagaaatccgtcagtggtctgtgatcccacagcagtctgcgataactcatttcgtcaagttctgcgatccgcacgccgtttgcatccggcgttacatgtttggcaacgatatccattgcaaccttacacaggtacagattcgtgccgatgccggcggttgctgtaacccctgtttcttttaaaacatcccggatcattttctctgccagttctctcgcactcatctgatatgttttcagataatgtgttacatccataaatacttcatccaccgaatacacatgcatatcttccggtgccacatattttaaatagatgtcatagatttggttacttttctccatataaagagccatgcgcggcggcgctgcaatataggtcagttccagtgtcggatcttttttcagttcttccgcatttgctgattttccggtaaacacacctccggcgatcctgcttctccgttctttattaatctgctttactttctgcacgacctcaaataacctcgcacgccccggaattccatatgctttcagtgacggtgatactgcaagacagattgttttctctgttctgctctcatctgcgacgacaagatttgtcgtcagcggatcgcattcccgttcgacacattctactgatgcataaaaagatttgagatcgattgcaatatagatatgggatgaatcactcatgaccggatgatgcctcgctttctgtttttctggtatagatattattatagcagaaaatatgttcgattatcaccctgtttttgaaaaataaaaatattttcttcctgtattcccttttcaaaatactcttctgctaatatatttgttttccatactttgcaatatcctccaaaaggtactgatttcgaatttcaaataaatttatacaaaaaaagaaacgggattcttgcaaatacaaaaatcccgtttctttctatgctttaaatttatcttagaacttaccagccttatgagcttcctctacagaaactgcaacagcaactgtagcaccaaccatagggttgttacccattccgatcagacccatcatctcaacgtgagccggtacggaagaagaacctgcgaactgtgcatcagagtgcatacgtcccatggtatctgtcataccgtaggaagcaggacctgctgccatgttgtccgggtgaagtgtacgtcctgtaccaccgccggaagcaactgagaaatatttcttaccctgctcgatacattcttttttgtatgtacctgcaaccggatgctggaaacgtgttgggtttgtagagttaccagtgatggaaacacctacgttctcatgatgcatgattgcaacaccttcctgaacgtcatctgcaccgtagcattttacagttgcgcgaagtccgttggaatatgctttctcatatacaacatttaattttgcagctttgtaatcatactgtgtctcaacaaatgtgaatccgttgatacgggagataatctgtgcagcatcttttccaagtccgtttaagataacacgtaatggtttctgacgtactttgtttgctttctcagcgataccgattgcaccctcagctgctgcgaatgactcatgtcctgctaagaagcagaagcactctgtctcttcctctaataacattttaccaaggttaccatgtcctaaacctacttttctgtggtctgcaacagaacccggaatacagaatgcctgaagtccctcaccgattgctgcagcagcatcagcagctcttgtacatccttttttgattgcgattgcagcacctacagtgtaagcccagcaagcgttctcgaaacagattggctggattttctttacctgatcgtaaacatcaagtccagcatcttttgtaattttttcagcttcttcgatagagctgataccatagctgtttaacacagcgttgatctggtcaattcttctttcatatccttcaaataatgccattttcgtccgtctcctttcctactcttctctcgggtcgatgattttaacagcatctgccacacggccgtactgtccttttgctttttcccatgcagtgttaggatcatcgccttttttgatgaagtcagtcatttttccaagagaaacgaactgatatccgataacttcgttattctcgtcaagagcaataccggttacataaccttctgccatctctaagtaacgaacacctttctctttggtagcgtacattgtaccaacctgggaacgaagtcctttacctaaatcctcaagaccagcaccgattgcaagaccgtcatcagagaatgcactctgtgtacgaccgtaaacgatctgtaagaataactctctcattgctgtattgattgcatcacaaacaaggtctgtgtttaatgcttcaagaatagttttgccctgtaatacctctgctgccatagctgcggaatgtgtcataccagagcatccgattgtctcaactaaagcttcttcgattacaccattttttacatttaatgaaagcttgcaggcaccctgctgaggagcacaccagccaacaccgtgtgtaaaacctgaaatatcttcaatttttttagaatgaacccatttgccttcttccggaattggagctggttcatgttttgcgccctttgctacaggacacatgttttcgacttccttagtgtaaatcattttaagactcctttcacttaatagaactgtatgtatcagactttgttatacatttaacataccttacctattttcgcacattttgttgaaatctacaagtcctaatcgaaaaaaattatctttattccgtgtatttgtttttatacactaatcaaaataattcaattctgaaaaaacttccgaccccagtctgccggcgttgctgatattttccccatccacatgaatatatccttttgttccgtctttggcacgaacatagatccattcctttgcatcggaactgataaagaatacatcctgaccggatgaaaccgtcacctggtctgatgtctgatccatagcctcccacagtgggagatccacatacagcctgtgcggtgtaaaatactgatacctgtgcattccggtatccatatactctaatttccccgcatcactgtcataccaccagtagccatttaagtatgctgtctcaagaatatctgtacgaattgttccatagattccgctttgtccggtaaagccgttgataccgccatttttttctttaaaaggaaaaccagtaacttctccggcaaattcgagtgtgtttccatcataccggtaaaaatatgtcacataatcaccactcggcccatcatctaagacagcaatctctaacgaatcatcataagcattaatatcagtgacataaaagcaatctgtttccggtgtcaccatcgccgcatattcgcacagttcatatgaagttccattcacggtaaggatacaggaataccctgcataatcgccactctctttcacatcataacgtatttcttcttccctgccgtctccatcaatatcttccataactttctgtcctgttttatactctttcggatatggatattcgtctgcatatgttttttctgcttcctgtatcactttcagattatctttctctgtctggcttaacacagactcgtcaaatgcatctgtctccgccgttttttcataccaggaacatgcattaaaataactctgcagatattcattggtaaaaccccgtccatgtcttgcatagatttcattgcgtgctaaccataaatcattgtccgacatattgataagactgtctgccgaaattgtctgtgtcatactgaccggaatgatatactggtcagcatctttgtgcaggttctgtgtatcaatgaccgcattctgtactaccgtatctgactgctgcatcatcccttgatattcatttaaagtatcctcattttccacatcgcagctcacatccgtaggcctcacaacctcatataacactccatcatcggtatatcctaaaatacttacaccggcagcatccggataccattccgtgtc

SEQ ID NO: 5120 - DNA, 102717 bp, Unknown
  gut microbiota DNA sequence
gttaccacggcagagggaacgctgacgctgaagggactgtttatcccgttgtttattgaacagcttttgatgaatatgaccggtacggtcaatacgctgatgcttgggcactatgcggatgatgcggtcgcggcagtcggtgcggcaaaccaggtgatcggatttttgtacacgttttatgcggtattcagcggcggcgcatcggtcgtcatcagccacagactgggggcgggagatgaaaaaagggcgtcggatgcagcgtttacctccatcgtgtgcggaggtgcaatcagcctgatcttaggaacgatactggcattttttgcaggtgcagtcatgcgtccgatgcagttagaaacatcggtgtatgagatggcggtggtatattttcgcatctgtatcggcttttccgtactgcagggcattatttctgctatctccgcggtactgcgcagttatggaaaaccgaaacttgcagtgacggtatctttgtttatgaatatcgtgaatgcagtgttaaattacgttgtgattttccagccggtgaaaattgtgccggagggcgtggaaggtatcgcaatggcaaacgtggcaagccatgggacggcgcttttacttggcgtctggtttctgttccattgcggactgcatcttgattttgcatcgaaaaatttaaagacattatcctgcgtgggtggaatcttaaagatcggactgccgggagggatcagttccctgtcgtattccttttcacagatcgtgtcaacatcgatcttagcagtgcttggaacagcggcgctcaccgcaaagatctatgtttcatccatcgtgttttatgtctatgtgaccggaatgtcactcgggctttccaccgcgatcctgatgggatggatgacgggtgcaaaggagtatgaaaaggcataccggctgaaccagcaggtgttaaaaatcgcggtcagcttaaatatcgtgctttcggttctgatctttctctgccatagaccgttgatgcatttatttacgcagagtgaggagatcatcgggatgacgggagtgatcttttttatcgatatttttgtggagatcgggcgcgcatttaaccatgttgaggacaattcactccggggagcgggggatgtgttcttcccgatggtcatcgccgtgatctcctgctggggcgtcagcattttgtttgcatatctgcttgggatacgccttgggatgggactggcaggatgctggatcgcgttcatgctcgatgagatgttccgcggaagtatcttttttatccgtttccgctcacgaaaatggacgaaaaaaagaatctgaccctatattgacaaacctgcaaaatcccgataaaattaacttgaaaacgttttcaaatatgacttttaagggggatggccgatgggcagtgagttaaatatttataaaattgcacaggaagcgggagtttcaccggcaacagtgtcgagagtcatgacaaaaaatgcgagggtgagcgaggaaaagagagcgcgtgtggaagcagtgatccgcaaatatgattacaggccaaacgcgcttgcgcagggactgatcaagacgaaaacgaacgtcatcggtgtgcttgctgcagatctggtcaatccttattattcatccatggtggaaaactgtgagaaggagatcattgcgcgcgggtatgtgccaatgatctgcggaacattaagcaatccggatcttgaggtggaatatattcagaaaatgtttgacatgcgtatggatgcgatcatcattatcgggggaaaatcagacagccttgtcacggagccggaatacgcagatctgatcaaccgtgtcgctgaatccatcccggtcatcacaacaggaaaagtggagggcggtgagtgctgccaggtcacaatcgacgaggcagagggtatgaaccagagcatggagtgtctgatcggtttaggacatagaaggatcgcactgatcggcggagtcgaggagatgaaatccacttacgataagcgcatccgctaccgcagtctgctgcgaaagaacggtctgacctaccgtgagcgctatgtgatcaattctgattattcgatcgagggcggttatcagggatttgaggcactctttcagggaaataagacacttcccacggcggtgatcgcgatcaacgactacagtgcagtgggtgtgatgcgctccatcaaagagcatggatttaggatcccggaggatatttctctcatcagttttgataatacgtttattgtagataccgtcataccaaggctgagcagtatttcctatgattatgaagcatttggaaagcttttggttgacaccgcattagataagattggcggaaaagaagtaccggaggtacagaaagtaacaccgactctgatcatcagagaatccgtagcggagttaaaacggtaaaatccgttagaatgacggaaaaataaaataaatgtgaaataaatatgtacaaaaagtaaaataacctgttgacaactcataatatgtattgtaatataacaatatgaaaagggtttcaaattaaaaagcactataaaatacacaactggtgtaaaagccggctgcatggatggtgtttacgcagcgaaggtgtaagataagtgcgggaaacatgcaaaaaagaagatataaaggcgtttctgacacttaagatcaaaaaatattacaccttatggaagatggcagacagttttgtgaaaaatataagtgctttgtttttacaaggttttgaaatcggtttcaagaaaacgttggagaggggaaaatatatgaaaaaggagaacggtgttacaaaacaggttggcaaaaaactaaacttctggcagaaactctggaagtaccgtgtactgacactgatgtgtgtcccggcaatgatttttttctttgcatttaactatatgccattgccaggaatctatgttgcgtttgttaaatacaattaccgcgatggtatttttggtagcaaatttgtagggttacagaattttgagttcctctgggaatcaggaaaacttttatcactgacgaaaaatacaattttatataatctggcatttatccttcttggaaatttacttgcggtcgtggtagcgatccttttaaatgaaatgagatgtaaatggttcaagaaagtatcacagacgatgatgtttcttccatatttcatttcacaggttttagtcggatttctggtatttaacttattaaattatgataccggatttgtaaatgagatccttactagacttggaatggaaaaatggggaccttacagtgatccacatgtatggccggtacttttggttatcatttatctgtggcagcagacaggttacaactccgttgtatattttgcatctatctgcggaattgacgcagagatgatagaggcatccaaggtcgatggagcaaatgcatttcagaggattcgttacatattgctcccgagtttaaaacctaccgtgatcatcctgttactgtttgcattgggcggcatcgtaaaaggtaatttcggattgttctacaatatcattggtacgaactccttattatatgacacgacagatattattgagacgtttgtttacagggctacgatgacagattttaacttctcgacagcgtcggcagtcggtctgtatcagtcagtcgttggttttgtgatcgttatgatcgtaaactatgtggttaagaaaattgaaccggattattccctgttttaatatctatggaggtcgactatgaagaaaaataacagcaataaagtaaaacttggagcttctgataagattgtgcggggatttggatatgtagtgattacaatctatgcactggcatgtatatttccattcctgttgattcttggaagttcatttacggcagaagaagtgatccgtacggaaggtgtacagttgattccgaaacagtttacactggcagcttatgagatggtctgcaagggcggtggtatctggaaatcctatctgctcacgatcatcctgacggtggtcggtacggcggtcggactgacaatcatagcaatgacaggttatgcactgcagagaaaagatttcccgttccgcaacggaatttccttctacatatattttacaagcctgttttccgcaggacttgcaccgtactatcttctgatgacacagacttaccacttaaaggacagctattttgcagttttattaccgcttatgatgtcgccgtggctgatcatcatgatgaaaaactttgtgaaggcgatcccgcatgagattacagagtccggcaagatcgacggcgccggggatatgaagatctttgtttccctgatcctgccaatgttaaaaccggcacttgcgacgatcggattattccttgcactgggatactggaatgaatggtatcagtcctctctcttcttaagctcgaaagtggatgtaaaaccgttacagtatacattatatgaagttgtaaataaaatggatcagcttaaaaactccattgcaggacagtatatatcattggcagatattccgacagagggaatcaagatggcaaatgcgattcttgcaaccggaccgatcattttcctgtatccattcgttcagaaatattttatcagcggtattaccgttggagccgtaaaaggctgatcgatacgattatcgctctgcatggggcagagtcataataaaagcagttttgtcttagaaaaagacagatctgctgcaaaaataaatcatatggagggtatggtatgaagaaaagatttaagagacttggggcaatgttactcgcaggtacaatgttacttggcgccacagcctgtggcggaggaagcaattcttccacaacaggaaatgcagcaaaatcggaagacagtgcatccactacggaaacagggggaacgacaagtagtggtgacattgacacatccgaacatgtagtgatcacttatatggtgaccggtgataaaccggatggtaagagcgcagagcgtctcgatgagatgatggaaaaactgaatgcgatcctgaccgaaaaagtaaatgcagaacttgagatttattacatcggatggacagattatctctccaactacaatctgacactggcacagatggatggttctgtcgaccttgtcggaactgcttctgactggctcgatgcctggccaaacgcaaagaacggagcattcttagagctttccgaggatatgttaaagacctacgcaccaaaaacatgggagagcgtaagccaggatcactgggatctgtgtaaatataacggctcaatctatctgatcccggaggataattacgcacagtggaccaaccatggattcatctatcgtcttgactgggcaaaagaagcaggactgacagatggtgtcaagagctgggaagaccttacaacttactttaaatatgtaaaagaagcatatccggatgtgattccatgggattctgacggtacacagtatgcacagatggcaaacggctggatcacctcccacagcaattttgttgcaatcgacggtgtctgttccggcgcattatggggcggtacaaaagatgacctttacacgatcacaacacctgcatacacagacacagatatgatggttgagtatgcaaaattaatgaaagaatgggataacatcggcgtatggaagacagatgtattaaacaatactgcttcctcaaaccgtgatgattaccgtatcggtcgtgttgcagcagagcagcaccacacacagacctggacagatctttgcagtgcaactccgtcaaatacgatttatcaggatgatccggatgcagagtcaggtttcttctacttcggagaagagaccggaaacgtggtagcactttccatcacacacggtgcaatggcagtttccgcagcaagcaagaacccggaaagagcactgatggtatatgatttattaagaaatgacgaagaatgctatagattactctgctatggtattgaaggcgtatcttacgaaatcaacgatgagggactccgcacaactccggagggatacaactcagatacagacaacatcaacggtatgaccaactggtggtggggacgtaacgacgatcttgagatcagagatgctacaagaaactgggatgcaattgacaaactttacagcgagtatgattccttaaagatcgattatccgtatggacagtttgtaccggaagttgatgatatccagtctaagatcgataacatcaacgaagtatataccaactatacaaaacagatctcttatggtaaatatcagggaactgcggaggagatcgttgcagagatgcagtcagcattaaaacaggctggtattgaagaagtaaccgcagcactgcaggaacagtttgatgcattatacaaataggtatacaataaaggcatgatgtgccgctattgaacagaaggtgttgattctaagaaataggggatcaacaccttttgttataggaaagaactgatacaaaaggaacattttgtgaaaaagaggagagatggcatgggcaattttgagatcacagacaatttttatctggatggaaaaccgtttcagatcatatcgggtgcaattcattatttcagaatcgttccggaatactggcaggacagacttgaaaaattaaaggcaatgggatgcaatacagtggagacatatatcccgtggaacatgcatgaaccgaaaaaaggtgaattccactttgaggggatgcttgacatagaacgatttgtaaaaacggcgcaggaacttgggttatatgtgattttaagaccgtcgccgtacatttgtgcggagtgggaatttggcggactgccggcgtggctgttagcggaagatggaatgaaactgcgcgtttcctatccgccgtttttaaaacatgtgcaggattactatgatgtattattgaaaaaaatcgtgccgtatcagatcaattacggcgggccggtcattttgatgcaggtcgaaaatgaatacggatattatgcaaacgacagggaatatctgcttgcaatgagagataaaatgcaaaaaggcggtgtcgttgtcccgcttgttacctcggacggaccgtttgaagaaaacttaaacgggggtcatttagaaggcgcgctgccgaccggaaattttggatctaagaccgaggagcgctttgaagtcctgaaaaaatatacggatggcggaccactcatgtgtacggagttctgggtaggctggttcgatcactggggaaatggcggtcatatgaccggcaatctggaggagagcgtcaaggacctcgacaaaatgttagaacttggtcatgtcaatatttacatgtttgagggcggtacgaattttggatttatgaacggctcgaactactatgatgagctgaccccggatgtgacgtcgtatgattatgatgcgctattgacggaggacggacagatcacggaaaaataccgcagataccgcgacgtcattgcaaaatacagagagataccggaagttacatttacgaccgagatcaaaagaaaggcatatggaacactgccagtaaaagaaaaggtaagcctgttttcagtgctggatgacctcagtgctccggtggagagcagttttccgcagagcatggaaaaactggggcagaattacggctatattttatatcattccacattagatacggaggagaaactcgaaaaactccgcctgtgggaggcaaacgaccgtgccaatatttttgtggatcaaaaaccggtcacaacactttacgatctggaacttttaaaagaaaaagagctggatgtcacgtttgaaaggggagctgattttgatatcctgatggaaaatatggggcgtgtcaatttcggaccgcgcatggagcaccagagaaaaggcatcggtcagtgcgtgcaggtcaacggacatatgcataaccactggaaacagtacacgctgccgctcgacaatatcgaaaaagttgacttttccaaagaatacaaagaaggactgccgggtttttaccgtttcacggtggatatcgatgagacggcagatacattcctggattttgagggatggggaaagggctgtgtctttgtcaacggatttaatatcggaagattctgggagatcggaccacagaaaagactctatatcccggcgccgctgctgaaaaagggcgaaaacgagatcatcgtatttgagacggagggaaagacccgcgatacgatcgtgttgaaggatgagccggatattggctgagtgtccacgaaaataaaaatcaagtaatatgaatggagcagggtatggcaggatatttatttgtacattttaccggggaacagaaggacggcgagcagatctatttttccgtgagccgggacggactgcactggacggatctaaacaatggaaaaccggtactgtattcacatatcggtgagtgcggtgtgcgcgatccgtttccggtaaaaaatccgatgaacggacgttattatctgatcgcaaccgatcttcggatcgaaaagggtgaaggctggcaggcagcgcaggagcgcggcagcagagatatcattatctgggaatcagaagatcttgtgcactgggaaaaggagcgttcccatacagtcggcatccgtgaggctggctgtgtctgggcgccggaggctgtgtttgacgaggaagaacaggcatttttagtcttttttgcatccaaagtaaaatgtgatggggaagagactgcaaaacaccgtatctatgccgcttatacaaaggattttgtcacattttcggacacatttttatacgtggaacgtgagcgggatgtgatcgataccacgattttaaggagtaacggaaaatattaccggatctcaaaggatgagaccgacagcaggctgatcttagaggaggcagacagtctccgcggggattttaagcggatcgcctgtccggtttttgaaaaattaaaaggcgtggaaggcccggagggctatcttttgccggatggcaggagctggtgtgtgatcgcagaccagtttgccgagggaaaaggatatctgccgatgatcacggaaaatctgtcatcgggtgatttcacgattttggaaaaagaaaaatatgatcttggcaggacgaaaaaaagacacggcggggtgttggaattaagtgacgcagagtatgagagattaattaaggcagaaatggaggggtaacatgttatatccacaggaaaataagattcgtgggatcattgatttaaacggagtgtgggattttgcacttgggacaacggaggaaccgggggatgcggtgacattgccggagcagatggagccaatcgcagttccggcatcttacaatgatcagaaagatgatattgtttaccggaatcattacggttatgcgtattaccggagaaatattacagtgccttcttattacaagggacagagactggtgcttcgctttgacgcagtaacacattttgcaaaaatttatctgaatggggtattgctcacacagcataaaggaggatttcttccatttgaagtggatatcactgacaaattatgtgcaggggagagtgcagaactggtcgttgctgtggataaccgcattaatcacagcacacttccggttggaaatgaggagggaacctcatttatgggagcagacaatgcaggagtgccgggagttgaagctgcaaaacgctggagaaaaccacagaatcttcctaattttgatttctttaattatgcagggatcaaccgtccggtcagaatttatacgacaccgaaggcgtatatcaaagatgtaacgcttgtgacagatatccgtggaacagatggcattgtgaattatcaggttaagacttcagatacagatggacaggaagttgtactgcagatcttagatgccaatggaaatgaagtggcacaggcaaaaggcacttccggggagatcgtgataccggatgcaaaactgtgggagccatatccgggaacaccgtatctgtatacggcagcagtcacgttcggtgatgattattatgaggagccgtttggcgtgcgtacggtgcgcgtggaggggacttcgtttctgatcaatggaaaaccgttttatttcaaagggtttggaaaacatgaggattcggcatttcatggacggggtatggatgtctgtctggatgttaaagatgtcaatttgattcactggctgcatgcaaattctttccgtaccagccattatccatatgcggaagaaatgtaccgcctgtgcgaccgtgaaggaatcgtgatcatcgacgaggttccggcagtcgggatcggtgccggagcaggaatcaatccttatgagacatttcctatccgtgaacaccatgaacaggtcattaaggacatgatcgcgcgtgacaaaaaccatccatgcgttgtcatgtggtcacttggaaatgaacctgatacggagaatttcccggagtcagcatacgagtattggcattcactctacgagctggcacatgagacagacccgtctgaccgtccagtcactttagtctgctgtcagaacaattatgaaaaagacattgtcacaagaagcatggatgtcgtctgcattaaccgttactatggatggtacaacctgtccggagatcttgatgctgcctgctatggactgaacctggaactggatttctgggaaaaacagaataaacctgtcatgattaccgagtacggtgccgatgctgtagccggcatccatgagtgtgtgccggaaatgttttcggaggaattccaggtggaattttataagagacagaatgcgcagtttgataagagaaaattctttatcggggaacatgtctggaactttgcggactttgcgactgtgcagggatgcatgagagtcgatggtaataaaaagggactgtttacgagagagcgcagaccgaaaatggcggcgcattactttaaagagagatggggagagatacctaattttgagtataagggttaggtggtaaagcacaaagcgggagccacaaactaaaggagaaatcatgtcaaaaaatattcgtgaaatcaacatcaaccagataaaaatccacgacccattctggtctgccatgcagcaccgcatgacagacaccgtcattccgtttcaggagaaagtattaaatgatgaagtgccaggcgtggaaaaaagccatgccattgaaaattttcgtattgccgcaggtttaagcgaaggagaattttacggtatggtctttcaggacagtgacgtcgcaaaatggttagagggtgtcgcctattcgcttgcggtaaagccggacaatgagttggaagcgcgtgcggatgagatcattgacatcatcgaaaaggcacagcagccggatggctatcttgataccttttttattgtaaaagaaccggaacaccgctggcagaatttgcaggagtgccatgaactttattgtgccggacatatgatggaggcaggagtcgcctactatcagacaaccggaaaagacaaactgcttcatgtggtggagcgtcttgctgaccatattatttccatgttcggggaagataaagagccggggattccggggcaccaggaagttgagatcggactgatgaaactttaccgtgcgaccggaaaagagaaatataaggatatggcacggtattttttggaagagcgcggaaaaaatccaaattacttttacgaggaaaagaaaaaaagaggctggcagcactgggggcagtacagcttagagccgttagatcagagatatacgcagacacatgccacgatctatgagcagaaagaggcggttgggcacagtgtgcgtgccgtttatatgtacacggcgatggcagaccttgccggggaagataaagatcagagactttatgaggcgtgtcagactctgtgggataatattgtaaagaaaagaatgtacatcaccggcggcatcggttctacggttgagggcgaggcatttacgattgactatgatctgccaaacgatatggcatatgcagagacctgtgcttcgatcggaatgatattttttgcgaagagaatgttggagatcaggccgcttggaatttatgcggatatcatggagcgggaattttacaatggaaccatcagtggtatccagttagacggaaaacagtttttctatgtcaatccgcttgagaccaatccgggaacttccggcacgatcttcggttacaaacatgtgctgccgacccgtccgggctggtatgcttgcgcatgctgtcctccaaacctggtacgtcttgtgacttcgcttggcacctatgcgtggagcgagagtgatacgacactctattcccatctttttttgggacagacagcagattttgaaaaagcggttgtcaaggtagacagcagttacccgtgggagggaaaagtaacctatcaggtaaaggcgaagatgaaagacgcatttgaactggcaatccacattccgtcccatatccgcatggatacactttgcgtgacagtcaatggagaaaagacagatgcagcatcctgcataaaagacggatatctttatctgaagcaaaactggggagaaaatgatgtgattgagcttacatttgatcttccggtacgcaaaatttatgcaaacacaaacgtgcgtgaagatgaaggctgtgtcgccctgatgcgtggtccggttgtttactgttttgagggagttgacaatggcgaatgtattcaggcgctacggattccaagagagatcaaagcggagacagaactttgcagggaaggtgtattagaaggaaatgtattgatccatctgccgggataccggatggagagcagtgatgcactttactccgaggaacgcccgaagcggacagatgtgacgctgaccgcaattccttattatgcgtgggcgaaccggggagaaaaccagatgcgtgtctggatgccggaggagtgatctttccgactagttttctacacgaaataccagacatccgtgtgctggcggtgtgacagaaatggcactgccggatacggatgttttttctttgctccaaagttccgtcaggctggcatctttgtgggcacagggttcatcgccgacatggagcgtttcgatgtcacagtggatcgtctgtgtctcatccgataggttgaagaaggcggcaaagtgttcaccggtaactgcattgtgtgcacaccagatggctttttcatcgtcaagacatacctgatgcggcttgcagtccggggttaacatggacagcacatcgcggttcgtaagaagggcaagtgtggcgtcatctaactttgtcagttcacagccaagcatcagaggggaaccgaagagacaccagagcgttaacatggtatgctgttcctccggtgtaaaattagtgtaccattcatgaccgaatccttttccaagccagccgagcggaagcatatcgcagtccgggtaacatccttttgccacatggttctgccagagctcacagcggtggaacatatcttttaacagatcccatttatcccagaaatcatcggtgatacgccacatatttgcataagtctcatagtgccatgcgtgttcgatcagtgcaggtcccggagaaagggataaaacgatcggcctgccacagcgtgcgatcgcctttgcgagcatttctatctcatggcgtgcagaataaggattggccggatagatattggtattgcagatatcatcgcacttgatgaaatcaacaccccaggaagcataaagttccatcagggaatcatagtaagcctgtcctgcctccgtatcgcggacaccgtacatatccgggttccatccacagatggaggaaggatttgcgaccatatcggcagtcacgttgctgcccttgatcttacaatggttatgcgcagcagttcttgggattccgcgcatgatatggataccgaattttaaaccgagactgtggatatagtcagcaaggtgggtaaaaccggttccgtccgcagaagatggaaaacgtgccggatccggctgcagtcttgaaaattcatccatggcaacatccgcaaacgggatatactggaactgatcgcgcatggaaccggcaccgatcgcgtaccattcgatatcaacgatgatatattcccatccgaactcctttaaatgtgcagccatgtaatctgcatttgctttcacggcattttctgtcaccgtggtgtcatagtaatcgtagctgttccaacccataggcggcagcggtgcaaaattatttttgttcataaaaaccctccagaattgatttcctaagccgattatactatatagaaattacaatacaatacgcattgcatttcttttcacatttttttataatgaaaataatgttggaaccgttatttgattctgacattattaaaatcagaatgacaaaagacatatcacgataataagaaaaataagaggaataatcatgtccgaaaagaaaaaagtaaagataaacggttttgtttttacggatgaagcggaagcagagcaggcgaaaaaggaagcacatgggattcattatgtggaagaacgcgcagatatgcatcatccggaaacggtgcttgaaatatataataaaatggtgaagcaggagctgtttgaaacagcggttggatttacatacttaaaagaactacaggaatatctgattcagaatccgtccattaataacagtgatattcttccgatttccgtgacacatccggtgttagaggagagcctccggaaaaaattaaggatttctgcaaaaaacagggcgagcgaaaagaaggcgtcaaaaaaaacggatggataccgcaaaaaatatgagatcacgttatttatatctgtgatactggcagtcagcgtgatcggaatgtttatcgttgcatcgacgagcgacagtccgacgatcatcaattacgaaaataagctgattgataaatatgcggcgtgggagcaggaacttgatgagagggaagccgcgttaaaggaacgtgaacagacggtggaagaaccatagaagacatcacatttatttcataattatctgttaggataacatgcaggtttgtactctggcacaaatttgagatgtgcaaaaaagcagcgcagaaatgaggaacaaagatggaaaaaattaaaatattagttgtggatgatgaaagcagaatgagaaaattagtccgtgattttctggtcagggaagattatgaggtgttagaagcgggagatggagaagcggcactcgatattttttatcaggaaaaaaatattgcattgatcattttagatgtcatgatgccaaagatgaacggatgggaggtctgcagggaaatcagggagacttcgaaagtgccaattatcatgctgacggcgaagggggatgaggaggacgagctgacagggttcgaacttggagttgatgagtatatctcaaaaccgttttctccgaagatcttagttgcgcgtgtcggtgcaattttaagaagaagcggaaaggcaccggaggagggaaaacttctttccatcggcggcatcgtgatcgatcagactgcacatacagtgacggtggatggcagacagatcgaattaagcttcaaggaatttgaactgcttacctattttatggaaaacgaaggcattgcactttccagggaaaagattcttaatcatgtctggaactatgattatttcggggacgccagaacaatcgatacacatgtcaaaaaactgcgtgccaagatcggtgaaaaaggagattacatcaaaaccatctggggcatgggttacaaattcgaagcagaagaaaatggcagtgataagtaatgatgaaaagcaggaaaaaagaatttaaaagaaaatattttggttcactgacacaccagttgatcctgatcagtatctgtctggttacgggaacacttcttttgtgctggtttatcaacacggtttttttagaaccgtactatgtgatcaataaacaaaatacgctgctttccggatttgagacgatcgatgaagcgagtgaggcagggacacttgatgacagttcttttgatgtgacatttgacaatctctgtgcaaatgggaatatcaccgtcatgatcataagctccgaccggacgatcgtgcggtcttccgtcaatgatacgcagaaaatgatgctggaatttatgaatatcatttttggcgaaaaacaaaatgaagtgacggtgatgatgcagtcggataattatattattcaaaaacagacggataccaggttagattcagagtttctggtcctttacggaacactttcaaacggcaatctgatcctgatgcgtaccgcacttgagagtatcagggaaagcgtcaatctgtccaatacatttctggcatgggtgggtgttgtcgctgcaatcatcagtgcagtagtgatcgtgtttgtctcaagaggcattacaacaccgcttctgcgtctgaccgatatctcaaaacgcatgacggagcttgattttgaggcaaaataccagccggggcgcagataccacaacgaggtagatgagttaggcgaatatatgaatgtcatgtcgaccacgttagagcatacgatctccgaactgaaaagcgcaaataaccagctgcagatcgatattgacaaaaagacgcagatcgatgagatgcgcaaagagtttttatccaatgtatcgcacgagttaaaaacaccgcttgcactgatccagggctatgcggagggattgaaagaatgtatcaatgatgatgcggagagcagggacttttactgcgaagtcatcatggacgaagcggacaagatgaataaaatggtcaaaaaactgctcactttaaaccagctcgaatttggcaatgaggtcatcaccatggagcggtttgacctgacagaactgatccggggggtgatcaattcgtctgcgatccttttgaatcagaatgagatcacattggactttacacagcaggaaccgttatatgcgtgggcggatgaatttaaggtggaagaggtagtgaccaactatctgagcaatgcgatccatcacgcagagggagaaaagcggatcgatatcagctgtgtacagaaaggggacaaagtccgcgtcagtgtttttaacacgggaaatccgataccggaagaagatgtggacaatatctggatcaaattttacaaagtggataaagcgagaaccagagaatacggtggcagcggcatcggtctgtcaatcgtccgggcaatcatggattcgttccatcagaagtgcggcgtgatcaatcatgaggacggagtggaattctggtttgaattagagacaaataatggaaatttttttagttgataaatcataccaaaaatgctaacatatgggtatagttcgtgacaatagaatgttcgcagagtgcgcattctgttgttcatgataatagaatattcgcagagcgtgagttctattatttacagatattttgagaggaatgccatgaaaagaacgggaatgagattaacgacagtggcagcagtgacagcgttgctgctcggtggatgtggagaacagccatacagtttaacagaagatgaggaaggcatgattgtggattactcggcacacgctgtggcaaaatttaatacgagccagcctgacggtcttgcaaatgtgagccgcaatgagcaggaaacagaggcagtggatgagtcacagacgacggagacggagaataaaatcacactggatgcatccggcaatgcagctgcaggagaccagagcacagagaataaaacagcagagccgtcgacactggatgaactgtttggaggagaaaatctgtcggtcacatataccggagcagaaattgcagcaaattatatggagggcggttattattcgctggatgcagagcagggcaagacatttgtgattgtcggtattgatattacaaattccggagcggatgaaatagcgatagataactttgcaaagacaccgaagttctctgttatggtcaatggtcaggaaaaagcagaggaagaaaatacaatacttccatctgattttgcactgtatcaggaaacagtcccggctggagtaacagaaaatactatcttattgtttcaggtgccggacagtgtgaccagtgtggacagtctggatctgtttgtaaatatcagcggtacaaattatcaaattactttgtaatgatattagtaatgtgctataataaatgcagtatttatgcaatggaaaaagagacgaattgcgtagcagatgatacgcgggaggagagacaggaatggatacaaatatacttttagagtcaggaacaaatgaactggaggtcctggaatttacattaggaaataatcattatggaatcaatgttgcaaagatcagagagatattgacgtatcagccggttacaccagtaccaaattctcatccaagtgtggaaggtatttttatgccgcgtgatacgatgattactgttgttaatctgaaaagatgcctgggaatgccggaggacggagaaaacaaaggactttttatcatcacgaactttaacaaattaaatattgcgtttcatgtagatgccgtgattggtatccatcgtgtatcatgggaatccatcatcaaaccggattcaacgatcaatacggagaataacagtgcatccacaggtgtcattaagatggatgacaagctgatcatcatccttgattttgagaagattgtatccgatatcagcccggagacaggacttaaggtatcagatgttgataatatggtaagccgtgaacgttgtgactctccgatcctgatcgctgaggattcaccgcttcttagccgcttgatcacagattgtctgaagaaggcaggatacaccaatctgattgtgacaatgaacggtcaggaagcatgggacaaacttactgaatttgaaaaagcaggcaatgtgcgtgacaaggttcactgtattatcacggatatcgagatgccgatgatggatggacacagactgaccaaactggttaagacaaatgataatatgaagaagataccgctcattattttctcatctttggtcaatgaggaaatgagaattaaaggcaaacagttaggggcagatgctcagttgacaaaacctgaaatcggcaatcttgtagaggctattgacaatttaattgataaaagcattgattaggttgaagcgaagagggggatgtgatgtattgtcacatccccaaattaagttataggcttgacggaggtatcggatgagcgggacagaagattatctggatggactgttaaattccatatctgaaaaagatttggatacaaagaaaaaaaccgggagtgaaacgatgcagacagaggaagatattatgaatgatatggaaaatgatttactttccaaagaagcggaagataattttttagaacagtttgaaaaagaattgcaaaatgagaagtcgtcaccggaagaggaaaaaacggatgatttctttaacagtttagatcagattgtggatggagcagatcataataataatgatgatgatttcctgatggatacgcttggagatatcccgggtatcgatgatgtgacaaaaacagaagatttgtcacaggcacagacgatggaaaaagagccggatgaacagtctgaagatacagcagaaccggcacaggcgtcagatgatgccggaagtgatacttttggtatggatgatgcaggcagcacaggactggatgattttggagaccttggcggggctgatatgtttggagacagtgaggcagaagaaaccgaaattactccggatggcatagaagaaactccgaaaaaagaaggttttctaaaaaaattatcacgcattctttttggggaagatgatgaggatgaaaaaggtgattctgtctcatctcaaaaagaaccgctaacaggagaaaatgcgggtgacattgatttgtcagatccaaatatgcagatattgcaggaactgggagatattccggatatatcggatgcaccgaaggaagaagaaaagccggatccgaaagaagagaaaaagaagaaaaaagagaaaaagaaaaaagaaaagaagccaaagaaagaaaagaaaccaaagccaaagaaagaaaagaagccaaagccgccaaaggaaccggatctgactcctccattgccgaaggtgccggtaattctgatctttgtaatggtattctcattccttattcttgtggtgttagcaacaaatctggtcggctattcaagcagcttttcaaatgcagaagacgcatatgcaaagggtgattatgagcaggcatttcaggatgtggcaggtcttgaagtgaaagagaaagatcaggatacctacagaaaataccgtattctggcatatacagcaggtcagtacagagcatatcagaatctggtgaaccagaaaatttatgatatggcactggattcactgatcagcacaatcggaagatgtgaagaatacagcagtgatgccaaagaacttggatgtgaaggagagatttcagacatacaggcaaaggcagaggaagcattagaagcatttaagattgatacgaaaaaagcacttgaagtatatgacatgaaggatcggactgcatattcaaaagagatttatcagatactggatgatgcaggacttagtgaggaataaaaatgatagcgatcattgactatgatgcaggcaatttaaaaagcgtacaaaaggcacttgactttttacatcaggaatgcgtgataacgagggattttcatgaaatccgtcaggcagacaaggtgatcttaccgggggttggttctttcggtgaggcgatggtccagttaaaaaaatatgaactggataaagtgatacaggaagtggcggaggagaaaaagccatttcttggcatctgccttggtctgcagcttttatttgagggcagtgaggaaagcagcggagtggaaggtctgcatttgttagatgggcagattctgcgtataccagatacagagggattaaaaataccgcatatcggatggaattcactggatctatggaataatggaaggctctttgcaggattgccggagcatccatatgtttattttgttcattcttattatctgaaagcaaaagatgacagaattgtgaaagcaactacggaatatggcacacatattcatgcttccgtggaacaggacaatatctttgcatgtcagttccacccggaaaagagcagtacagtcggacttaagatactagaaaattttgccgggatttaagacaggaggataaaaatgtttacaaaacgaattattccgtgtctggatgtgaataacggacgtgtggtaaagggtgttaatttcgtaaatttaagggatgcaggagatccggttgagatcgcagcggcttatgataaggcgggggcagatgaactggtatttctcgatatcacagcaacctcagatgccagagagacggtcgtggatatggtgcgcaaagtggcagaaaaagtgtttattccatttactgtaggcggcggtatccgtactgtggatgatttcaaggcattactccgtgagggtgcggacaagatatcgattaattcttctgcaatcaaccgtccggaactcatcagtgaggcggcagataagtttggcagccagtgtgtggtggtagcgatcgatgcaagaaagcgtgcagacggttcgggctggaatatttacaagaacggtggacgtattgatgtcggaattgatgctgtggaatgggcaatgaaagcggaccggcttggcgcaggagaaattcttctgaccagtatggattgtgatggaaccaaggcaggttatgatcttgaactgacccgtatgatcgcagaaaatgtttctattccggtgatcgcttccggtggagcggggacgaaagagcatttttacgatgcgctgacggagggaaaagcggatgcagcgcttgctgcttctttattccattacaaagaacttgagatctgtgatctgaaagattatctggcagaacgcggtgtctctgtcagaagataataagagggtaaatatcatggcaatgattacgaatgactggctcccggcaattcagggagagtttaaaaagccatattacagggaactatttcaatttgtaaaagaagaatacagcagggcggtcatttatccgccggcagatgatatcttcaatgcgatgcattttacaccacttagtgaggtaaaagtactgatcttaggacaggatccgtatcacaatgagaatcaggcacatggtctgagcttttccgtactgccatcacagaaggagatcccgccatctctgcagaatatttacaaagagcttcaggatgatctgggatgctatattccgaacaacggatatttaaaaaaatgggcggatcagggcgtactgcttttaaacacggtgctgactgtccgtgcacatcaggcgaattcccatcagggaagaggctgggagcagtttacggatgcaatcatacaggcagtcaatgcacaggaccggccaatcgtatatatgttgtggggaagaccggcacagagcaagataccgatgctgacaaatccgaagcatctgattttaaaagcgccacatccaagcccactttctgcatacagaggtttttttggatgcagacatttcagtcaggcaaatgatttcttaaaagcaaatgggatcgagccgatcgactggcagatcgaaaacctgtaagttcccataaatgaggagtgcccagacacctttcggcgcccgggctattatgaaaaaaatttatcaagtatattataacaagttgtctaagtattttttaactgtatttagtatatcaatcatatatgaacaaagtatgaataataaattaacaattttttagtaatttaaaacaaaaaaacagaaaaaaatacaaaaaaattggttaggttatccatacacctgaaaagacggttttacttgtggaaaatgcttgaaaatataaagagaacggcctaaaatgacgatataaaagaaaacagggatgtttgattcataacgaacaggttattgtattatttcaaaggagtgagatatatggcaacaatttctggctataattcatattcaatgggagttttgttttctggtctaaacactacatcatctaagaattcattgttttcgaacagtatgtcaggaagtgatatacttggaatcaattacagtgactgggcaacaatcagatcgggcagctattttaaattgttaaatgcgtattatgggaaaggtggacaggtcagtgcttcagacgatacaacatcttcctcaacgtcaacatccaaagacagcaccaggacactcgctgtgattgagagtgatgcgaagagtgtggagaagtcggttgcagctcttcaggaaacaggggataaatccttatttaacgaagtgacaaagacagatgaaaatggaaacaagacgaccggttatgatacggatgctatctataaagctgttaaaaactttacagacagctataatagtctgattgatgaagtgggcaattccaatacaaagagtattttaagagccggtgccagcatggtgaatgtgacagaggcaaaccgtaaatcactttctgatatcggtatttccataggtgcagacaacaagcttaccattgatgaagaaaagtttaagaagactgatatgagtaaggtaaaggcaatgtttgcagacagcagctactatggaacagaagtgaaacggcaggcaggtcgtgcagagtcttatgcaaagagtgaggccgcaaaggcgaatacctatcagaaatcaggttcttatacctataattacagaacaggcgaactttataactctacgatctgatcgcagagctgcagaaaaatatgctgctgttttcatacattttgaaagcggacagcagcggtcatactggtatgatgtgatccggacggtggaaggattatatcacgcaatcatttatgagaaactcggattgggtttctcataaattttgcaaaaaaataatcagtgcaccggaaaaaaagattgcacaatggggcgatgtatggtcaaataatatatagtgtaaaaatggatgttgacatctggcagaatagaaaatatttgagatagatgaaatggagaaaagaatggcagcaaagaaagtagtagtcggtatgtcaggcggtgtggattcctctgtggcagcatatcttttgaaggaacagggatatgatgtgatcggtgtgaccatgcagatctggcaggatgaggatgaatttgtgcaggaggagagtggcggatgctgtggtctttcggcagtggatgatgccagaagagtggcagaccgtcttggaattccttattacgtcatgaatttcaaacaggaatttaagaaaaatgtcatggattattttactgcggaatatttaaaaggcaggacgccaaatccgtgtattgcatgcaaccgttatgtaaaatgggaagcattgttaaatcggagtcttgcgattggtgcggattatattgcaaccgggcactatgcgaggatcgagcagctttccaatggaagatatgcaattaaaaattccgtgacagcagttaaagatcagacgtatgcactttacaatctgacacaggaacagttgtcacacacattgatgccggtcggcgcctatcataaagatgagatccgtaagattgcagaggagattggtcttatggttgcacataaaaaagacagtcaggagatctgctttatctctgacaatgattatgccggatttattgaccgggaatgcggcgatcaggtaccacctccgggaaattttgttctgacagacggaactgtagtcggaaaacataaagggattacgcattatacgatcggacagagaaagggactcggaattgcattcgggcatccggtatttgtcacggagatacggccggagacaaatgaggtcgtacttggtgagaacagagatgtgtttacttatgaactggatgcagatcatattaattttatgtccatcccggatattcaggatgagatgcttttgaaggcaaaaatccgttattcccacagcgggagtacgtgcaaggtgacaagaaccggagaagatacgatacactgtgaatttttagagccggtgcgtgcggtgacacctggacaggcagtcgtattatatgatggagaatatgttgccggaggcggcacgatcctttagaaaagcgatatgacggaaagccgctggatggtaaaaaagacagcagattacacaagataaaaatgatgtgaaaaggaaaggaactggcagcaatgacaagagaagcgtttagggagctggtaaaaaaaggcccggtactgcttgatggtgcaacaggaacgaatttacagaaggcaggaatgccggtcggagtatgtccggagcagtggatcctggaaaattcagaagtgttgatcgatctgcagaaacggtatgtagaggccggaaccgatattttatttgcgccgacctttaccgcaagcagaataaaattaaaagaatatggtttggaagatcatttagaggagatgaaccgcaagcttgtcgcactctcaaaagaggctgcaaaaggtacaaatgcgctggttgccggagatcttaccatgacaggagaacagctttatccgttgggagatctgatgtttgaggatctggtggatgtttataaagagcaggcgaaaattattgcggaggccggagcagatctttttgtggttgaaacgatgatgagcctgcaggaatgccgtgcggctgtgctggcaatccgtgaagtatgtgacctgccagtcatggtttcattgacttataatgaagacggaagaacactgtatggaacagatccggtgacagcggttgttgtgatgcagagccttggtgcggatgcggtcggaatgaactgttcgaccggaccggaggcaatgttagagccgatcgcgaagatggcagagtatgcaacgataccacttctcgcaaaaccaaatgccggaatgccggagctgatcgatggtcagaccgtctttaatgtagagccggaagaatttgccgaagtcgggaaaaaactggtcgaagagggtgctgccatcattggaggatgctgtggaacaacaccggagcacatccgtgctttaaaggaggcagtaaaaggtatcccggtcaaagcaccgcttcagacgaagagaagaatgctgacttcagagcgtaagtctgtagagatcacgcttgatggacgttttatggtcattggagaacgtattaacccgaccggaaagaaaaagctgcaggcagagttaaaagagggttccttaaatcttgtccgtaccatggcattagaacaggaggaaaatggagcatcgatccttgacatcaatatgggtatgaacggtatagatgaaaaagagatgatgctgcgtaccatttacgaagtgacttcgacggtggattgtccgctttgcattgattccagccatgtggatattattgaggccgcgctccgcatctatccgggacgtgcactcatcaattcgatttcactggaaaaagaaaagtttgaaaaactgcttccgattgcaaagaagtacggggcaatgtttatcctgcttcccctctcggatgagggactgccaaaagattctgctgagaaacacggcattatccgcacgatcatggatgaggcggtgaggatcggcatggcaaaagaagatatcattgtggatggactggttgccacaatcggagcaaatccgaatgcagcgttagagtgttttgagacattttcctattgcaaaaatgaactggaactgccgacagcatgtggactttctaatatttcattcggactgccggaacgtacttatgtcaatacggcttttcttacaatggcgatcgcaaatggtcttacgatggcgattgcaaatccgtcacaggaacttctgatgaatgccgcatttgcgtcggatatgctgttgaataagaaagaaagcgacatccgttatattgagcgtatgaattttctgtcagaaaaatatgccggtatggaacgtgtcatggttcagaaaacacctgcaggtacatctgcggctggcggcgaaatcaggaaagagagtacgggaagcggcgtatttcaggcagttttaaagggaaacaaagaacatgtattagaagaagtaaaaaagatgctggatggcggagccaaaccggatgagattatcaatgagcatctgatcgctgcgatcaatgaagtaggagaattatttgataaaaagaaatatttcctgccacagctgatttcttccgctaatacgatgaaacttgcaatcgagtacttagagccgatgttagagcgcagtaatacagaggcaatggctacgatcgttgttgcgacagttgagggcgatatccatgatatcggaaaaaatcttgtggttctgatgttgaagaattacggttatcatgtgatcgaccttggcaaggatgttccggcagatgtgatcgtggataccgcaatgaatgaaggtgcgaaggtgatcggactttccgcactgatgacgaccacaatgatgcggatgaaagacgttgtggagctggcaaaagaaaaaggctgtacggcgaagattgtaattggaggagcggcgatcacggagagtttttcggatgagatcggagcagatggctattcgaaagatgcagcggaatgtgtgaaactggtcgaacgcttactggcataagacacttttagtatagcataacatgtaaaacgagtcttgtagcttgttttacatgaagtgccagtatagaaagctggatgtgttgttatatttttgaaatttttaggaaaatatgaaaaaaagtgttgactttcatctcctgtaatagtatactttagaagtcggttgcaaaaagcaaaggacaaaaatgggatcttagctcagctgggagagcatctgccttacaagcagagggtcataggttcgagccctataggtcccattacatcagaagttctgatgacaatttaatatggcggaatagctcagttggctagagcatacggttcatacccgtagtgtcgagagttcgaatctcccttccgctacttcaagacctcagagattccgaggtcttttgttgtataccggcaaaattttttatataataagtttatgatacgaatcctatacaggcagaattcaattttacttttaaagatgcaggagaggagaactatgaaacaaaaatataagaagctggcatttttcatattattactaagtatgcttaccggctgtatgttattgagtggctgtacggaaaataaagaaaatggatcacagagcagctatattgtagattcggatgagctgcaggatacagaaaatcagatggaattcgtaccgggttctatgaaaggttcaaaacaggaggaaacgtcggaaaacgaagaacagggtcagacagagcaaagtcgtcagactgtcgcggaagaaaatgatgcggagcaggcaaagacggcaggtaatctggaagtacattttatagatgtgggacagggggatgcgactctgatcaaatgtgatggtcattctatgctgatcgatgcgggaaataatgataaaggtacacttgtacagaattatctgcagcatcagggagtggagacacttgactatgtgatcggcacgcacccggatgcagaccacatcggaggaatggatgtcgttctttataaatttgactgtaagacgatcatcatgccggatgttgcaaataacacgcgcacttatgatgatgttgtgcagacgatgaaaaataagggatataagaccacttatccggttgttggggaaacatatacgatcggtggagcagcatttacgatcattgctccaaacaaagagtatggaaatgatatgaattcctggtcggtcggcgtcctcttacagaatggaaaccaccggtttttgtttaccggggatgcggaagagggagcagaacaggatatcctgcagaatggcatcgatatctcggcggatgtctataaggttgcacaccatggaagcaatacggcaacatcccaggcatttcttgatgcagtacatccgacgtatgcggtaatcagtgctggggaaggcaattcttatggacatccgcatgcggaagtattaaacagactccgtgcagccggagtatctgttttccgcacggatgagcagggaacgatcgttgcctcgtcagatgggacaacacttacctggaatatgtctccatcagagagctggcaggcaggggaagcaaaaaagagccagaacacagaaaaaagtgaaaaagcagctgacagccagaataatgcagaaacagatgcagccataagtaatccgacagaccagacggatggaaattcggatgtgatcgttcacatcacgaaaacgggagaaaaatatcactctgccggatgtcagtatttaagaaaaagtgatattgaagtgacattatcagaggcaaaagcaagaggacttacaccgtgttcaaagtgtaatccaccacagtaaaaatattaatagaagggaaaagaaaaatatgcgcgtaggaatgggatatgatgttcataaattagtggagggcagggacctgatcattggaggggtaaagatcccacatacattaggacttttgggacactcggatgcagatgtactgcttcatgccattatggatgcactgcttggggcagcagcacttggagatatcggaaagcattttccggatacggatccgaaatataaagggatttcaagcatgaaactgttggaacatgtggcgggactgatcgccgaaaaaggttatattgtggaaaatatcgatgcgacgatcatcgcacagaaaccaaagatgcgtccgcatatcgaacagatggagaagaatattgcagcagcacttaaaatatcagaagatcagatcaatgtgaaagcgaccacagaagagggactgggatttaccggaacggaacagggaatttctgcacaggcaatctgtgcgttgacaacgatctatgagagcagtgtcagcgtggcggattctgcaggaggctgtgcgggctgtcccggacgtgcctgtggaagataaaagtataaataaaatataaaatgtattgacacgatcacagaaataagatatgataaaccatattttggcgaattgaaatgagactcagatatattttttgtaaggacatcaggggatattcaaaacaaggatatatactgggtctttttatgtacaaaagaagggaaaatgagtatatgaaaaaaaggacgatacgtttctgttgtggagttatggctgcgggcctgctgatctgtggcataccgtctgggggagcagagggagtaacccaaaatcatttgttgtggaatgtggctgcggcggctgagacagcagttacagtgtcgaatgagaatgagtttctgtcggcacttgcacaaaagcagaagaatattgttgtaactggaagtttttccgtcagaggtcaggcagaagcgagcggacagatgatgcctgttgagataccggacgggacagtgattactggaaataatacaggaagtattacgttcagcggaccaatccagatcatgggagacggtgttgtgatccgggatatccagattggttttatctctaccaatagtatgaattctgtgccgcatcgtgagatttttcttgcagggcacagccttacactggataatgtaaaaacatatttgccgggaggaggggacgccagcctgggtggttttggcggcacagaaaaagaacttcttccaaccatctatgcaggaggatatcacagtaatacagcggtggggacgaaagcgtcactcacagttgtaaatgcaaacagtgatacaatgttccagaatatctatatgggacataaagcgtcagcaggtgagaggactgcctatacggggagtgtggagttaaatctggacgcagatgcaaaagtgcgggatattatttcggcagaggacacaacatctgcatcacttgttttttcaggtggacaaaatggaatggatgagatcagcatttcagggatcaaaggaaatgccaacacggtgttgactgtaaaaaattgtgctgtgtcaggtgtcgttacaacagggattaaagatattgttttagaggcaggaggaagactgcagccgaaagatgaaacagcgcagttaaacaatattacactgaaaaacggtggttgtctggatcttacaaaaataatagatgctcaggtaaagggcaatttcacaagtggtggcagtgcggcaaagggaaagcttgttcttgatcaaaatggatacgttcagatcaatggacaggtaagcggtgttacacagtttcaggtgggaagtcatgctatatctggtaatcttttaaatgagcatacctatatcatagcagagaatggaacagcaggaaattttgtgttatcagataaagatatcaataacaactatagcctggtctgcaaaaatgggatatggacagcgtatcgcaattatgtaccggagaaacgtgaacttgaaagtatcgagataaaatcctgcccgaaaaatgtttacaccggtaatattccggcagacattacagataaaactgatgatgcgccatatctggatgtgatatggaaggatcagtatggagaagattacacgtttgatgaagttgcaaatgaatatgatggctatggattttataatcatatgatactaatccgctctgatgactggaatagtgatgatgaagaaattcaacagaaaatggactggggaaacccaatctatctggatgtggataaaaatgagtcagaccgctattatctgattgcatatggtgaagtgaaaacaggaaaatacaccttattattatgttcggagccgtttgatgatcttgatactgtggcagatgtaaaagcactgaaagataccgtgttggcggaaaaggaaataatattcacagatgaaccaggtgtatcacatcagcatgtggagggcgagccggtaaaagaaaacgagatagctgcgacctgtacccaaaaaggaagctatgataaggtagtttattgtaaggataaagattgcggggaagagcttttccgtgagaacataacggttccggcatcaggacacaaaaaaggagagccggtcactgaaaatcgcgtggaagcgaaagtgggtgtggaaggaagctatgaaaaagtaatgtattgcaccacatgtcatgaggagttaagcagagaaaaaatagtgattccagccctgaaagagccggacacagaagagccgggaacagagacaccggcaccggaaccggatacagaagagccgggaacagagacaccggagccggacacagagaaaccggtgcacaaacacagttatgtgttgaaaaaaacgacagaggcaacctgcatgaaagagggagaaaaaatttattcctgtgcatgtggggacagttatacagaaaaaattgcaaagaagtcccatacaccggagaaaaaactgacacctgcaaaaccgggcagcaatggaaagaatgtgaccatgtgcagcttgtgcaaaacagtattgaaacaggtgaaaatcaatgcaccaaagacggtaaaattgtcgaaagatcattacagttatgatggaaaagcgaaaaaacctgccatcaaagtgacggataataagggaaaagtgatttcaggcagcttttataaagtctcgtatcagaataataaaaaagtcggaaaagcaacagtgaccgtgaagtttcagggaaattattcgggaatactgaaaaagacatttgaaatctgtccaaagggaacttctatttcaagtgtaaaatccgggaaaaaatccatgactgtgaaatggaagaaacaggcatcacagacgagcggctatgagatagtatatacagcagatgcatcgtttggcaaaaaaaatacgaagacggctgtgatcaaaagtaataagacgacagttaaagaaatcaaaggattaaaaccgggaaagaaatattatgtaaaagtacgtacatataaagaagtaaagtccggtacaaaaaaagtgaggatctactcagactggtcaaagaaaaaagcagttcagataaaaaaatagttcagataaagaaaccggatgaaagaaaaacaatggtcagatgaatgataagtaacatctgaccgttgtttttttacagggtttgatgttttttgatacgtctttttatgctttccacatcaatcggttcaaaaatgagatcattgatcagatcagataatatggcatttcgaatctgagtcagattaccctctttgcagattgcgataatgggagttgacgaagcccaggactcatgacttaattcatcccacaattgcctgccatcatctccggtttcggatacatctatgaaaacggcaggaacatggttatttttatccataatggcatagcgtatttccgtaacggaagatacttttatgagtctgtccgggtaagaatatgcaaattttaaagtggaagcaacatttctggaatgtgtatataataaaatatttttcatggcagtgtctggtttctgtgcagaaacaccatactcggaaaaacattgtttcccggatttttttgaattcccaagtgcagtgtctgctttctgaaaaagtgttgtgtaggaagtttcataaggctctgtgaatgcaataccgatactgatcgtaacgttttcaggaatggataaagcttctttatctaaaattgcatctaaaagttcctgtgctttttcatagacagcctgtctggaggctatatcccgcataaaagcaacaaattcgtctccgccgatgcgtccgataatgtcggaaccggaaaaatgagatgcaagaataccggctacgacagagattgtatgatcgcccattttatgcccaaagatgtcattgacagctttgaaattgtcgatatctatggcaaacaatgcatgtaattcttccggagtggataaaagtatgtgggaaatggcgtgctctgctgtggccttattcagcagatgcgtcatctcatccacttctgatttaatccgcagagcttcctgtttttgtaaaatatgattcagtctgcggttcgtctttaaaatattgtcaatacggtgacgtgcaatggcaggttcagtgggtttactgagaaagtcgcttgcgcctaattcgaaagctttcgtctgtacttccggagtgtcggtggttgtcagaaccacgactggaatttgtttaaactccggcatttcctggcggtgttttaaaacatcgaaaccatccattccctgcatgacaagatctaaaaggacaaggtcaatcatattttttttatctttgatcatctgcagacattcctcaccggaagatacttcaagaatattgaaggccggagagaatatttcatttaaaacggcatgctgtaagcgtgaatcatctacgattagcaaagtttcttttgactgttccatattaaaaaatccttcgtatcagttataaattatccccctggaaaccacaggatactatctataatgtaacatggaaaatggttgtgtgcaatgagaaaaagactgagaaaaaataaaaccgttgacaaatcgggggtaagtgcataaactagagtaagcgaatcaacttaccagtataaatacgataagggcgttgagcgggaagagtaagaaatcagagtgctgacagagagaaactgccatcggctgcaagcagttttcagaaagagatttccgaagtgcctccgtgagcctgtccggggaaacggtttgtctgccagtacagtatccggatacgagtaacacgcgttaagtgtattgagtgaggatcaaaagatccttaagttagagtggaaccacggatcatttcgtctcttagagatgaaatgatccgtttttcatgataatggaatgttcgcggagcgtacattctattatttggttaaggaaaggggatgccagttttgggaatcatcagtcatattaaggaagaatttacagtgataaaggagcgggacccggcgatcaaatcgccgatggaggtattgctttatccgagttttcgggttatgttgagctacagacgtgcgcataagctgtatttaaaaggacatttcttctgggcgagatttatttcacagcgggcagcgagaaaaacaggaattgagatacatccgggagcaacgatcgggaaaggattttttattgatcacggaagtggtgtgatcattggagagacggcgatcgttggggacaatgttactctgtatcagggtgtgacactaggcggtaccggaaaagagaccggaaaacgtcatccgacgatcggggataatgttatgatcagtgcgggtgcaaagatcatcggttccttcaccgttggagaaaattccaagatcggagcgggaagtgtggtcatagaggaagtgccgccaaactgtaccgtagtcggtgttccgggaagaatcgtaaaacgtgacaatgtgaagatgccgcggagtgatatggatcagtgccatctgccggatccggtcaaagaggacatcaatgtgctgcagagggaaaatgcagaactggtcaaccgtgtgcttgatttagagcaggcagtccggattttaagtgctgatgcacaaaaaacaaaataaattgcattttgctccgcaaaacaaggagtaaaatcctctgctcatcagaggattcgcattttgctccgcaaaactaaaggaggattatttaaatggaaaataaatttcaattttacaacacactgacaagaaaagtagaaacggtgatcccgcatgaggatggaaagatcggcatgtatacctgtggaccgaccgtataccattttgcacatatcggcaacctcagaagttacatcatggaggatgtattggaaaaatcactccgctatgtcggatatgatgtaaaacgtgttatgaatatcacggatgtgggacatttatcttccgatgcagataccggggaagataaaatgttaaaaggtgcaaaaagagagcacaaaacagtgatggagatcgcaaaatattatacagacgctttctttagtgactgtaagaagttaaatatcaagacaccggatgttgtggagccggcaacgaactgtatcccggagttcatccatatgatcgaggtgctgctcgaaaaaggttatgcttatgtggcaggtggaaatgtttattttgatacatccaaattagacgattattatgtattttcttcccagagcgaaaaagagctgttagtcggtgtacgcgacgatgtggaagaggacgtaaataagaaaaataaaaatgattttgtactctggtttacaaagtcaaaatttgaggatcaggcgcttaaatgggatagcccatggggcgttggatatccgggatggcacattgagtgctcatgcatcagtatgaaacatctgggcgagtatgtagatatccactgcggcggtgtagacaatattttcccgcaccataccaatgagatcgcacagtcagagagttaccttggccatacatggtgtaaatactggttccatgtacagcatttaaatgataaatccggaaaaatgagtaagtccaaaggggatttccttaccgtatccctgctgcaggaaaaggggtatgatccgatcgtataccgtatgttctgtctgcagtcccattatagaaaaccgttggagttttcctatgaagtattagataatatggctgcagcttataaaaaactgaccaaacgaatcgcagaattaaaggatgagggaaccgtacagcaggataaatttgatgcttataaggcaaaatttgaggatgcgatcagcaacgatctaaatacatcgatggcgatcacgatcatttatgatctgctcaaagatgatatgaacgataagacaaaacttgcgctgatcaatgattttgataaagtattatccttaaatctgacaacggcacaggcagatgcaaaagaggagatcgatgcagaattagaaagctatgtacttgcaaagattgaagaacgaaaggaagcaaagaaagcaaaagattttgcaaaagcagatgcaatccgcgatgaactgcttgcaaaaggcattgtactgaaagatacacgagaaggtgtgatctggcacaaagcgtgagagagaggaaatgccaatgcagaaaggaatagactcttatatcaaagaacagttcggaatcagtgaagtggatatccggacatattcgcctcttacgttagcctatatcggagatggaatatttgatctggtgatccggtctgttgtcgtaggaaaaggaaacacgagagcaggagaacttcacaagcggacaagccagatcgtaaaagcacacacacaggcggaaatgattgaaaaattacttccgatgctgacggaggaagaagcagaagtgtaccgtcgtggaaggaatgcaaaatcgccgacaatggcaaaaaatgccacaatgtctgattaccggaaagcaaccggatttgaggcgctgatgggatacctgtatttaaaagatgagtttgaacgtctggtggaactggtaaagaccggtgtggacgaacttgcacttaaaatgtaaaaggagagagtaatgggctacgaagagctgaaaatagagggacgcaatgccgtgttagaggcattccgttccggaaaaacaattgacaaattatttgtgttggatggctgtcaggatggtccggtgcgcacgattgtcagagaggcaaaaaaacatgacacgatcgtgcattttgtggaaaaagagcgtttagatcagctttctgagacaaaaaaacaccagggagtgatcgcagttgctgcagcatatgagtatgccgaagtggaggatatgctaaaattggcagaggaaaagggcgagccgccatttttattcattctggataatatcgaggatccgcataaccttggcgctatcatccgtacggcaaatcttgccggtgcgcatggtgtcattattccgaaacgccgcgcggtcggtctgacggcaactgtggcaaagacatccgccggagcaatcaattatacaccggttgcaaaggtgacaaatctgactgcaacaatgaaagagttaaaggacaaaggaatgtggtttgtctgtgcggacatggatggaacctgcatgtatgatctggatttaaaaggaccgatcggtcttgtcatcggcagtgaaggcgagggtgttggcagactggtgcgcgagaactgtgattttgtggcatccattccgatgaagggggatatcgattccctgaacgcatcggtggcagcaggtgtgcttgcctatgagattgtgcggcaacgcatgcggtagaagacaccgcagcggtagaagacaccgcagcggtaaaaaacacagcagcaataaaagacatcgcaggtggtagagaacaccgcaacggtagaaaaaaacgccgtggtagatattgtatcaggagtcttgggaggaacatgttagagtcatatcgggatttgacagacgaacagctgattgcggcattaaaaaacagcggtgatccggacggaaagatcatggattacattttagataaatataaaccgctggtccgcaaaaaggcaaatgcagtatttctgattggcggtgagacggatgatctgatccaggagggaatgatcggtctgtttaaggcaatcagagattacgatgatacgaaagaaacatctttttttcatttcgcagaattgtgtattacgagacagttatacaaggcagttgaggcgtcgaaccggaaaaaacatgcgccgctcaattcctatgtttctttctactcagaaaacagtgaaaacggatatcctctggcggaaacgctgaccatggacggaatcggaaatccggagcagatgatgatcgatcaggaaaatgtggcacagttctgggagaagctcaggacgcatttaagtaagatggaacgggaagtattagaccagtatcttgcgggatttcattatcagcagattgcagaaaaaatgggaaaatcaccaaaatctattgataatgcgctctcccgtattaaaacaaaaattcgggagacgaatcctgaaatagggaagatgtagaagatttgccttcttttttgtagatagtcacgaaaaatacttgtgcatattgcataaaaaataaatgagaaaattgtaacatttgtgaacacttattgagaaaatcatgctattataatcactgtaaaaaccccccaatacattatatatagtttttgctataccccatagtaaaaataccttctcctaaaaaagacagcagtggctgtcttttttgttgtacaaatattgacaaccgtcacagattaggctagactgaacaagtcgataaaacttaatagaaaacaacgcagagggactgcatgtccgggagaatgcccggagggattgcggttgagaaggttaaagcctgactctttgaacctgtcagttaatactgtcgtagggagcgtattgggaagatgctatctcctgtcgcgcttgcggcaggagattttttgacgtggagaattcgtttgccagacagtggttcaaagtttagtggccggcaaattgtacaatttgccgttcgaaaaactaaaaaccactgtctggcaaacggagactcaagcagtcccccatgcgaaaaaggagaaaaacgtatggaacagtataccacacagatggatgccgcacgcagaggcatcgtgaccaaagaattagaaattgtagcgaaaaaagagcgcatgaccgtagaagagctgatgccgcttgtagcagagggaaaagtagcaatctgcgccaacaagcatcacacctgcattgatccggaaggtgtaggatcaatgttacgcacgaagatcaatgtcaatctcggtgtatcgagagactgcaaggattatgatgtggagatggagaaagtgatggcggctgtcaacatgggtgcacatgccatcatggatttatcttcccacggcaatacgattccgttccgcagaaaactgactgcagaatgtccggcaatgatcggtaccgtgccgatctatgattctgtgatccattaccagagagatcttgcgacactgaccgcaaaagattttattgatgtggtgcgtctgcatgcggaagatggtgtggattttgtgacactgcactgcggaattacaagaaagacaatcgagcagatccggaaacataaacgtaaaatgaacattgtttcccgcggcggttcccttgtatttgcatggatgtgcatgacgggggaggaaaatccgttttatgaatattatgatgagatccttgaaatctgccgtgagcatgatgttaccatttcacttggagatgcctgccgtccgggatgtctcgcagatgcatccgatgtctgtcagatcgaagagttagtaagacttggagagctgacaaaacgcgcatgggagaaagatgtacaggtcatggtagaaggaccgggacatatgccgatggatcagatcgcagcaaatatgaagatccagcaaagcatctgcatgggagcaccattttatgtgttaggaccacttgtcactgatatcgcaccgggatatgaccatatcacatccgcaatcggcggggcgattgcagcacaaaacggagcagcatttttatgctatgtcacaccggcagaacacttggcacttccaaatgtggaggatgtaaaacagggaatcattgcatcaaagatcgcggcacacgctgcagacatcgcaaaaggagtccgtggtgcgagagagatcgatgataagatggcagacgcaagacgcgtcttagactgggatgcgcagtgggaatgtgcgattgatccggaaaccgcaaaagcaatctggaacagtagaaaaccggagcatgaggacacctgttccatgtgtggaaaattctgtgcagtgcgcagtatgaacaaagcgcttgcaggagaatatattgatattttgtaaaaaagagtggaggcttcattccgtcttatgttataataaaactgtttcaatcagccggtgatcagatgaaaagaatatatttggttgacagtgagaatgtaggcgatatatgggtgccgttactggtagcatcacagcccgatgaggaagtgatcgtattttatacgcagaaaagtccgcatatgaattacgaaaatgtgaggttactgaaggagacggagaaagaagcagagtttataaaatgttttgagggaagcaatgcactggatttccagcttgttacacagcttggatacttgttgtgtgagaatcaggcaaacagctatgtgatcgtttcaaatgataccggatttgatgcagccgtacgctactggaaacagcgtaacatgccggtgcagcgtttgagcggaaaggaattaaaccgcagactgcagcaaaaagcaaagacgaatggagaaagagaaattttctttgaagcggaggagaagaacgccggggacgtggctggaagtctggcagatgaagctgagattgtgacagcaaagatgaatgagatgacagaaacggataaaagcgaagagccgggtgaggccgaaaagctgaatggagtttcagagttaaatgaagtctcaaaactgaatgaagcctcagaaatgatggagactgcagaactgaccggagtgttggagcagggaaaagccggaaaaccggatgagacagcagaaccgggtgaaaccggaaaaccggatgagacagcagaaccgggtgaagccggaaaaccggataaaatggcagaaccggaggaaactctagagcaggtggaaacagcaaaaataaaagaaacggcacagacggaaaaaactgcaggaacagatgaacagtcagaaccgggagaaatccagatggagataccggatgaaatcatgaggccggatgaaactgtaaatgcggatcagaaactgccatttacagatccgcgtaaggaagcagttgaaaagacagagatctcacaggaacaggacgatgtcattcgcagtctgcttacctgcatcagtaaggatcggcttgcagattttcacaatgcgctggtattgttctttggtgaagatattggaaaagaactttatcaggaggcaaaaaacagttctgcgtatgcaatctgtcgtgtaaatcagactgcgatcagtgaggaagagaagtttgatgtttactgtcagacggtatttgcttacagtgatccgaaaatggactgtccggaagatttttcttcgtttttgtataaagcaaatacaaagagaaagaaccttaattcattaagagcagcattgcagggacattatggcaaggacaagggaatgaaatattattctctttttaagtcacacatcaagattatgaatcggatgtaaagaaggagaggctggttgaagcgaaaacgggaagaacataacggatgtggtggcggaacaccaggtagccagaagacccgaagaacagcacccctggatgcgtattttgtacgcatccgggggtgttgtcaggtggttaaagttatttcgaaccgccggaaatgttgaataagtataaatattttgaaaaattacaaaaatttcttggattttatgcttgacaatcggacgatcctattgtatagtaatacaagtgttgagaaaacatgatgctgctgtggctcagtcggtagagcgtcgcattggtagtgcggaggtcacgggtccgattcccgtcagcagctcttttttatgccagaaaagtttaagtgataacttaattcttttctggctctttttctttctgaccggaaataaaatgatcaatgagaagattgatcgtatgttgctgtgtctcgatgattttttggaatgtttcattttcttttgccagacgggtgatttcagcttcgctattcatattcatcttcctttttacaccattcaaatcgatacatcatatatgttttatgttaaaaaatattccctgaaatgtcaagacaataaagacgtctgtggagaaacattgttactttattaacataaagcgtcaaaataactgccggattcgacataacatgcaaaaatccagacatacaaatttagattcagggaaaatacgcagtaatatttaggaatttatgaattttttacgaacggatgttatttgtatgagtaatgtgctaaaatatcattcggctaaagatccggggaaagtagattctccctttgaagtgaggtttgatatgaatgcgagcagaaaaagaaaaaatacaaaaccgaaaggtttttttgaaaaattaaaggagcagagaaatcagagaaaggcggacagggcaaaacagacggacaggaaaacagatatcttaaaaaagacagggagtgggattgttacattactgcttgtcattttaccgccggcagtttgtttttatctgatggagtgttattcgcacaatccatttgcagtggtacgtccgtgggcacagttttttaatatcgtgctgtttgaactggtaacagttttcctgtttgtgctgacgggaaaattaaaggctgcgcaccggatcgtatacattgcagcaatgatttatggaattgcgaacagttatgtggtgcgtttccggacgaatccgattgtgccgtgggatattttttcctggaaaacggctgtgagcgttgcagataattatgattttatgccggatacgcgcatggtcgttgtgacactggtattttttgcagcaatcgtattatttcgttttataaaagtaaaagtgacacgtttggtattctggaaacggctgattccggcagcgctggtggctgtggttctttcattgtttgcgggaacactgcagcaggagaactttcagaacagccacagactttacaataaactgttcacgccggtctacatgacggatgtggatggtatggcagtcacatttgtcatgaatcttgcctatatgtcgatcgacaaaccggagcattacagcgccgctgaggcacaggcggtgcttgattcctacggggaggacggtgcaatgtcggagaaatcaggctctgaggcagaagaagacgatacacaaaaggaggaagatcttccgaatatcattgtaatgatgaatgagtcattttcggatctgtccgtgttaggtgattttgaaaccaacgaggattacatgccgtttatccacagcttagagcagggggagaaaaatacggttacgggaatgttaaacgtatctgtctgcggtggaaataccgcgaatacagagtttgaatttctgaccggcaatacaatggcattcctcccgcaggggagcatcccgtatcagcagtacatcaatggagatttgaaggcacttccggattatctgaagactttaggatatcagaccattgcgacacatccttacaatgccggcggatgggaacgcgatacggtctatccgatgctgggatttaatgagagcgtgtttaaagatgattatgtgaatccgcagtatgtcagacagtatatcagcgatgagagctgcgtggataagattattgaattttatgaaaataaggaaaaggatgcgccgctgtttgtgtttaatgtgaccatgcaaaatcacggtggatatcaggatcagtacggcaattttacaccggatatctcggtgaaagattctacaaatttttcactgcagcagtatttatccctggtaaaactttccgattccgcgttagaacatctgatttcctattttgaagaggcagatgaaaaaacagtgatcgtttttttcggagatcatcagccgagtgatgccgttgcatctacggttcttgcaaagaacgggatgtcctggaatcacttgacagaggaacagcagaaactgcgttatcaggttccttatgtggtgtgggcaaactatgatattggagaggaaacgggtgcagacacgagcgtgaactatctggcagcggaagtcttagagcgcgccggtgttccattggatgaatatcgttcgtatctgttacatttaaaatcagaatacccggttatttccgcggtgcgtacagtaaaagcggatggcagtgaagtccgcgcctcggatgaaaaagatgagatggatatttaccggaaattgcagtattatgaactgtttgatcatggaactgttaattaggaaatgataaaaagagaggttttgttttgaaaagagaaaagaaactccaaaatcagttgtggaaagaaagaatgccgcttattgcgtcgttctttctgccgttttttattctgactgtgatctgcattcttcatgacgtctatccgtttggagagcaatgtattttacatatcgatatgtatcatcagtactgcccgtttttcacggagctgatggataagattaaacatggcggcagcatgttttactcctggaatatcggacttggagcagattttatttcactgtacgcctattatctggcaagtcccttaaactggctgctgctactctgtccgcagaatcatgtgatcgaatttatgaccttgcttgtgattttaaaaatttcattggcgggactgtttttcggatattatttaaaggaacattttgaaaaaaatcatgctgcaatcagcatttttgcaacagcctatgcgttgtgcggattctcagcagcctatgcatgggatatcatgtggttagactgcatgatgctggcaccacttgtcgttcttggactcgaacagctgatcaaagagaaaaaagtactgctttattatatttcactgtctttatgtattatcagtaattattacattgcgatcatggtctgcatttttcaggtgatctggtttgtgatcacatggctggaaaataaagagaccgggatcggtgcgtggatccgtttcgcaatttattcccttctggcgggcgggacgggagcgatactgatcattcctgaggcgatcacccttggagcgagcggctcacagaatatttcatttccggatacaatggaatggtattttaacatcattgcagagctggggagacactcggtgatgacagaaccttatacgggcaaagaccactggccgaatatttactgtggcgtatttgtgcttcttttgtttgtactgtatcttttcaaccgtgagatctcctggaaaaagaagctttcacgcggacttctggcagcattttttgtcatcagtttttcgaataatatacttgatttcatctggcatggcatgcacttcccggattccctgccgggcagacagacctttttatatgcatttctgatgcttgcggtatcctacgaggcatttttgcatttcaaaggaacgagatttttagatgtgatcgcagcgggagtggcatcggttggtctgatggcagtttcctgtcatttttccgatgggacgatcttaggagagagcgcggcaacggcaacttatgtatttctgggcagctatattgtggtgctgctgatctatttttatgcggaggaatgtatcctggaagatgtggtaaaaaagattggaaagatcaaaaaggcgaccagggaagaactgaaaaaaatcatgctctcgtttggctgtgcagcgatgcttttagaattattttttaactacaatgtgaccggatttgatacgacgagcaggactgcctatgtgaaatccatggatgactatcatgcagtgcttgcagaggcggaaaatcaggcacaggataagggcatattattttaccgcacggaagaattagagcgcaaaacgaaaaatgatgcggcgctgtatggatatcgttccgcaacgcaattttcatcgctgatgaatctggatgtcagtcatttttaccaggcagtcggaatggaaggcggcaagaatttctactgtgtaaacggggcaacaccgctgttatcagcaatgatgtccctgcgctatgtgatcgctgataacgcaatggaagcaaacccgatccgcacccttgtggcagagagcggaaatacgtatctttacgaaaataaatatgtgctcccacttggttttatgatggatgaggatgtgattgatgcgtgggattattctgatttagatgaaattgaggcacagaacagacttgcagagcttcttggtgcagatgagccgatgctgacggagatcccgtccgaatctgtggtcggggaatcaacgattgacgtgcaggaggatgcatacatttttgcaacctatgaatcgacgactgtggacagcatgacggaagagatcagtgacggcaggacaaagtctttcacaaaagtttcgcatggctatacacttgatcttggatactgtacggcaggcacacaagtgaggattaaaaacagtaatgaagaaagagtgaatattacggcatatgccctgaatctcgatgctgcagatacggcttatcagacgttaaatgagcagacgatggagatgacttccttttccgatacgaaaatcactggaaccattgatgtgaaaaaagaaggacgactgatttttgcggtggcggatgatgccggatggaaattatatgttgatggagaacagacggatccggaagtgtttggtgaggcgtttatcagcacatatcttaccgaaggaacacatacggtcgagctgcgctaccagacaccgggatttatggtgggagccgggttttcccttgcctgtattctgatcgtgatactgatcgcatggataaaaaggcaccattgaaattaaaacgtttctgtgagatactatacgttggaggagtttgagaaaggtagtgatttatatgtcagacaaagagatagaaatttataatgaaaatgccgatgaaatcaaaatccgcccatatgagcatcatgcaaaatattatgagacggaccagatgggaatcatccatcattcaaattatatcaaatggatggaagaagcgaggatggatctgatggatcagatcggactcagctataaacagatggaggagatggagattatcagtccggtgctctctgtatcctgcgagtatcacagtatggtacattttgatgatacggtcgtgatcgagacgaagatcacacgctataatggtatcaagatggatgtggaataccggatgacggacaaggagaccggagaactccgcacgaccggaaagagttcccattgctttttgaaccgttccggaagaccgatctcattgaaacgttcttacccggagatcgatacgaagttctttgagtatacggatgcctgacaaacgggtgtgatattagaaatatataagaaagaggaaataaaagaatgatacaggaaagattaaaggcactgcgtgcggagatggaaaagagaggcatcacggtatacgttgtgccgactgctgattttcacgaatcagaatatgtaggagatcattttaaggcgagaaagtttattaccggatttaccggttctgcgggaactgccgttatcactttggatgaggcagggctctggacggacggacgctattttgtacaggcagagaatcagctgaaagacagcacagtcacactctaccgcatgggcgaagagggcgtgccgacagtcgatgaatttgtaaaggatcgattaaaagagggcggatgtctcggatttgacggacgtgttgtaaacggtacctggggcggcagactggaaaagattgcagcagaaaaaaatgtgtccatgcatgtgacagaagacctgatcgatctgatctgggaggatcgtccggcattgtccaaacagcctttatttattttggaggaaaaatattccggaaagagtactgcggataagatcgcagatcttaggaaagctatgaaggagaacggtgcagatgttcatattctgacatctctttacgatatcgcatggcttttaaatatccgcggcaacgatattgattatgtgccggtcgtattatcctatcttgtgctgaacgagacagagtgtatctggtttttacaggaggaagtagtggatgataagatccgtgcttacctggaggaaaaccatatcacgacaaagccgtatgatgcgatctacgattatgtaccggagattccggcagacgcagtcgtgctgatgaaccgcgggacggtcaactaccgtatcgtgaacagtcttgataaagcaatcaaagttgtggataaaccaaacccgacggaacttatgaaagctgtaaaaaataagacagaggtagacaacaccagagctgcacatgtaaaagacggtgttgcctttaccaaatttatgtactggctcaagaccaatatcggaaagatcccgatgacggagatctctgcttctgactatcttgaggcgagaagaagagagcaggataactttattgagttaagtttcaacacgatctgtgcttacggagccaatgcggcgatgatgcattatgctgcaacaccggagtcagacgctgagttaaaaccggagggatttttacttgtggattccggcggacattactttgagggaaccacagacatcacaagaaccatggcacttggcccgatcacagatgagatgcgtctgcactttacgaccgtctgccgttcgaatatgaaccttgcgcatgcgaagtttttatatggatgtaccggtttgaacctggatattttatcccgcggtccactctgggagatgggcattgactataaatgcggcaccggacacggcgttggttatgtgttaaatgtacatgagggaccgaacggcttccgttggagagtcgtaccggagcgccatgacaacggtgtcttagaagagggcatgatcacgaccgacgagccgggcgtttatttagagggtaaatacggtatccgtaccgaaaatgagctggtatgccataaagctgagaaaaatgagtatggacagttcatggagtttgagaatatcacctatgcaccgatcgatctcgatgcgattgccccggatctgttaagtgcacgtgagaaaaagatgttaaacgattatcacaagatggtatatgataccatttccccgtatatgacagcggaggaaaatgagtggctgaaacgctacacaagagcgatctaaaggacaagaatggagagaacaatgggcgaaaagctggtattgatagatggacacagtattttgaacagggcatttttcgggatcccggatctgacgaattcggaaggactgcacacgaatgcagtctatggatttttgaatattatgttcaagattttagaggaggagcagccggattatctgacggttgcatttgatgtgtcagaaccgactttccgccataaaatgttcgcagaatacaaaggcacgagaaaaccgatggcacaggaactgcgggaacaggttccgctcatgaaagagatgttaaaagcgatgggagttaccacgatcgaaaaaggcggttatgaggcggatgatctgcttggaaccattgcaaaacagagtgaacaaaaagggctgacagtttcagtggtatccggtgaccgtgacctcttacagcttgcaacggatcatattaagatccgtatcccgaaaacaaagcgcacaggcacggagatcgaggattacaatgccgctgaggtacaggaaaaatatcaggtgacgccaattgagtttatcgatgtcaaggcgctgatgggggatacggcagacaatattccgggagtaccgggaatcggtgaaaagacggcaacagcaatcattgcacagtatggaagtgttgaaaatgcctatgcacatgtggacgaattaaagccaccccgtgcaagcaaaaatttaaaagagtattatgacctggcacagatgagtaagacgcttgcgacgatcgagatccatgcggacattgattatgatctttccggtgcaaaacttaatggtatttccagcctgtacacggaggaggcatacctgctctgcaaacggttagagtttaaaaatcttttgaatcgttttgcggtggaaactccaaaaaatcaggcggcagaacattttaaacttgtggaagaccgtaaggaggcagagaaagtatttgcaaagcttcgtggcagaaactgtggtttttatattgttcccggaagcaaaaagaaagacagccacgaggaagaggacgggcagatgaatctgtttgcggcaggagatatgccgggggcagacagtgaaccgtccggcatcgtagaaagtgcagaaaatgatgcagtggagtgctgccttggagctgccatttcaactggagaggaagaaacctttttcataaaagcaggggaaaatcttccggcaaagcagattctttccatgtttaccgcaagtgaggctgcgtcctatgcgacactggatttaaaaccgcagcttgcggcgcttggcttactggagcgacaggtaaacggcaatattggcctgtcgaatctttttgacggtgtgcttgcagcatatcttctgaatccgctgaaaaatgagtatccatatgaggatattgcaaaagactatatgggacagatgataccgtcaaaggcagatcttcttggaaaactgaccatagagcaggcaatgaaagatgcaccggaagcatttttaaattatgtatgctatatggcatatgtggcacaggcatcgaaaaagacgctggagacagacttaaaggaagagggcatggatcatctgtttacggaaatcgagatgccgctcgtatttactcttgccgatatggaaaatgagggtatcattgcgtgcagggaggcgctcacggagtatggggacaaacttgcagtgcgtatcgctgaactggaaaagcagatctatgaggaagcgggagaagagtttaatatcaattctccaaaacagctcggagtgatcttatttgaaaaattgtccatgccgtatggaaagaaaacaaagaccggttattccacggcggcggatgtgttagaccgccttgcaccggaatatccgatcgtttctgatattttagagtatcgtcagcttaccaagttaaagtccacttatgcggacggattggtaaactatatcgctaaagatggcaggatccacaccagttttaatcagacgatcacagctaccgggcgtttaagcagcacggagccaaacctgcagaatatcccgatgaggatcgaacttggcagactgatccgcaaggcatttgtgccaaaagagggatttgagtttatggatgccgattattcccagattgagcttcgtgttttagcacatatgtccggggatgaaaagctgatcgaggcataccgggaagcacaggatatccacaggatcacggcgtcccaggtatttcacatcccgtttgacgaggtgacggatctgcagcggcgcaatgccaaggcagtcaatttcgggattgtatatggaatcagttcgtttggactgagccaggatctaagcatcagcaaaaaagaagctgcagagtatattgaacggtactttgaaacttatccaaagatcaagacgtttttagatgggcttgtggcagaggcaaaagaaaaaggctatgtaacgacgatgtttggaagaagacgtccggtaccggaactttcaagcagcaattttatgcagcgttcctttggagaacgtgttgccatgaactcaccgattcagggaactgcggcagatatcatcaagatcgcaatgatacgcgtgcatgacagactgttaaaagaaaatctaaagtcacgcctgatcttaaccgtgcatgatgagcttttagtggagacggcgatcgaagaagaggatgcggttcgaaagattctcgaggaagagatgcatggagcggcagatcttgcggtcacacttgaaattgatgcacatgtcggcaaaaactggtatgaggcaaaataaagatctgtcatcatttatgagggatgatgcgttggactgcatatgtccggatggtacgagagaaaaaatggatgcggggagcatggaacggatgaaatttatcggaattaccggcggcgtcggtgcgggaaaatcagaaatacttcattatcttgaaacaaaagatggtgtaaaagtcatgttggcggatgaaatcgcgcatgagctgatgctgcccgggacagaatgttatcagaaattaaaagacatgttttcggatgaggatatctggaatgaagatggatcgtttgaccggaaaaagttagcaacagtcatcttttcagatgaaaaaaaacgggatacattaaacggaatcgtacatccggcagtcaaaaaatatatcagaactgttgcggatacagagcgggaaaatggagtgctgaaaatcctggttttagaggcagcattgctgattgaagaacattatgatgaaatttgtgacgaactttggtatatttataccagagaggatataagaaaagaacgccttatgagatcgcgcggatattccccggagaaagtacagcagatttttgacagtcagttacaggaagcggtttaccggaaacactgtaaagtggtgatcgataataatggaacggtggaagatgccataaggcagattgatttggcaatcacaaatatggaaaatgagtaggagatactgcagatgagcgacggaaaagacatggaacagccattggtgttcggacttgatattggaacgagaaatgtggtaggaacggtaggttaccgtaccgaagatcagtttatcgttactgctcagtatatcatgcagcatgatacgagagcaatgttagatggacagatccacgatatcgggcgtgtatcagggacgataagaaaagtaaaagaacagctggaaaaacagatcggaaaaacgctgacggaggtatgtatcgctgccgcaggccgtgtgcttaagacagttacaacgagtatcagttacgattatccggaggagagcgtagttaccggggaagacattcatacactggatctgcttggaattgagaaagcgcagaaaattttacaggaaatgaatgataccaactacaagttctactgtgttggttattctgtagtcaaatatttcttgaatgatgaaccgttttctaatattgaatcccacaaggcagaccgtatcggtgaagatatcatcgtaacgtttttaccggaggatgttgtggatggactttatgcagccgtaaatcaggccgggcttgaagtggcgaatctgacattggagcctattgcggcgatcaacgtcgcaattccggaaagttatcgtctgctgaatatcgctttagtcgatatcggagcgggaacatccgatatttccatcaccaaagacggaagcatcattgcctatggtatgatccctcttgccggagatgaattaacggaactgatcgtgcagaattatctggttgattttaaaacggctgaatatatcaagctgcagagtacaacagaagaggagatcacttataaagatatcatgctgatcgagcataagattccggcaaaagaagtgtgggaactgactgcgccggtagtggatgagatgacgactgcggtagctgcgaaaatcaaagaattgaatggcgaccagactgtcagcgcagcatttatcgttggcggtggcggtaagatccatggttatacgaaaatgcttgcagagaaattagatcttccggacgtacgagtggcactgcgtggtgaagaagtactgcaggaagtggtatttgaacagcaggatatcaagaaggatccattgcttgttacaccgattggaatctgtctgaattattatgaacagagaaacggatttattatggtgcgtttcaatggagagcgcctcaaattatatgataatgatggattaacgatcgtggatgccgcattgcaggcaggttttccgaatgaggatcttttcccgaaacgtggaccggaacttacattttttgtaaatggagcaaaacgtatcattcgtggagagcagggagagtcagcagcagtttatatgaatgacagaccaacaaatctcaatgcggcattagagccgaattgtgagattatcattgagccatctacggctggcaagccggcaacctgcacattagatcagttagaggaatatacgacagattccgtagcctttgtggttaatggaaatattataagatgcccgaagttcttagaggtcaacggcaatttagaactgccttcctatcagatcaaggagggcgaccaggtagaaacaagaagcttttacacagtaggccagcttgcagaatttatggatgtggaagtgaatgtggagcatgtgattctggtaaacaaccgtcgtgcaacgctcgactcactgatctatgaaaactttacaatcgagtggacagtgcgttcctatggcaaaccgtcctttcagccggtagagcaggaagaagttcaaacaccgactgtcggggaatataaggaagaagagataccggatattgtggagccagagacgagtgtggaggatggtgcagaggctgataaggcagaagaacaaaagtctgcaacagagcacagtgatgcggctgcagaagatacagatgatgccggcaatgcgcttgcggaagaagaggattctgcggtagcaaaggatactgccacagaagaagatggtaaaaaaggtacagacagcgagacaggcgttgaggtatctgcaacaggacagaatgcggctgatgtggcagaggcagttccaatagaagaagatcagccggaaacagatatggatgctgcaacagcgaatgaacctgtggagcaaacagaagcatccgtggcacagaacgtggatgaaaaaccagaagatggtaatacagttttagtatacatcaacggccagccggtaaaacttaccggaaaaccacagtatatatttgtagatatttttgatttctacgaatttgatcttactgcctcaaatggcagagcaatcattaccaatttaaatggtgagaatgcatcgtattctgcagtcttaaagaccggagatacaatcgaacttagatggaaagagaattaaaaaaatggaattatgcagcatagcaagcggcagcagtggaaactgtatctgtgtgggatcagatgaaaatcatgtactcatcgatgcggggatcagtggaaaacgaattgaaaacggactcaattcgatcgatttgaaaacagaagagatgcagggggttcttgtaactcatgaacacatcgatcatatttctggacttggcgtgatcgccaggcgttacggacttccgatttatgccacgcagggtacgatagatgctattttaaatacaaagtcagtcggcaaaatagaggaatctttatttcatgcgatcacgccggatcagccttttgaaatcggggatcttttgattgaaccgatttcaatctcacatgatgcggcagatccggtggcctataagataaaaaatgaggagaaaacggcggcggtagtgacggatcttggcacatatgatgaaaacatgattgataaaataaaaaatctggatgtgcttttactggaagcaaatcatgatgtacatatgctgcaggttggaagttatccgtatccgttaaaacagagaattcttgggaaaaaaggacatctctctaacgaactgtccggtcagcttttgggagaagtgctccatgaccatttcaatacggttattttagggcatctcagtaaggaaaataattatgcagaacttgcatatgagactgtccggttagaggtgacgatgggagaaaatccatataaaggcgatgatttcccaatgtatgtggcaaagcgggacgcgccgtcggagagaatcattttttagtttatgataatagaatgttcgcgaaacacgtattctattatatatgacaatatttttttacagagtgtggccgcttatgaagcttagtagaaaaagttataaatgtgcatctatttaacagtggaaattataaaacatgtatgatatgatgattgataatagatttgcgctgatttagtaaagcagaaaagtgaggagagcagagatggagaacacagcagacaagacaattattacagtagtgggtaaagatacggttggtatcattgcaaaagtatgtacttatctttccgaaaatggcgtcaatgtacttgatatttcacagacaatcgtttccggatatttcaatatgatgatgatcgttgacatgaataaatcaaccagatcatttgtggattgtcagaaagatctcgatgagatcggtgcacagattggtgtatccatcaagtgccagaaagctgagatttttgaaaaaatgcatcgtatttagagaggaaagcggcaatgattaatatatttgaagtaaaagagaccaacaacatggtggaacatgaaaaccttgatgtccgcaccattacgatcggtatcagcctgctttcatgcattgattccgatttgaaaaaattaaatgagaacatttataaccgtatcacatcagttgccaaagatcttgcaaaagttgcaggggagatcgaagctgaatacggtatcccaattgtcaacaaacgtatttccgttactccgattgcactgatcggtggtgcagcctgcaagacaccggaagattttgcaacgatcgcagatacaatggaccgtgctgcagaagcaatcggtgcagatctgatcggcggttattccgcactggtatcaaaaggcatgacaaaagcagatgagatgctgatccgttctatcccgatagcactttgccggacgaaccgtgtctgcagttccgtaaaccttgcgtccacaaagaccggtatcaatatggatgcggtgcgtctgatgggagagattttgctggaggttgcagagcgctcaaaagaccgtgattctgtggattgtatgaagctggttgtattctgcaacgcaccggatgacaacccgtttatggcaggagctttccacggtgtgacagaggctgatgcagtgatcaacgtcggagtcagcggaccgggtgttgtaaagacagcacttgagaaagtgcgtggcgagaattttgaggtactctgcgagaccatcaaaaagaccgcatttaaggtaacaagagtcggacagttagtcgcacaggaggcatccagacgtctttcaattccgtttggtatcattgacctttcccttgctccgactccggccatcggtgattccgtcgcagatatcctctgcgagatcggtctggaatatgcaggtgcaccgggaacaactgcagcacttgccatgttaaatgatcaggtcaaaaagggcggcgttatggcatcttcctatgtcggcggcttaagcggcgctttcattccggtcagtgaggatcagggaatgatcgattccgtacaggctggtgctatcacattggaaaaattagaggcaatgacctgtgtctgctctgtaggacttgatatgatcgcaattccgggagataccaaggcaaccacgatctccggtatgatcgcagacgagatggcacttggtatggtaaaccagaagacaacagctgcacgtctgatcccggtaattggaaaaggcgttggcgataccgtagagtttggtggtctgttcggttatgcgccgatcatgccggtcaacaaatattcctgtgatgattttattaaccgtaccggaagaatcccggcaccgatccacagctttaaaaactaactgcgcggatcactggcaaacatgaaagtgattttaataaaaaatgcagtggaaacactaggatatttttcagaacagttagcagaaacgtttcaggagatggggcatgacacctattttgtggattacgatgatctggtaaatacggtagatggcatcagccggtttgccgtgccagagaaaacggtactgtgtacgtttaattttatcggactttccggggaagaggtctttatcgaagagaacgggcgttatatctgggaaaaccaaggtatcgcgtgcatcaatatcctggtggatcatccactgtattatcattcaaaactggcaaagcctccggtgccggaaatgcgtgttttttgtattgacagagaacatgtggcatacatgaagcgcttttacccggcattgccggtggagtttctgccgctggcgggaaactgtatcttagagcgggaagtaccttccccaatagaaggctgccatgggcaaaaacagaaacataaaaatataccgtatcagaaacggaaatacgacatcgtatttaccgggaactatacaccggtggaacacctttaccgggaaatcgacaggcagggtgcggaataccggacattttattatgagattctggaggatatgaaagcacatccggcggtgtccatcgaccggatgttagaggcacatatcagaaaagaactgggtgcagtgccggatgaggagcttcgcgcggcgatcgcaggaatggtgttcatcgatatctgtatgcggagttatttccgcggggagatcataaaatgtcttgcggagcataaaatcccggtacatgtgtttggcgccaactgggagaaattagactgtagcagccatgactacattataaaaaacggcagggaagtggattctgtgacctgcgcggaggcaatcgcagatgcaaggatttctttgaatgtcatgccatggtttaaagatggaacgcacgaccgcgtatttacggcgatgctgcagcatacactttcgctgaccgatgacagcagatatcttcgggagaactttacggataaaaaagaactggttttctattcgctggagaagcgtgaagaactgcctgaactggtgaaaaagcttttggaaaaaccggagaaatgtatggaaatcgcagagcggggatatgagagtgctgtgcaggaacatacatggaaacagagggcagaagcaattttgatggatttggtaaaatgaccgcttaacttgtaatatgtactcctttcactggaagtccagtacaaggtggatatattaggtttgggcggttatttttataaataaatatattaataaaacttataaaattaagtaaataaattcatgacgctaataattgtaaaaacaggatcaaaatgataagataaagaaaaacagcaaaccgcacacatgaaggaggaaatcatggagaaaatgtcattaaaaaatgaactttcaggcaattcctatcctggaagaggaatcattatcggaaaatctgcagacggaaaacatgccatcactgcttattttattatgggcagaagtgagaacagcagaaaccgtgtttttgttgaggatggagagggaatccgcacgcaggcttttgatccttccaaactgacagatccgagcctgattatctatgcacctgtccgtgtgcttggcaataaaacgatcgtgacaaacggagaccagactgacacaatttacgaactgatggataaacagcagacttttgagcaggcgctgcgcacaagagaatttgagccggacgctccaaactatacaccgagaatctcaggtattatgcacattgaaaacggaaaattcaactacgcaatgtctattttaaagagtaacaacggggatccgtcctcctgtaaccgttatacatttgcctatgagaatccgaaagcaggtgaggctcattttatccatacttatatgggagatggcaatccgctgccaagttttgagggagagccggcaccggttgcaatcgagggcgacattgatgcgttcacctcatttgtatgggaaaacttaaatgaggacaacaaagtttctttatttgtccgttatattgatattgcgaccggagcttacgagagcagaatcgtcaataaaaataaataataggcatcaggcttgcaagatgcggcaaagaagcatgaatttcacagatcaatgagaaatttaaaggagaaattatgaaagaattagaattaaaatatggctgtaacccaaatcagaaaccatccagaatctatatggaaaacggcgaactgccgatccaggtattgaacggaaaaccaggttatatcaattttctggatgcatttaacggctggcagttagtcagtgagttaaaaaaggcaaccggacttccggcagccacatcttttaagcatgtatcaccggctggtgcagcagtaggacttccactcagcgatgtggagcgtaagatttactgggttgacgatatggatatggagtttacaccgcttgcaaatgcatatgcgagagcaagaggcgcagaccgtatgtcatcttttggtgattttatttctttatctgatgtctgtgataaggcaactgcaatgatcatcaagagagaagtttccgatggtgtcatcgcgccgggctacacagatgaggcattagagatcttaaaagcaaagaaaaaaggcaattataacgtgatccagatcaatccggattatgtgccggcaccgatcgagcacaaagaagtattcggtattacctttgagcagggaagaaatgaattagtgattgatgagcatttctttgacaatgtggtaacggacaataaggaaattccggatgctgcaaaaagagatcttgcaatcgcaatgattactttaaaatacacacagtccaattctgtatgttatgtcaaagacggacaggcaatcggtatcggtgctggacagcagtcccgtatccactgtaccagacttgcaggccagaaggcagataactggtggctgcgccagtccccgaaagtgttaggactgcagtttttggacaagatcggacgtgctgacagggacaatgcgatcgacctctatattggtgaggattacatggatgtcttagctgacggtgcatgggaaaacatctttaaggtaaaaccggaggtctttaccgcagaggaaaaacgtgcatggttagataaaaacacaaatgtggcgcttggatctgatgcattcttcccatttggggataatatcgagcgtgcacatagaagtggtgtggcatatgtggcacagccgggtggttccatccgtgatgacaatgttatcgaaacctgtaacaaatacaatatggcaatggcatttaccggaatccgtctgttccatcattgatcagacacggatgatttctttgctgcattcaggacaggaaaaacgatttttcgtttttcctgttttttgctgttcgtagagctcagaagaaaaaatatcctgtttcagcatctggtttgcagttccgtcaagtgtgcgcagggcagaggagagcttagagatgacaggtacttttgcggaattttttaaggcagaaagcagggcggaagcatctttgcggaaaccgaggattcgcaggtaagggatgtaatcagtctccttatattgcttcacatccgtctgggtcatctgaaggatcagatgcagaaggatccggttcatgcgtgtgtaggtgatatcgcggctcttgtttcgtgcacaaaactgtgtgaaagaggaaaaatgatatctgttctttattatgcggtttgcaatctccggtgtcatatcatagatattttctaattcctttttgctgcacgataagatccggtagccaagaatggaggaaaagtcatcagcatccataagtctgccggatgtgatctccttttgaaacagtgcaaaagccggttccggcatcgaagatgcaatttccgaaagatgtggccggctggaatgaatactctgtgaaccgtaatctgcagatgaaaaatggaaagtatgatcatccgatggtgtaacattagaaactgccgcgcggatggcggaggcagaagctgtcggtgtgttgatcgtggtatcatgatatccgctccccgcccgcgggatcaggattggagtcatggcagaattacgccgtttcagtgcctttaaatattcgaccgcgaggatgttattcggagtatctaatatggaaatgaggaaattcattccggtgctcttaaaataatcagaaagcgcagcagctcttgcagccggaaatgccagtcccttttttaaataagaagaaagcgcagatctgtaaatgtccggttcttctgcaagaacaccggcaatgctcttaagctgggggagctggtcggattctgctccaaagcatatcccgtcgatacagcccattttatcaaacagggtaacacctgccatggcaaaatcctccgcggaggagactgcccagacagccgggagttcgatgacaagatccgcaccacataaaagcgccatttctgccctgcaatatttatcgatgatggcaggggctcctctctggacaaagtcaccgctcatggcgatgacgacaaaatcagcatttgtttttcgttttaactctgcaatctggtaggcatgtccgttgtggaaagggttgtattctgcaatgattccgattgttttcataagatactccatttctgaccattttttgaaaatcctgattccatctgtatctcaggtttgggcgtaagcacagattctgcgtgtaacagcatgattacagactaccatacacagatttttttcgcaaatgtgaatgtctgggatttgttaaaaaaataacgttaaaattctgtcaacctgtttttcattttgtacaaaaaatctcactttaaacaccttgtgcgaacagagttagaggcgtatactagagttatatgcggttcgtatcggtcggactgcccatttatcatttatataagaaaagaaaactgccattcgaaagcaggcagggcatgggaggaaaatatgaacgttttagtagtaaactgcggaagttcttcactgaaatatcagctcatcgattctgacagtgaagcagtattagcaaaaggactttgcgagagaatcggtattgacggaagactggtataccagaagaccggattagacaaagagatcacagaagcagcaatgccgacgcacaaacaggcaatccagatggtacttgatgcactggtaaatgagaaaacaggtgcaatcaagagtctttccgagatcgatgcagttggtcaccgtgttgtacatggtggagagaagtttgcttcttctaccgttttaacaccggaagtattaaaagcaatcgaagagtgcaatgaccttgcaccacttcacaacccggcaaacctgatcggtatcgatgcatgtaaagaactgatgccagacgtaccgatggtaggtgtatttgatacagcattccatcagacaatgccaaagaaagcattcctttatggtcttccatacgaatactatgaaaagtacaaagtaagaagatatggcttccatggaaccagccacagttttgtatcaaaacgtactgctgaattccttggaatggatctgaaaaattctaagatcattgtggctcatcttggaaatggtgcttctatcagtgccgtattaaatggtgagtgtgtagatacatccatgggtcttacacctttagagggacttgttatgggaacacgttccggcgatattgatccggcaatcatggagttcattgcaaagaaagagaacttagatatcgaaggtgtcatgaatgttttgaataaaaagtcaggtgtacagggattatcaaaattatcaagtgatttccgtgatcttgaggctgcagccaatgaaggaaatgagcttgcaatcggtgctatcgacgtattctgctaccgtgttgcaaaatatatcggtgcatatgtggcagcaatgaatggtgtggatgcgattgcatttactgcaggtatcggagaaaatacaacgatcgtcagagcaaaggtacttgagtatcttggatatcttggaattacagtagatgcacaggcaaacgaagtacacggagaggaaaaagtgatctccacagcagattccaaagtaaaagtctgtgtgatcccgaccaacgaggagcttgcaatcgcaagagagacggttgcacttgtaaaataggcaaaacagcgggtctttgaggttcatagacgatgaaaaataaaaaaacagggttgtcaagaaaaaatacttgacaaacctgttttcactatgtataatcatttaggtgtgaaaagcctagataaaaggtttgattcacaaaaaaagatataggagaatgccgtgattatagatatttcagacattttatcttgtgaaaacaaggaagaaacaaagcaggttcagattgaacttacgtcttttatatcaaagttaggggaatttcctattatcagtgcagcaccgatagaactgcgtatcgcaaaccgggagaacaagcggctgcttatccagggtgatgttgatctgcgagtgtcgattccgtgcagccgttgtctggaggaagttccgacagatatccacttttcgattgacaaggatatcaaattagaagattctgttgttcatgacgaagatgtggaagataatgactacctgattggatttaatctggatatagatagacttatctatggagagattttggtgaactggccgatgaaagttctgtgcagggatgattgcaaaggaatttgcaaggtgtgcggaatgaacctgaacaaaggggaatgcaactgccagagaacagaactggatccaagaatggcagcaatccaagatgtctttaacaaatttaaggaggtgtgagaatatgtcaatttgtccaaagaataaatcttccaaaggaagaagagataaaagaagagcaaactggaaaatgactgctccggcattagtaaaatgcagcaaatgtggagagttaatgatgcctcatagagtatgtaaaaactgtggctcttacaacaaaaaagaaatcatccctcaggactaatccttacgggaaacagaaagatcaagagtggaacgatgagtttcctcttggtcttttttgtttccgctgaaaaagttataataatttcacaaattaccggttgcataatcggagtgaacagaataaaatggtagaatgatgttttagcaaaggagtagggcaatgggagatatttttaatttggacaacaagttttttcagacacttggaaagggtgtcgactgtgtatgcttaagcctgctgtggatgatctgctgtataccgcttgcgttcggcatttatgtggcatatgtatcaaaagcgatcatattagcacttccatgtatcgtactggctgttccggctggaattgcgacaacagcactttattatgcagttaacaaggtgatccgtcacagcagaggatacctgtggagttctttctggcattcttttaaaacaaatatgaagcagggtgcatttgtaacgcttgtcgtggcagcagcggttgttctggtaggacttgacggttatatcatgtatcagtttgcaaaagcgggtgaaaaatcaggagttctttatgttgtgttctttgtgctgatgcttgtggtcattgcatgggcgatttatgtattcccgtatatggcacgttttgagaattcgacaaaattgatccttaaaaattctgcgctgatggcgatcggcaatctgccaaagacttttatggcactgatgtttttcctggcatgctgtatcggaacttatcttttgccggttgtagcaatcatatcaccggctttgggaatgcttctgctcaactatattttagaaggtgtgtttgaacgctatatgtccgatgaagaccgtgaagcagaaaatgaaagaaatcaggaattctataactaatgatattgtaaatgacaatcgatttttatattgatttatagaaagagttatagtatatttcaatatagacgtgaagggagagcccgaaaacgtatcagaatggagagtagttatgcagcagaatcaatcacttgagattaccaaagttgccttagatgcgatgggtggagattatgctccggccgagcctgtaaagggggctgtggatgcggtaaatgcgagaagtgatatcaaggttcttctgatcggtcaggaggacgtggttcgtaaagaacttgaaaagtacacttatccggcggagcagatcgaggttatacatgctgaggaagttattgagacagcagaaccgccggtaaatgcgatccgcaagaaaaaacagtcatcgatagttgtcggcatgaatatggtaaaacaaaaagaagcagatgctttcgtatcggcaggaagttccggtgccatattagtcggtggacaggttatcgtaggcagaatcaaaggaatcgaaagaccaccgttagcgccgcttattccgacggaaaaaggtgtgtcgcttctgatcgactgcggcgcgaatgtggatgcaagggcatcacatcttgttcagtttgcgaagatgggttctatttacatggaaaatgtacttggaatcaaaaatccgagagtggcgattgtaaatatcggtgcggaggaagaaaagggaaatgcgctggtaaaagaaacatttccacttctgaaagaatgtacggatattaattttgtgggcagtattgaggctcgtgaaatcccgcatggagaggcagatgtgatcgtatgtgaagcatttgttggaaatgtaattttaaagctgtatgaaggactggcaggaacgcttgtcggagcaatcaaaaaaggcatgatgagcaccttaagaagcaaaattggtgcagcgcttgcgcttccggcattaaagtcaacattaaaagcgtttgatgctactcagtatggcggcgctcctttattaggactgaatggacttgtggtaaagacgcacggaagtgcaaaggcagtcgagattaccaattccatttttcaatgtgtgacgttcaaagagcaggacatcaacggaaaaatcagaaaaaatattataagttcaacggaacaggaaggaatgtaaagttatggaatttgaaaaactgaaaaaaatcattgcagaggtattaaacgtggacgaggaagaaatcacaatggacaccacttttgtggatgaccttggagcagactcccttgatatttttcagattattatgggaatcgaagaagaattcgacatcgagatcgcgaatgaggatgctgagcatatcgtgacagttgcagatgcagtagagcagatcaagaatgctttaaactaaataaaagatgacgtatgcccttgttgaagacaaaagggcggtgcgcgatgtaccgtctcttgtcaggcaagggcttttccgttattatataagaaaacagagtcttttttatattttactggatacacagtaaggtagaaaaaagcccctgaccaggaggatgaaatgtcaaagttacaggaattgcagaacaggattggttatacatttgagaaagagggcttattgcgtcaggcactgacgcacagttcctatgctaatgaaaaacacatgaaaaaacattctgacaatgagagactggagtttttaggggatgcggttttagagatcgtatcgagtgattttttataccgcaattatccggatctgccggagggagatctgacaaaactccgtgcgagtattgtgtgtgagcctacactggcactttgtaccagagagatggatcttggcgattatctgctgcttggcaagggtgaaaaccagacaggtggaagaaaacgtaaatcaattttatcggatgctttagagtctgtgattggagctatctatttagatggtggttttgaaccggcaaagaagtttatacataagtttatcctgacagatatcgagcacaaaaagctgttttatgacagcaagaccattttgcaggaagttgtgcagggcaattataaagagagtctgcattacgagctgatttcagaagaaggaccggaccatgacaaacagttttcggtcgaagcacggatcggagataaagtgatcggcgcaggaaccggacacacgaaaaaagcggcagagcaggaagctgcctaccaggcacttttgcttttgaaaccgaaactgtaattatgcgcaaaagtcagcgcaagaatgaggtttagtatgtatctgaaaagtattgaagtgcagggatttaaatcatttgcgaacaagatcgtttttgattttcataatgggatcactggaattgtcgggccaaacggcagtggcaagagtaatgtcggggatgcagtgcgctgggtacttggtgaacagagcgccaagcagctgcgtggtgccagtatgcaggacattatttttgcaggaacggaaaaccgtaaaccactcagttatgcttatgttgcgatcacacttgacaatgcggaccataaactgccggtagattatgaggaggtcacggttgcgaggcgcgtgtaccgctccggggagagtgagtatctgctcaacggcaatacctgccgtctgaaggatgtgaccgagctgttttatgataccggtatcggaaaagaaggatattccattatcggacagggacagattgagaaaattttaaatggtaaacccgaggagcggcgtgagctttttgacgaggcagccggaattgtaaaatataaaaagcgcaaggcgactgcacagaaaaagttagaaaatgaacgtgaaaatttagttcgtgtcaatgatattttaagcgagctggaacgccagggcggcccgttagaaaaacaggctgaaaaagcgcgtgtatatttaaagaaaaaagaagaattaaagacatatgacgtcaacatgtttctgatggagatgacacgcattgacggacagcttcatgaagtgggcgaaaaatgcggcattgcggaagcacagttacatgagtcaaaagattcttatgagcaggtaaagacagaatatgagcgcatggaatcggagatcgaacagttagaacaggcaatcggtgaagtacgcgaaaatttaagcggttccactgttttaaaaggaaagttagaaggacagatcaacgtcttaaaagaacagatccacacggcagaaatgacggacgagcatttaaaagacagacttgattccatcgaaaaagacacacaggatcgccttgcgcagaaagatgtttatggcagggaacgagaggaactgttagaggcattagcggggatttcggagagaaagcaggctgctgaaaaagaattagatgagctgcgcaatggaatgaaagaatgcagtgacgggatcgaacacggaaagagtgagatcatcgaactccttaacaacaaggcatccgttaaggcgagacagcagcgttttgatacgatggcagagcagatcaacatccggaaagcgaaactgacacagagacttcttgcaagaaagacagaggaagaagatttagacaatgtgctggctgcctatcaacaggaattagatgatgtcaatgaaacgatccgtgagttaaaggaatctgcagccgcaatggaagaaaagaaccgtgagtggcgtagaaaatattcgcagacgagccagcagttagagcaggatgtcaccagatatcataaagaacagtccaggttagagacattaaaaaacattgcagaacgctatgacggatatggaaacagtatccgccgtgtaatggaacagaaagacagacacaaaggaattttaggtgtcgtatcggatctgattcaggttgagaaaaaatacgaggttgcgattgagactgcgttaggcggaagtatccagaatatcgtcacggaggatgaagagacagcaaagcagatgatcgcgtatctgaagcagaaccggtatggacgtgcaacatttcttccgctcacgagtgtgaatggcagcggcgggtttaagaatcaggaagcactgcgggagcggggcgtgatcggacttgcaagtaccctggtgaaaaatgatgccagatatgatggcgtgacgaattatctgctcggcagggtagttgttgccgagacgatcgatgacgcgattgctctggcaagaaaataccgctattcattccgtatcgtaacgctagagggcgaatgcttaaatccgggcggttccatgacaggtggtgcatttaaaaataccagcaatcttcttgcgagaagacgtgaggtagaagaacttgaaacacttgttgcttctctgcagagtcagatcaaagagtcgagagaccgcttagaggatattaagacggcgcagtcactgttagaagaagatatggaaagcggcaaggagaaactgcaggaacagtacattcttcagaacacggcaaaaatgaacttagaccgcgccacagagcagaaaaacgagagagaaacagtttttgccggtctgcatgcggagcgggcagagatcgaggagcagcttgcagagcttgaaaacaataaagcgcagatagcggcagagattgaggctgcagcggttcgtgaaaaagagatcggacaggaaaacgaggacttccagaaacgtttcgaggaatatcagacgaaggagaaggaagctgcggaaactgtttcaaagattgctttagaggaagccggtatccgtcagaaagcggagtttgcgcagtcaaatatttcgcgtattcagagtgagatcacaagattttcacaggacagggaaacgctgatcacgcaggcaggggatgcaaaagaagaagcaaaacagaagatggcagagatcgaggaattaaaaaagacgatccgtgtatcggatgatacgcatgccgctttcgaacagcagttaaaagattatacgcagaagaaagaagaactgtcagcttcacataaaggatttttccggaagcgtgaggagatatccaatcagatctcggaacttgataaggaagtattccgtctgaacagtcagcgtgaaaagctaaatgatgcgagagaataccagaccaattatatgtggcaggaatatgaactgacgcttcacgctgcaatggatcttcgggatgatacctatgacgatctttctacattaaagaaaatgatcgcacagattaaggatgagatccgaaagctcggtgacgtcaatgtcaatgcgatcgaggattataaggagatctcagagcgttatcaatttttaaaaacacagcatgatgatctgatcgaagcagagaaaacgttgatcggaatcatcgaggagcttgatacgggaatgcgcaaacagttcatggagaaatttgcagagattcagaaacagtttgataccgtatttaaagaactgttcggcggtggaaaaggtacactggaactggtggaggatgaggatatcttagagtgtggtatccgtatcatcgcacagcctcctggaaagaagctgcagaatatgatgcagatgtccggtggagaaaaatcactgacagcgattgcactgttatttgcgatccagaacttaaagccttcaccgttttgtctgttagacgagatcgaggcggcactggatgattcaaacgtcacccggtttgcaaaatatctgcacaagctgacgcagaatacacagtttattgtaatcacacacagacgaggtacgatggcggcggctgaccgtctctacggtatcacgatgcaggaaaaaggtgtttccacactggtttccgtaaatctgatagaaaatgatttagacaaataatgattggaacaaataagaaaggcaggatgtatgggcgaagaaaaaaaaggattttggagccgtctggtttccggactcagcaagacaagagataacattgtatccggaattgattcgatcttcagtggattttccagtattgatgatgatttttatgaagaaattgaagaaattctgatcatgggagatatcggtgtcaacgcgaccgaagcgatcatcgagaatctcaaagaaaaagtaaaagaaaataagatcaaggatccggcagagtgcaaggaacttctgatcaacagcatcaaagagcagatggatgttggagagactgcataccgttttgaaaatgaaaaatctgtggtacttgtcatcggagtaaacggtgtcggtaagacgacttctgttggaaaactggctggaaagctaaaagaccagggcaaaaaggttgtccttgcagcggctgatacattccgtgcagcagcaggagatcagctgttagaatgggcaaaccgtgcaggtgttgagatgatcggcggacaggaaggtgcagatccggcatcgatcgtatatgatgcggtcgcagcagcaaaagcaagaaatgcggatgtactgctctgtgatacggcaggacgtcttcataataagaagaatcttatggaagagttgaaaaagatcaaccgtattcttgaaaaagaatatccggatgcataccgcgaaactcttgtcgtattagatgcaacgacaggtcagaacgcacttgcacaggcgagacaattttcagaagtggcagagatcacaggtatcattctaacaaagatggacggaacggcaaaaggcggtattgcggttgcaatccactccgaacttggaattccggtcaaatatatcggtgtcggagagaccatcgaggatttacagaagtttgattctaatgaatttgtaaacgcactttttgatatcaaagatcaggcagaacaataaacagatgaaggagaatgcagatgttaacattagacaagtttgaagaagcaagtgagaaagtaaaagaagtcaccttagaaacaaaactggtatattcagatttcttaagtgagcagacaggaaataaggtatatttaaaacctgagaatatgcagtttaccggtgcatacaaagtgcgcggagcttattacaagatcagcacactgacagaggcagagcgtaaaaaaggactcattaccgcttcagcaggaaatcatgcgcagggtgttgcctacgcagcaaaatgttatggatgtaaagctgtcatcgtgatgccgacaacgacacctttaattaaggtaaaccgtaccaagagttatggtgcagaggttgttctctgcggagatgtttacgacgaggcctgtcagaaagcctacgaactggcagaggaaaaaggatatacgttcattcatccgttcgatgatcttgcagttgcaaccggacagggaacgatcgcaatggaaatctttaaagagctgccgcttgtggaatatattttagttccgatcggcggaggcggacttgcaacaggtgtatccacacttgcaaaactgttaaatccaaagatcaaagtgattggtgtggaaccggcaggtgcaaactgtatgcaggcttctttcaaagcaggaaaagtaacgactctgccgagcgtcaacacgatcgcagacggtactgcggtaaagacaccgggcagcaagatcttcccatatatcaaaaagaatttagatgatatcatcacagtagaagatgatgaactggttgttgcattccttgatatggtagaaaatcataaaatgattgtggaaaactcaggtcttcttacggtagcagcgttgaaacatttaggtgtaaaagataagcgtgtcgtatcgatcttaagcggtggtaacatggatgtgatcacaatgtcttccgtggtacagcagggacttattttccgtgaccgtatctttacggtatccgtgcttcttccggataagccgggcgaattgtcaaaagtagccgcaacgattgcagcagagcaggggaatgtgatcaagttagagcataatcagtttgtcagcacaaaccgtaatgcagccgtggagcttcgtattactttagagtgttttggtacagatcacaaaaatcagatcatcaaagcattggagaaaaatggttataaaccgaaattagtcagagcaagtctgtagaattgcgtttcggatatcagaaccggatcataaaatgaaaaatggttaaaaaataagggatttcgttcattgcaaaacgaaattccttatttgttatgaaacagtatgctcgtacaatatgtggtccggcgtatgcggccaaatagtcagtgtcaggatactgtgtaagactgacctgtcatatccaggctgttaatgtctgcaccggagtgatttacgtgaagaccaagattgaagccagaaccgccatccgggttaaagctgacagtcacggaattgccggaaatagaagtagacgcagagtatccggcaacctcgacctgatcgatcggtgtattaaaggaaagtgtcagggcgacattgcctgccacgttattccagttcacggcaaccagaccttttccgccacctgcccatctgtcccatactcccatataggttgcggttacggaaccggctgcaccggctgcgccgcttgcaagatagatgccttctgtatgttcaggtgtcagataaattgcaggtttctgatatttatttttcatgagaacctccattcctgcgcatgatttacgcaagcaaaaaagtttttattttaggtttagctcattataaacagggaaaaaaagtgttgtcaatactgttataggaaaaaagtcatgttttaagaaaaaataaatactggtgtcaagaaaaaatgcttgacacccattcttttttatgataatctatgcaaggtgctgatgtgagagtacagattgggatatgagatggaagaaaagattgaacaggcgtatctatatgatttctatggagagcttttaaacgaacaccagagaaagatatatgaagattttgtgttcaatgatctctcactcggtgaaatcgcggatgaagaaggaatcagccgtcagggtgtacatgatatggtaaagcggtgtacgaagaccttagaaggatatgagagcaagcttcatctgatcgaaaaattccagaccgcaagaggtatggtgacaaagattcacacgttgaccaaagagttctataagaaccatgacgaggcagtgttagaagagatcgaacagatctccaaccagatattagaggagctatagatggcatttgacagtttatccgaaaaactccagaatgtattcaaaaacctgagaagcaaagggcgtttgacagaagatgatgtgaaggctgctttaaaggaagttaagatggctcttttagaggccgatgtcaatttcaaggtagtcaagcagtttgtcaaagatgtgcaggagcgtgcgatcggacaggacgtgatgaacggactgaatccgggacagatggtcatcaagatcgtaaacgaagagatggtccgcctgatgggttccgagacgacagagattgcacttcgtccgggcaaagaactgacgatcattatgatggcaggtcttcagggtgctggtaagacgactacgacagcaaagattgccggaaagttaaaagccaaaggcaagaaagtactgcttgcggcatgtgatgtatatcgtccggcggcgattgaacagttacagatcaacggtgaaaaacagggagtggaagtattctccatgggagataaaaatactcctgtgaacattgcaaaggctgcggtagagcatgccacaaagaatgattttaatgtgctgatcatcgatacggcaggacgtcttcatgtggatgaggacatgatggccgaattgattcagataaaagaaaatgttgcggtatcacagaccatattagtggtcgatgccatgacaggacaggatgcagtcaatgttgcaaagaccttcgatgagaagatcggaattgacggcgtagtactcaccaaactggatggtgataccagaggtggtgcggcactctcaataagagcggtgaccggcaaaccgattctttacgcaggtatgggagaaaagctttctgatttagagcagttttatcctgaccgtatggcatcgagaatccttggaatgggtgatgtgctgacactcattgagaaggcacagaacgagcttgacgaggagaaagccaaaaagcttgaagaaaagatgcgcaagaatgaatttgactttgagatgtatttagagtccatgagtcagatgaaaaaaatgggcggtctttccagtatccttggcatgatgccgggacttggcggcggtaagatgcctgagattgacgagggagcggctgagaagaatatggcacgcactgaggcgatcattttctcgatgacagtcgaggagagacagaatccatcattgctcaatccgagcagaaagcgtagaatcgcacagggggcgggcgtggatatcgcagaggtcaaccgtcttgtaaaacagtttgaccaggcgaagaaaatgatgaaacagatgcccggcatgatgaaaaaaggtaaaaagggaatgtttaaaggacttcctttttaataaatgaacagcaaaaatctaaggaggtgaaagtaatggcagtaaagatcagattaagaagaatgggacagaagaaagcacctttctatcgtatcgtagtttctgattccagatccccgagagatggaaagttcatcgaagagattggaacatatgatccgactaaagatccgagcgagtatcatgtaaatgaggacttagcaaagaaatggttagcaaacggagctcagccaacagataccgtagcaagaattttcaaaaatgctggtattgagaaataggatcagtgaggtggacctatgaaagaattagtagaagtaattgccaaggcacttgttgattgcccggacgaagttgttgtaactgagaccgagaatgaaaaagcaatcgtattagagctgcgcgttgcacagtctgatatgggtaaggtaatcggcaaacagggacgtattgcgaaagcgattcgttctgttgtgaaggctgctgcctcaaaagaagaaaaaaaagtgattgtggagattatgcagtaatcttcgcagtaaaccggcgtgatcatgaacatggtgcagccggttttttttctatcagagaagaatagagagggataaaaatgagagatattacaaaaaaatgctctatatttttattgacattactgttgattgtacagataccggtattgacaagtgccagtgaaatagtgacagacacaggaaactatacagtatttaccgaagataatgagtcagatgagacagcagatatcgtaaaagaatactgtaaaggtgcttccacgaaaatgagtttcaggggaaaactgacacaggtatactgcccaaagaaaagtacaacttatatatatagagtgaaaaatatgccatcgaacggaagaattacaaaagtgagcagttcaaatggaaaagtggcaaagatttcaataggtgacaataatgtccggatcaaaccgttaaaggtgggaaaatcaacgattaaagtgacggtaaaaacaggaaggctcctgacaacttttacatcacaactgactgtttataaatggagtaatccggttgcaaattataaaataggaaacaaacaaataaaaaaccagtttaaaaataccaatatttataattataagcttggaagcaaaaaaacattaaagtttgatgtaaaggcaaaaacaggctggaagatgacatcatttacttattatgacaagcttggaaaaagtacatcttatctatcttcttcaaagaaaatcaaactggaaaagggtggttccgtgcagattaattttacaaatcagaaaacaggtctggttgagaatgttgtaatctggatcaaataacagaatgaaaaattttatgaaaataagatttttcacacgcaggaatggagattttatggagaatttacttcaggtaggtgtcataacaacgacacacggtgtgcgtggggaggtcaaggtatttccgaccacagatgatgcggcacgctttaaaaaattaaaacaggtaatcttagacacaggaaaagaacaccttgcattggaaattgccggggtaaagttcttcaaaaatatggtaatactcaagtttaagggatatgacaatatcaatgatgtggagatgttccgcaaaaaaagtctctatgtgaccagggaaaatgccgtaaagttaaagaaaaatgagtattttatagcagatctcatcggtcttaaagtgatctcggatgagggtgaagatttgggagagctgactgatgtactgcagacaggggcgaatgatgtctatgtgatcagcaaagagggtgcggatgatattttacttccggcgatcaaagactgtgtaaaacaggtggacatcgagggcggtacgatgcaggtacatctgcttgacggcttaagagacttaaacagcaggcgggaggaagcatgaatttctacattatgacattgtttccggatatggtcatgcagggattaaataccagtattatcggcagggcagcggaaaagggactgcttacgatcaaggcggtaaatatccgggactatacgatcaataaacacaaaaaggtggatgattatccatatggcggtggtgcaggaatgctgatgcaggcacagccggtctatgatgcgtggagatcgatcgtcgataaaatcgggacaaaaccgcgtacaatttacctcacaccgcagggaccgacttttacacagcaggcagcaaagtcatttgcaaaagaagaaaatctgatttttttatgtggacattatgaggggattgatgagcgtgtcttagaggagatcgtgaccgactatgtctcgattggtgactatgtcttaaccggaggagaacttccggcgatggtcatggtggatgcgatttcccgtatggtgccgggggtgctgacaaatgatgaatccggttctacggagtcatttgagggagatttgttagagtacccgcagtacagccgtccggaggagtggatgggaaaaaaagttcctccggtattgctgtccggcaatcataaacttgtggatgaatggcgcagggagcagtcgatcatccgcacgaaagaacgccgtccggatctgtttgcgcgtgcagagctgacagaaaaagagcggaaaaagtggcgttaaaaataaaaataaaatttgtttacaatcacaaacttatgtgatatactataacagttgtgaataaaaatagatggtcctctgttacgaattcgcgtattaagaacatccaaattatcaggaggtcacaaaatgaacgcaagtgaaatcattaagaacattgaaacagcacagttaaaagcagaagtaccggagttccgtgttggtgatactgtaaaagtttacggtaagatcaaagagggtaaccgtgagagaatccaggtattcgagggtactgtacttaaaaaacagggcggaagcaaccgtgagacatttactgtaagaaaaatctctaacggtgtcggcgtagaaaaaacatggccgttacattctccgaacgttgagaaagtagaagtagttcgtcagggtaaagtaagacgtgcgaaattattctacttaagagatcgcgttggtaagaaagcaaaagtaaaagagttagtaaaatagtagatgtaagcgaaaagctgcagtggagacactgtagctttttttgtgattagatgaaaagccgtattcggatcagtacagggaatgtgttgcacaggcaaaaagttcgaaagtagaacttgaggcgtggatgaagcagaatctctttgataagtgattaatacccacaattgattattttctttgtgatacttttcaatttcttctgcaaatctgttttcaacatccttgtcatagcgaagttctgtaagtgtgcaaccttcaaaatcttttgcaaattttttctctatgacatcaaatgcttcattgattgaattttcaccatagagtgcagagtaaccaacaacacgattaatatttgatacatttcctctgtttccagtcaatacaaggactgctgccaaaactaaaattactaatacagcacatattgcaattatgcttttcttcttcatacaatcacattcctttgtcaaattccaatccgtcagattatttcttattgtaccatatagcaggatagaagtaaaaagttattatctggtatcagagcataagataacattcttttaaacgagtctcttgaatggaggggataggactgctataatcctacatagaaaatgtctggttacacaataggtgtgaacagcagcaatgtctgaaattttataatcaggaggagaaccaacgatgaaatacatccaacaactaagccgccagctcgccttagactactgttgcacccccgcagacatcctcgaccaaggaaaccacttcaccgaataccgcagtctcgaaggacggcgcagattcgaagaccaggacaactgtgccctgaaaataaccgcagtcaacagaaaactgattttcaccggaaaaaaggagatcatagaactctgccgcgaaaaatacgaaacctgccccggcgcatggtttatggatgtcgcaaacttccgggaactggatcacatcttaaaaccatacggctgccagttaaaaacagcacatccgtttttcctgccggagacagagagtgttgcaaaagaaacggggtttgagatccgaacatatgaccgtggggagatcctgcagtttgcaggggacaaccggtttgacgaggcattctgctttgacgaaaaatcacccgatatgctgggagtggcagcgatttcagacggaaagatcatcggcatggcgggggcaagcgcagatagtcctctgttctggcagatcgggatcaatgtggaaaaagaggcggagtgcagacatatcgcgtccactttggtcacaattttaaaagaagagatagagaaattgggaaaagtgccgtattatggaaccagtatgtcaaatcttgcgtcacagcgggcagcggtgaatgcaggatttcgcgtggcatgggtggaacttctggcggaagctaaaatatgagataagcctgtaaaatcaatgattttgggaccggaattatgaaaaaaaatatcagattaggtgagacaatattttttgattccaggtaaacaaaaaatgcttgcatgacctatcacacaatgctatactgtatgacagttagataacgttaacttgtattttgaatgcaaagtgaggagtaaggacatgtttaaaattaatgacaattaccagaaacttccgggaagctatttattttctaccattgcaaagaaagtaaacgcatattctgcagcaaacccggagaaacagatcatccgtcttggtatcggtgatgtaacacagccgatcgctccggctattattgatgcaatgcacaaagcagtcgatgagatgggacatgcagaaacgttccatggctatgcgccggatcttggatatgactttttaagaaatgccatcgtggcaaatgattataaagcaagaggatgtgatatttccgcagatgaagtttttgtatctgacggagcaaagagtgattccggaaacattcaggagatttttgcgcaggataataagatcgctgtctgtgatcctgtttatccggtttatgtggattccaacgttatggctggaaggaccggcacttatgatgcagatacacagatgtggagtgatgtgatctatatgccatgtaccagcgataacaactttgtaccggagcttccaaaggaaacaccggatgttatttatctgtgcctgccgaacaatccgaccggaacaacgatcaccaaatcacagttacaggagtgggtagattacgcaaataaagtcggtgcagttattatttatgatgcggcttatgaggcgtatatcagcgaggatgacgtggcacattctatttatgagtgtgagggagcaaagacctgtgccatcgaacttcgaagtttttcaaagaatgcaggatttaccggagtacgtcttggatttacggttgttccaaaagaattaaaatgcggggatgtctccttaaatgcgatgtgggcaagacgccacggaacaaagtttaacggtgcaccttatattgtacagcgtgccggtgaggcagtttactccgatgccggaaaagcacagttaaaagagcaggttggctattatatgaagaatgcaaaagccatcaaggaaggtctgacgaaagccggctatactgtatttggcggtgtaaacgcaccatatatctggttaaaaacaccagatcagatgtcttcctgggatttctttgattatctgcttgagaatgccaatgtggttggtacaccgggatctggatttggaccgagcggtgaaggatatttcagactgacagcatttggtacttacgagaatacacttgcagctatggagcggatccagacactgtaagatttaatggtaaaataaaaacgggcagaaccacctttggttctgtctgttttagcatattaaaacaaaagaatgatccacaatggtggacaggagacgaaatggaatactgtaaattacagattggctgcatgatcattgtcctttatgtggcgtgtatttatatcagagaaaaacagatttatcagatgaaacggaaaaacgtgttgtttgagacaattttggctgcagggattgtcggtattttctttgatggagcaactgcctatactgtcaatcatttagcggagataccggcttctgtcaacatatttttacatctgtgttttctttcttttctggatatttttgtgtttttgatgtttttatatatgtacgatattacaagaggactgccacagaaaagaggggaacgcatcggacttttcctgcctcttctgatcaatattgtggttgtgatcgtatttatgccccagcttgagtatcgcaaaggaacgtttaccaactattcgatgggaatgtctgcatatacctgttttgcaatggtggcgttgtatgtacttgctgcgagtggtatttttctgcacagctggaagaatcttgagagacataagcagattgcgatatctacttatttgttagtgacaatcggggtgacggcatatcagatgtttttcccggaggcactgctgtcgagtatggttccggcggttgtgatcgtgggaatttatctgaatcaggagacaccgctctatgcgaaactccagaaaaacaatgaagagatggtgatggggtttgcaacactggtggagaaccgtgatgacaatacgggagggcatatccgccgtacaactgcgtatgtgaaattgctggcagaggaacttcgaagccgcggtttttataaggagcagctgacaaatgattatgtggcaaatcttgtgatggcggcaccaatgcatgatgtcggcaagatcgcgataccggatgcaattttgcagaagccggggaaactgacggatgaagagtttgaaattatgaagacacatgcccaaaaaggcggaaagatcatccgggagacattcgggcatctgggaaatgatgcgtacgaagagatggcatatgaagtggcagcgcatcaccatgagaaatggaatgggcgcggatatccggatggactgaaagagacagaaatcccattgtgcgccagggtcatggctgtcgcggatgtatttgatgcagtatcggcaaaacgttgttacagggatgcaatgccgctggatcagtgttttcatattatagaagaaggacgtggcagggattatgatccggttttagtggatgtctttattgaaattgaggataagatcagaaaagtttatgaggaaagtaaggcagaataagagggggtttttgcagaaagatggatcggtcgatttttaggatcaaaaggacaaagactctgcatcaggattggaaacacaaaaagtctgccgagttagagaagcagaggcgggattttttagaagaaaagagaaaattagaagaggatcgtcgaaacttcgagcgggaaaaaagagaatttttcacacactgtcagcttgaaaaagacagtatgaagcgggaaaaacagttgtttgagacaaagtggaagattttagaggaagaactttcccagcttgcggatgaaaaaaaacagatgaaaaaaaagcgtgacttttatagatatgtcagagaacaggaagtgcgtgatatgctgacggtggggacggaaaatgtggtacgcggggaattgtttttcatcggtgtggaaagtaagagtgccttaaagaaaaggtataaacagctgctaaaaatctatcatccggacaatctctgtggggatacggaaacacttcaggagatcaaccgtgagtatgacaggctgttgaagcagtatgagctgaagcaggaacagagtgatacataaatgtttgcgtggggcggttactgtttactccttaccagtcgctccggtaatgtggggcattttgttgtttctgacagtggaaaacaggaattgcatcgtggaaaataatatgttagtataacgaagtaaagtgatacaaaacgaaagtaaaagcggaaaacaggagctgtatttacagacctgataagcgtattgagggcgcaggaaaggagttttatgtatattacatgtttggatgtagagggagtattagtaccggagatctggatcgcatttgcagaggcaagcggaattccggaattaaagaaaacaacccgtgatgagccggattatgataaactgatgaaatggagacttggagttttaaaagaacacggactcggtttaaaagagatccaggacgttatcagaacgatcgatccgctgccgggtgcgaaggagtttttagacgaactccgctctttcacacaggtgatcttaatcagtgatacctttacccagtttgcatctcctttgatggagaaattaggctggccgacgttattctgtaattctttggaagttgcagaaaatggtgagatcacaggctttaagatgcgtgtggaacagtcaaaattaacaacagtaaaagcactgcagtcgatcggatttgacacgatcgcaagtggagattcctataacgatcttggaatgatccaggcgagtaaggcaggatttttattccgttccaccgataagatcaaggcggattatccggatattccggcatatgagacctatgaggaactgctcagtgcgataaggaaagcaatggtggattagagaagtggtaaaaaacagcattggagaggagaatttgtatgaaaagaacaattcatgtgaaaccggctgcaccgcagtattccgtgattacaaacatcacatttgcacagacagatgcatggttcggacacaccacgcaggatcttcgtatggatttgatttatccggaagatacggcacacgattatccctgtattgtctggatctgtggcggtgcatggctgagcattgacaagtctgcacatctggcatatctgagcgaacttgcgagagcaggttttgtggtggcatccgtacagtaccggaccagcaacgaagcaaaatttccggcacagctctgtgatgtaaaagcggcgatccgctatctgcgtgcgcacgccgcaaggtatcacatcgacgaagcacatattggggtgatgggagaatcagcgggtggatatttaacctgtatggcggcattatgcgatgatccggcatatgaggtgggagaatatctttcttattccagcaaagtgcaggcagcgtgcccatggtatcctccgacagacttcagaggttttctatacgaaaacgaggaacagtgtgcagcatccccagagtcattgctgatgggaaaaaatgcgatgcgcaatcccagggaggcgcttgcatgctgcccggtcagctttgtgaccaaagatgctccgccattttttattatccatggaaaatgtgataagacggtaccatttacacagggagtggaactgcatgatgaacttgaaaaagcaggctgtgatgtcacacttttagaaattgaggatgcggatcatgcggatatccgtttctttcagaaagaaatctggcaggagatcataactttttttaaaacaaaattataaaaagaaaacagcagcagattcttcaaagatggaaaaatggagaattttactgcctgaaaaaatgggcatatagcagaaaattgtttgctatatgccattttcagtccatttgcgtctataaattaccgcctcgatattattcacaaggtctggcgaaatttattaagctggataaacaagatgtgcatcatcaatgtcatacagtgtgttctctaaataacggctggcaagataatttgccatgccaaggttcatatctaagtagttaccgcagtcctttggagaggcaccaggtacttcgtcatgaaaatcgcggataaattcaaacatttctatgatgagccctacgatatctttggatgtgtaattgcctgcgagcagcagataaaatccggtgcggcatcccatcggtccgaaatagatcgttttatccttataaagaggatgatttcttaaaaatgtggcaccaagatgctcgatcgtgtgtacttctgcggtattcataaccggttcatcgtttggggaagtcatgcgcagatcgaatgtagtgatgacttcggagccgacggtatcttttcttgatacatagacaccaggttctaatttaatatgatcaatcgtaaaacttgctattttttccataagattcctccatgtttgcgtttaaaatattgttacagtaatgacctgaccggaaatgtgcagcagtaaaagtaatttttatcttctttctattgctttttttgcggcggacaatgtattatgaaactaccataaaacagatattatagttcgtcaagaaaaattaaacaggaaaaagggagaaaataaatacgatgggtaattatgattttacaaaacagccatctcttctgatccagggagccatggatacagagacggcatatttcatagaacatttagaggaacatgagtgcgtcacgattggaaactggaagtttcacacgggatttctcggtgcaaaaagagagcctgtcatcatttcaaagacatttcagggaatggtcaatgctgcggcagcgacaagccttgcactggcatactttaagccatgggcggtgatcaatcagggaatcggaggaggccacgataaaaaatttcacagaggggacatcgtgcttggagaaaaggtcgttccgatgggagcaatcgcatatgcattttctgaggagggagcgggaattgatggaaaaagtttttcactgcttccggtggaaattttttaccgcgaaacgggaaagacaaaaaaagtgacagagtatccgtgtgacggaaaactgctgaaagcggcggagcaggtaaaaacgaaatatcataccggccgtggggtgattggttccggggatgagtggaacaaccagcttgaccggatcgcacttttaagagagcggtatcatacagccgtggaagatatggagtcggcggcggcagcccagctttgcctttcttatggagtaccgtttcttggcgtgcggatcctgtcaaattctatcgtaaatggagaaaagtttgatgaagcggtcggaatcgacggacagaaattcatgttatcactgatagaccagatgagagaatatatgtaggaatacagcaaatatacggcaatactttcttttgacaaaaaagtgtgctatactacctactcagaaaaatgaatatttatacacgaaaacgaggagaaaaagaccatgaagaaaacaggtaaacgtttacttgcagccatgcttttattctgtaccatactgatcggtgcagcaggctatgaagtgatggcagcagatgaggcacagagcacggaaagtacatctgaaaccgtgaattctgcagatgatctgccgggaaaaagaatcggtgtccagcttggtactacaggagatatttatgtcagtgattacgagagcgatggctccggcaccgtggtggagcgttacaacaaaggtgcggatgcgatccaggcattaaaacagggaaagattgactgcgttgtcattgatgagcagcctgcgattaagttcgtagagcagaacacaggaatccgtatcttagatgaagaatttacccttgaggactatgcgtttgttgttgcaaaaagtaatacagagcttttagataaggtcaacagtgctctggaaaaattagaagcagatggtacgatcgcagatattcagaaaaattatatcggcactgaggatgagattggaaagtttccgtatgaatctaaagatgtcagccatgaaaatggaactctgacggttggaacaaatgcagagtttccaccatatgagagctatgaagatggacagatcgtgggaatcgatatggatatcatgcgtgctgtcagtgatgaacttggtatggaattaaagatcgaggatatggcgtttgactcgattattccggcaatctcaacaggcaaagttgatatcggagctgccggctttaccgtgacagaagagcggaaaaagaatgttaattttacggatacttatacgacatcaaaacaggttatcattgtaaaagatgatacggtaacttctgaaaaagcgggacttagtgagaaattttatgacaactttataaaagacagccgctatgtgtacctgttaaaaggtcttggaaatacacttttgattacagtgctggcattgttagtcggtgttgtatttggatttctgatcgcaatcgtccgtaccaaccatgacagaaacggtgggctgactatcttaaatgcactctgtaagctttatctgaccattgtgcgcggaacacctgtcatgatccagcttttgatcatttattatgttattttccagagtattgacaccggaaaaattgttgtggcagtcattgcattcggtttaaactctgcagcatacgttgctgagatcgtacgttccggaatcatggcagtggatatcggacagtttgaagccggacgaagcctgggtcttaattacaagcagaccatgatgtcgatcatcctgccgcaggcggtaaaaaatatcctgccggcactctgcaatgagtttatcagtcttttaaaagagacgtccatcagtggctacatcggccttatggatctgaccaaaggtggagatatcatacgaagtgtaacttatgaggcatttatgccgctgatcgcagttgccctgatttaccttatcatggtaatgggactgagtaaagtggtaaatctgttagaaaggaagttaagaagcaatgagcgataatacagtcattcttgaggtaaatgatctgcataaatcctatggagatcacgaagtattaaaaggtatctccacaaccatcaaaaaaggagacgttctggcactgatcggtccatccggctgcggaaaatcaactttcctgcgttctctaaatctgcttgaggttccgacaagtggtcatgtattgttcgagggcacagacatgacagacgcatccgtggatatcaatcatgtccgtgaaaaaatcggaatggtatttcagcagtttaatctgttcccgaatatgactatccgtgaaaatattatgctggctccggtcaaactcggaaaaatgaccaaagaggaagctgcgaaaaaggcggaagacctcttagcacgcatcggactcgctgacaaagcagatgcctacccggcgcagctttccggtggacagaaacagcgtattgccatcgtgcgttcccttgccatgaacccggacatcattttattcgatgaaccgacatctgcactcgatccggagatggtcggcgaggtacttaacgttatgaaagaacttgcggcagacggcatgaccatggtagtcgtcacacatgagatgggatttgcccgcgaggttgcaaaccgtgtcatgttcatcaatgatggtgttatccaggaggagaacactccacaggagatcttttcaaatccgaagagtccgcgactgcaggaatttttatccaaagtattgtaatccaatagaccggctggggtatccctgccggttgttttacttttacagggcattagcggagcgtgcattctatgatttgagcaatatcgtcggtagatcttgcagcctgagcctgtctgatcacatcttctttctccgtgtctgtcattccggaaaaacatttcatcgcattttcgtttcgtcctaacagcattccaaatcccggtgggatatcgtctttttcgaagtgcattgcgtgtttcctcctttttttggggttatgagtcaaaaggtgtatgggggtagtgagtggtaaattgcgcaaagctgattctggttttgtttccgttgtacgaaaataagaaaaaccattctcagctttgcgcgatttaccacccccggaccgctactgccacaaactactgatcctctttttcctaacaccccacagtatccccacccccaaaagaaaaaatacgtttattttgccaaatccccgattttgtgttatcataccaaatagctatgtgtaaacggaaatatactttatggcacacagcctgacagcagcagatatcaggcttgtgtctgaatagtaaccatggagaagcagcacagaaatggagaatttgtatgaagtggaataaatatacaatagaaacgacaactgcagcggaggattacatgagtgccatgctggcagatttagggatcgagggagtggagattgaagacaatattccgctttccaaggaagaccaggcggatatgttcatcgactttctgccggaacttccaccggatgacggtgtgagtcacgtcagcttttatttggaggataatggagaggactacacggaattattaaaacaggtcaaaatcgcacttgaagatctccgcaagatcgtggatgtcggaagcggcgtcatcacctctgaccagacggaagaccttgactggatcaacaactggaaaaagtttttcagctcattttacattgaggatattttgatcaaaccaacctgggaagaattaaaagaggaagataaggacaaattcttaattgagatcgatcctggtgtttcttttggaaccggaaaacatgaaacaacgcagctgtgtatctgccagcttttaaaatatatccgtggtaatgcggaatatacaccggagaataaaacaccgaaagtattagatgtcggctgcggaagtggaattctttccatcgtggcattaaaacttggtgcatccgaggtggttggaactgaccttgacccggattgcatgacttcgacacatgagaattttgaggttaaccatttagacagcagacttggaatattttatgtcggcaacctgatcgacgacgtagaactgcaggagaaagtcggtacagaggagtatgatattgttgttgcaaatattcttgcagatgtcattattccaatggctccggtcattccggcgcgcctgaaaaaaggcggttactttatcacttcaggtatcattgatttcaaggaagatcaggtgaaagaagcgattgaaaaagcaggtcttaccgtggttgagatcaatcatcagggtgagtgggtcaatatcaccgcacagaagagataagcagcgtaatcagcagcaacgaacagaaaggcattagaaaaatgtatcagttttttgtggagagcggacagattgggaaagattctgtgatgatcgagggcagtgatgtcaatcatatcaaaaatgtactgcgcatgaagccgggagaaaagatccgcatcagcggaccggcaggggaaaattatttctgtgaaattgcagaaatcgaggattcctttgtgcgcgcgtcgattttagaaaaagacgagaccggaaccgaactgccgaaccggatctatctgtttcagggactgccgaaaaatgacaagatggaactgatcatccaaaaggcggtcgaacttggtgtgtatgagatcatcccggttgcaatgaaaaactgtgtggtgaaactggatgcaaaaaaggcggcggcaaagacagcacgctggcagggtattgcggagagtgcagcaaaacagtcaaagcgcagtctgatcccaaaagtttcagaacctgtgagctataaagaagctgtggcatatgcaatgaaacttgaccaaaagctggttccctatgaaaatgagcgcggcatggcggcaacgagagaggcggtagaggcggtcagaccgggagagtccatcggtatttttatcggaccggagggcggttttgcaccggaagaaatcgaagcggtaaaaggtgagatgaaactgatctcacttggcagccgtatccttcgcaccgagacggcaggatttacgacacttgcgatcctgatgtatcatatcgaaacgtcgtgcccggaaaaatcaaattagcctgactgtgatttagcggccgaatgaatttgtttcaaaattgatgggcgcggacatacacagaatgaaaacagtgcgaagagatagcgcagaaatgaagattaaaatgcaacatatataaagttttgtgcacacagagaaaaatgtgcagaacaggagtaacaaaatgcaggcatatctggataattcagcaacgacacgctgcagtgaacgtgcgaaagatctgatggtaaaagtgttgatggaggattatggaaatccttcgtcacttcatacaatgggagttgtggcggaacgttatatcaaagaggcaaaagagcggattgcaaaaacactaaaagcggatgaaaaagaaatcctttttacctcaggtggtacagaatcaaataatatggcactgattggaacggcgcttgcaaataaacgcgcgggaaaccatattatcacaacatcgatcgagcatgcatcggtgctttcaccgctggcatatttagaagaacagggttttcgtgtgacttatcttacggtagacgaaaacggacagatctcactggatgaactgcgcgatgcagtctgtgaggacacgatccttgtatccatgatgatggtcaataatgagatcggtgcggtagaaccgattgcagaggctgcaaaaatcgtaaaagaaaagaatccgaatacgatcatccatgtggatgcgattcaggcatatggaaaataccgtatctgtccgaaaaaacttgggattgatctgctctcggtcagcggtcacaaaattcatgcgccaaagggaaccggatttttatatatcaaagacaaaacaaagattaaaccgattatttacggcggcggacagcagaaaggcatgcgctccggcacagagaatgttcctggagcagcggcacttggagaggctgccatggagatctacgagaattttgatgaaaagattgcacatatgtatgcgttgaaaaagcactttattgaggaagtgacaaagatcgagggtgtgacgattaacggaaagaccggtgaggattctgcaccgcagattgtaagcgtcacgatccagggcgtgcggagcgaagtcatgctgcattcacttgaggaaaaagaaatttatgtctccgcgggaagtgcctgctcatcaaataaaccggcaccgagtaaaaccctgcagggaatcggactgaaaaaagcggatttagagggaacgatccgtttcagcttctgtgtcaatacaacggaagcggaaattggttatgcgatcgaacagttaaaagaaatcattccgttccgcaggaaatttaccagacattgatcgtaaagatagaaagggaaaaaatatgtacaaagcatttttgataaaatatgcagaaattgcaatcaaaggaaaaaaccgttatctgtttgaggatgcattagtcagccagatgaatcatgcgttaaagaaagtagacggaactttccgcatccgcaaggagcagggaagaatctatatcgagatggatggcgaatatgattacgacgaggcggtagaagcattaaaatgtgtatttggtatcgtcggaatctgtccggttgttattttagaggacgagggatttgacaaattagcagaagaagtgatccatcatattgatgaggcttatccggacaagcattttaccttcaaggtaaatgcgagaagagcgcgcaaaaattatccgcttgagtccatggagatcaatgcacagcttggagagcgcattttaaatgcattccctgagacacgcgtggatgtgcacaaaccggaagttgtgatcaacgtggagatccgtaatcagattaatgtatattcaacggttattccgggaccgggcggtatgccggtcggcacaaacggaaaggcaatgttactgctttccggtggaattgacagcccggttgcaggttatatgatcgcaaaacgcggcgtgacgatcgatgcgacttatttccatgcaccgccttatacctcagagcgtgcaaaacagaaggttgtggatcttgcaaagatcgttgcaaaatattccggaccgatcaacttgcatgttgtcaactttacggatatccagctttatatctacgagcagtgtccgcatgaggagttaacgatcattatgcgccgttatatgatgaagttagcagagcattttgcaaaagaaaataaatgtctgggtctgatcacaggagaaagtatcggtcaggtggcaagccagactatgcagtcgcttgcagcgacaaatgaggtctgcacgatgccggtataccgtccgttaattggttttgacaagcaggagattgttgagatctctgagaagatcgatgcatatgagacatcgatccttccgtttgaggactgctgtaccattttcgttgcaaaacatccggtcacaaaaccgagcctgaatgtgattcataatgatgagaagaaactttctgagaagatcgatgaattgatgcagaaagcgattgatacggtcgaagtgatccatatcgaagcgtagaaaacgggttccggggcgaaagatgtgtcagaaatgcaggcagtttatttttcgatacatcttttgatcagggcatcacaataaaaggacaacaaaaaaccacaggtatataacctgtggtttatgttccatctatgtgacaccgtaaatggtatgacatctgatctgtgattagattaagtatggttttaatgtttccataatctcatcaacattagcttcagcatggattgctaaatcgatcggtttggataagtctaagctgaagatacccatgatggattttgcgtcgataacgtatctaccggagattaaatcgaaatcatactcatactgtgtgatcgcattgacaaatgatttcactttgtcgatagaatttaaagaaatctgtactgttttcatgatgaaaaacctccttaaaattagctgttaaagttatttttatagtaatggtttttcgtggaaaagtcaacaagtaaatagatattatggaggtaaaaaatgaaaaaagcagcactgcacaatctggggtgtaaagtaaatgcatatgagacggaagctatgcagcagatccttgaaaatgcaggttatgagattgttccttttacggaaattgcagacgtatatgtgatcaatacctgttccgtaaccaatatggcagaccgtaaatcaagacagatgttccaccgtgcaaaaaagatgaatccggatgccattgtagtgggagccggctgttatgtgcagacaaaagaggcacaggcattggtggatgaaagtattgatatcgtgatcggaaataaccagaagcatgaattggttacactgttgaatgagtatgaaaaagaacacacaaaacaggcacagattgttgatatcaatcacgaaaaacaggagtatgaagaactgcatttaaagaaaacggcagagcatacacgtgcgtttatcaaggtacaggatggctgcaatcagttctgcagttactgcatcattccgtttgcaagaggacgtgtcagaagccgcaaaatggaagatgtgttaaatgagataaatgaacttgcaaaaagtggatataaagaggtcgtgttaaccgggatccatttaagttcctacggagtcgataccggagaaacgttactttccctgattgaacatgtacatgaaatcgagggaatcgagcgtatccgtcttggcagtttagagccgcgtattgtgacagaagactttgcaaaacggttatcggagcttacaaaaatatgtccacatttccatctgtctttacagagtggctgtgacagtgtcttaaagcggatgaaccgcagatatgatacggcagaatatgaggcgggctgtgatctgctgcgcaaatattttacgcatcctgcgatcacgaccgatgtgatcgttggttttccgggagagacggaagaagagtttaaaattacagaagaatatctgaaaaaaatacatttttatgagatgcacatttttaaatattcggtgcgtgaaggtacaaaggcagcagtcatgccggatcaggtgccggagcagaaaaagacagagagaagtaatattcttctgtcactggaaaagaaaatgtctgaagaattccggaattattatgtcggaaaagaaaagacggcactgttagaggaagaacttgtggtagacggaaaaacgtattttaccggatacacaaaagagtatgtcaaagtggcatttgagacagaagaaaatatgaccaatcagtttgtgactggaaaaataaaaggaaaattaaaagacgatatttatcttttggttgaattttaggacaaactatattaaaataaaaacaagcaatgctttttatagcaggtataagggcgtgaaaaatatgcagaatatcaataatacacaatatttcagagtggagaaagagccggagttaaaggttggtgacgtgcttacgatcgtatatcgtgcactgagcgagaaaggctataatcctgtgaatcagattgttggatatattatgtctggagatcccacatatattaccagtcataataatgcaagaagcctgatcatgaaagtggaacgtgacgaactggtcgaagaagttttaaaggcttacatcaaaaataatcattgggaataggaagtttatgcggattttaggtttggattttggctctaagactgtcggtttggcagtcagcgatgagcttttattaactgcgcagggactggagatcataagacgccagtcccctaataaactacgccagactttggcgaggatcgaagcgattatcgcggaatatcaggtggagtgtattgttctgggttatccgaaaaatatgaataacacagagggagagcgttgcgagaagacaaaagagtttaaagagatgttagagagacggacaggtttagaagtcatattgtgggatgagagactgacgactgtttccgcagataaacacatgatggagtccggtatccgcagggaagaccgcaagaagtatgtcgatgagattgcggcagtctttattttgcagggatatctggattatcggagtatgcacgtagaaaagtaaacaggttctgacaaaaaccgcaggttttcgaatgcggtttttgtgttatgcatggaggatgcacatggaaaaagtaacatttgtggacccacagacaaaagagagtattgatttttttgttgtggaggagacacaggtaaacggtacgcgttatttttttgtcacggaagaggaagatggcgactgtgatgcgtacattttgaaggaggtcgccacagaggacgatgacgttgtgtgcgagatggtagacgacgacacggaacttgcggcagtaggtaaaatattttcagaattgatagaggatgcggacattgaatatgaaagagaataaggaggcaggaatcagccagaatgattcaaaaaaagcagagagaccggaacgaaaaaagagaaccagtgtaaaagagaacaaaaaagaaaaaacttcaaaacttaagatcattccgcttggcggcttagagcagatcggaatgaacattacagcttttgagtatgaggacagcattattgttgtggattgtggtctgtctttcccggaagatgacatgtatggaatcgatcttgtcattccggatgtgacttatctgaaagataatattgataaagtcaagggatttttcattacacacggacatgaggatcatatcggagcgattccgtatgtcttaagggacatcaatgttccgatttatgcgacaaagcttaccatcggtatcattgaacataagttaaaagaacataatatgctgacaaaagtgaaacgcaaggtggtaaaatacggacagcatatcaatttaggctgtttccgcgtggagttcatccgtacgaaccacagtattcaggatgcagcagcgcttgccatttattcaccggcaggtatcgttgtgcacacaggtgacttcaaggtggattacacaccggtatttggagatgccatcgatttacagcgttttggtgagatcggtaaaaaaggtgtacttgcactgttatgtgatagtaccaacgcagagcgcaagggatttaccatgtcagaaaagacagtcggcaagacctttgatgagatctttgcagatcacaagaatacgaggatcatcattgcaacatttgcgtctaacgtagaccgtgtgcagcagatcattaatacagcttataaatacggcaggaaagttgtcgtggaaggacgcagtatggtgaatatcatcggcattgcgtcggagcttggctacattaatattccggacaatacgctgatcgatattgaagaactgaaaaattatccggatgagaaaacggttatgatcacgaccggaagccagggagagtccatggcggcattgtcccgtatggcatgtggcatgcataaaaaagttacgatcaaaccgaacgatacgatcgtgctcagttccaacccgatcccgggaaatgaaaaggcagtttccggtattatcaatgagctttccatgaagggtgcaaacgttattttccaggacgtacatgtatccggtcatgcctgtcaggaagagatcaaactgatctactccctggtaaaaccgaagtatgccgttccggtacatggagagtaccgtcatcttttggcacaggcgagagtggcagaagaacttggcatcaacaaggacaatatctttatcctgacctctggtgatgtgcttgaattagatgacgaaaaagcagaagtgacaggaagagtccatgtaggtgatatcatggtcgacggactcggtgtcggtgatgtcggcaacatcgtactccgcgacagacagcatcttgcggaagatggaatcatcattgtcgttctgacattagagagcggttccggacaggtgcttgcgggtccggatatcgtatcccgtggatttgtctatgtcagaggtgcagagagtctgatggaggatgcaaagcatctgcttgaagataagatgcagtattgtatggataaaggaatcaccgactggggcaagatcaaaaatgagatcaaggattctttaggtgatttcgtgtggaaagagacaaagcgcagaccgatgatcatgccgatcattatggaagtgtaggaaggacagatgtatcatgagcagaatggatgaagccatgcaggaactggtggatgcaatcaaattcagcgaggaatatatcagatatcaggatatcaaaaacagagtgcacaatcagccgcagttagagcagcagatccacgcatttcgccacaaaaattatctgttacagaacagtgatggaaatgtggatctttatgatgcgacggataagatggaacaggaataccgtgagtttcggaaaaatccacttgtcgcagaatatcttgcagcagaaaatgctttttgccgtgtggtgcagaaggtcaactggacgctgatcgaagaactggattttgaagttggatttgaggaatagtctggaggatttcatatgaagctgaataaactggtattaaaatttgtcagcatcagtttttcgattctggtcatgttacttgttgtgatcggtttgataaagctgggcagtttttgctatgatttcggctatcgggtgtttaccgaaggaccggtggaagaaaaacctggaaccgatgtgaccgtagatgtgacgggagatctgtcggaatatcagattggaaagctgttaaaaaaagaggggctgatccgcgatgcaaatctgttttatgtacagcttcgtatgtcagcatatcacggtaagttaaaggcaggaacctatacattaaatacatccatgacggcaaaagatatgatggcagtcatggcggcagaggctgaggagagcactgagagtacagaaaatacagaaaatacagaaaatacagagtatgaaacagattctggttcagctggacagtcatcttcggatggaactaagacagatggtgccggtgaagaaaaccagaacacagatgaaaatgaacaggcaggagcagacgagtgatagtagatgaacgtctggtcacttatatcaattcacttgatacagggaataccagtattttagatcagatagaaaaggaagcactggatagttatgtgccgatcatacggaaagagatgcagcagtttttaaaactgctgcttgcaatgaaatgtccgatgcggattctcgaagtgggaactgcagtcggatattctgccatcttgatggcagaatatgatccggtgccatgtgagatcacaacgatcgagaattatgaaaagagaatcccgatcgcaaaagagaactttatccgtgcgggaaaagaaaaacagattacactgctggagggagatgctgcgcagattcttccgacattgacggaaacctacgattttatttttatggatgctgctaagggtcagtatattcattttatgccggatattttaagactgcttggctccgaaggaacattggtttcggataatgtgctgcaggatggtgatatcatagaatcacgttttgcagtcacgaggagaaaccgcacgatccataagagaatgcgtgaatatctgtatgaactgacgcatgatgaacgccttgtcacggcagtgttgccgatcggtgatggagtgactgtgagcacatggaagaaatagaaagggtgcatcgaaaagatgcgaaaggacaggtaagttatgagaagaccggaacttttgataccggcaagcagccttgaggtgttaaaaattgcagtaatctatggtgcggatgccgtgtacatcggtggcgaggcttttggactccgtgcaaaagccaagaatttttccatggaggaaatgagagagggaatccgttttgcacatgaacatgaggtaaaagtatatgtgactgcaaatattcttgcacataatgatgatttagagggtgtaagggagtatttcaaagaactggcttcttttccaaaagaggaaaaaccggacgcacttatcatcgcagatcccggcatatttatgatcgcaaaggaagtatgcccggatattgaacgtca

SEQ ID NO: 5121 - DNA, 33945 bp, Unknown
  gut microbiota DNA sequence
gtgaagccatccttggagattcctgtaacttccgttgttccgctatcctccacaatataatgtgtgtatgatccatctggtgtagtctttttctgaaccaaatccgttctattccacgtccaatccaaagaaactcctaaaaagttttccgtatttacgagttcatccatatttttcgctgattcatcataatcaaatcccgttccttcttcgcgtgaaatatttgttttatacaagctataacttaccacattgcaagaatatgtctttcctttataagttgctgttacaatagcttttccaccttttaaattattatatatcacagcactatttccttcaggatatacacgcactattttttcatctgacgtattccatataacatcatcacaatctgcattattcaatgttaaatacgttccatcatccccatctccaaatttccaagtaatagatgtagtgcttaactttggtgtgtttgtctcaatgctgtcattattatcaggctttttatcttctgtactctcagtattttgtgcatcatctttatgcggcttctttgcagctgtaacccttatgttacattttaatacagatccgtttacttttgcaatgactgtcgtatttccctgtttctttccagtaatcttaccgttttttactgtaacaacatttctattcgaagacgtccaaaccactttcctgcttgtaccttttactttcaatatatacgattttccactctcgatagtgactttcttcttgctgagctccggtttttccactttaacattacatttcaagatagtaccatttatttttgcctgaataaccgttttacctgttttctttccagtaactttaccattttttacagtcgctacctttttattcaaggaactccattttactttccctttcatgccttttattttaagatttacagtttttccaacattaactataatttcattttggtttaagtatgctttcgcaacagtaattttatatatatatgtatttcctttgtcctttatcgtaattttagcttttccaatcgattttcctatgatttttccattctttattacagcaatctttttgttgctagtcttaaatgttgcctttccgctaaaagtctgctcaatggcatatgtttttcctttccctattgtaatatcctttgttacagtttttgcttctacgcttacatttccgatcatacaaacaaaaaatgtgcatatcactgtcataagaatccatataatgcaacttttctttttctctaatttaatcataatccttttctcctcattataaatataaaatctcctcacggtgagtaacctttctgtagccttcatattcaactacatcaattataacatgctgggtacgaagttttgaataaatatttcataacttttctcacttttggaaattaaatctaaaaagcaaacagccagctacaaactgcttgattcataactgtcctagcgcgttgctttctttcttatttgttttttaatatacatacttgtcatttcttttatcataagccttaactttcctgcaaatcattttttcaattttcttctttcgagttgtatatctatctatattagaatttttcgcccaaaaaataacagccacatataatccatagcaaattacagcccttaatatttcaaaacaatctattcttctaatatttgatgtaaaagatgaaataaatccattatccattccatattgcaaaaaactatttatgattataaacaaatacatattacctaccataaggaacaaaaatgctagaaaaaatttaaaatatgtaaaaattttaagaattatacatggtaattgatccatcctgttatcatcattaggataaatatccaagtaatcatatataaatacttttaataactttttatctgttatcgtattatccgtttggatttgagatgtatttatcaaatgtataacatattttggaacacattcatcggtatggtttatctgatcttttatctcttgtaacgcattttcatttccagcttttaacgcttcaataaatggaatcaatatcttattataatattgtttttcccgtttaaaaccacccttaaaaaaagtattatatattaatgtgcacattgtaataagagacgtaactattgccacaataaaatttatattttcttgcatatcactttccctttctatatttattgattgtccttttttctcgattactgtatatgtctcctccgtggtactgcatttcttcatatctcactttctataatctgttcttttattttcagatattcgaacaaaacaaagcgatactttgtgtgatttgacattctaaaaactcagatacatctttcgtattcagagtataacacaaagtgccgcctgtacacaattttttgtgttacagacggcacctgctaataatttttaagattcgggaggcaaaaggtggttttcaattttttgacccccgaatctttttaataatatcccggatatccatgctttgcccgaaaggcttcctggctggcgtggtaatcttccagtgtcatatggttttcctttaaatactgttcaaacatcagtgaatcgatctcatcggcggtatacaaagtacctcccggataccggcagaatatcttttcaccctgattgatgctgcgcataaaatccataaaatcatccacgtcgatcttatcatctaaaaaatctctccagaaattttcatgcgcctcgaaacgcagattccagtcggacggaagctgaccgatcaatgacatgaccttttcatactgttccctgttctcaaaagaaatagaccactcatagccttctgtctgtcccgctttccggcagaaaataccctcctcggtataccaggtgatatagcggatatcctctttatccggctgatcggcaggatatgtacaggatgtggaatctgccgtgagcagatcaccttccgtctggaaccctttttccatggatactttttccatggatgcttcttccacagatgtttccttctcctttcccagctcttctgccgctcttttttcctgttcttcctccatcagtttccggatcgcatcttctaaggaatcgaatttgctgagaaattcatcccactctttctctgtaaaggactgtgacccgatctgataggaattttccgtttcaccatttttgatttttgtaaagatctcctcagatttttcttttaaaagcctggcatattcttcccgtaaatctgtgacagattgctctgaatctgccgtttctgccgctttcttcatattttcggaccaataactgctgtcaaagcaaccgctgtcctccaatatactcctgtcagaacttctttttccggtatctagttctttcattccggcaagcagattatcagccttctcgcctgcagcctgaaaattaaaacgaaccgattgtccggactttacgtttctcccggaactgccggatacagcaaatgttccataacttcctaccccgttaactgtcatttttctcctttctgcagtccgtctgtcagtcgggactgctccactcccctgaaaggaccgagtggttactttatttatcggctgctttaaccatttcccccagtcctttacggattcttatgcgcgcatgtcaaacgggtgatatgcttttttctctatggcatcctgctgtaatttttcctcggttgacagttccttcgttgataatttctgtcctgataattctttctctgcagtttcttctggtgctttctccgttggcagtgcttcgatgttttccgtcaggtcaccggtcatttcttctgtcatctgatctgtgatctctgacagcttctccatattttcagcaagcattcccttgtcatcgtctgttccaagcgcctcatccacagcttcttcttttctttcttcctcggtctttggcttattcttctctgcctctttggctcttttctcagcctcttcctccgcctcatccatgatatgaaacatctgcgaactgttatactcctgctttgccgcagcgatctcatcctcataggtatggaacatttccagttttttggcaatatcctccaccgtttcggttttcatatttttcagattttctttctgtgcctcaaaaaatgcaactttactgtcccgctctgactgtctctccattttttctttcgtgctctttaacatattcggattcggatgtaaaatcccagacatttgttttgaaaaattgatcgtataactcatttttacccccggtattacaaataaatcttaacatcattgtttcttttgttaatatcgtcatttctgccattttgtttaagcaaaaaagtgtatggttcttaaatcatttctttattctttcagcagctatttacctgtaatccgcagacacctccagataacttcgttttccgctgatataatctgcatgtgcacgttccggatctttgcccttaaatacggtgcaaagtccacacatatcgcagtctgcgatacacggaaaggtatctttgatatactgtcttctttcctcttctgtggaagatgctatctctggcggtctcatactgcacctactttaccagaccggagttgcttctgtattcttcattgatctcgcgcagttccttctcgccattgatgtatggctcgtaaaatgcatcaacagaaccgccgcctaaattgtcacagccattgcagaaatcgcaggctcccccgcactggttcaagccttcctgtactatgcggattctttcttctcttgtggtgtctttgatcagtatgctttttatttccatgattttctccataaatttcttttttaattttcaacaacaatctcccagtatccattctttggcgagccatgtcgaataagaataccgtattcttttagtttttttatattcttttctacatttcgactactgattcctaattgctctgctaatcttactgcggacaaattaggatcatcagaaagaaagttaagaattctcttctgcgtatcgttcagttcaatatggcgattcttctccgtcccttctccgaactttctccgtctcttctccgtcccaattctaattcatctatgaaatcaattctttctcgctttgtcaaagaattctttctgaaaagttctacacgaaacatattatcaaattcctgaattctcggctttggaagtccatacttttctgctgcatttagaattcttttaattccactgccccatgcctctataagccccatctggctgaatatgttagcaattcctttgtttctgatttttgaatgaccattcataacttcttcataagtcagtccattatataaacctcccggagatgttacttccaaacgatcatcataaatcgcaacctgaatacaagattcatctaaaatatttcggtggcaatgggcattaataatcatttcccggattgcttctggtggaagctcatatttttcttttctcactaatccctcaatcgttgctccaagccttatatttctcaatacaaaatctaccgtttcctatatctgtgtatatataggacctgtaaactcccgcttatctaaaaatactgctggacccgtccccttaaatacagcacattgtgttttagaaaacggaaaatacccggatgtcagcaacgcataggcatttgtcgccaataattgtccctcactctgcttgagaatcttccaattaataagctactccttcttaacagaatattctgacattcccgcttttttccgaaaaacttcgatatcctgacaaagtttttctgtcgcttcttcagtaactgtatatcccacacatgtaagttcatcccatgaaattctagcaccctccatttccagttcttttatcttttctggaaatgcctgtctggatgtccctgctacacgtatataggtaccattttcttttccctttgatttcagataatatggtcgattttttccagcctcgacagatactataataatcgtctttccttccactgtctgtggttcaatatctggaatgatctgtggcatacatgaatctgaaactgcagttgctatcgcatccatggtctgaaataatatatcattttccacaccaataacctgatggtttttatcatctacaccgacaatcagcttgccgccctgcgtattagcaaaagctacgattgttttcacgtacttttcacttttgtctggtaatgaaactttagactctatattttttgattcaccggaaaacattgtaccttttaccattctgtcactcctattcaatctacagtataaacaatagaatgcacgctccgcaaacattctattgtcatgaattagcctgcatcactaacaatagtatacctcttatcaggctcataaaccactttttctctttctcaatcattggggttcctatccagaataatatcaccttatcacagatacttcttcacctgctctgccgcttcctccatttttacctgtgtctgaagcgtcttgtcacgggaagccacctcgacgactccctgtttcatatttctcgggctcacaataacacggagcgggataccgagcaagtcggcatcggagaacatgacaccggcactcacggttctgtcatcataaataacctcgatccccatctcctgcaatttctcatacagatcatccgcaaactttctgacttcctcattgtccgctcttaccgcacaaagatgaacctgccacggcgcgatcgattttggccagatcggtccgtactcatcatgatgtgcctcgcagacagcggcggcaagtctgccgacaccaatgccataacagcccatgattggtgttttgctctctccgttctgatccacataagtcatcttcatggctttcgtatatttatctccaagctggaagatgtttccgacctcgattcctctggaaatacggatcgtcttttttccgcatttcgggcagataccgccctcatatgcctttgcaaaatcatgatattctgcatccggcacatctctttgcatatcaagtcccttataatggtactcgtcctcatttgcaccacaggaaaggttatttctgttttctaatgatctgtcatataaaacgatggcatctccatttattttcagtccgaccggtccgatataacctgcgtttaatccgcactcttcggtgatgatggctggatgtatctcatctttcaaatagttgaccagttttgtctcattaatttcaagatcgccgcggataaatacgaccacataggtgtcatccaaatttttctggtatacaactgccttacaggaattgcaggtttcatccccgaaaaatttacagatatcctcgatcgtatgaatgtccggcgtatgcactttttcaagttctgcggacactgcatctcttgctatatcagagatattttctgccgcttccatatttgcgcggaaatcacattcattacacagcacgatagaatcctcaccgaccggggtaagaagcatgaactcatgggaaaggcttccacccatcataccggaatctgaagccaccgatacgacctccgggatgcctgctctctcaaaaatacgctcgtatgctttgtggcatttttcgtagtactggtttaaatcttcctgactggtgtggaaggaatacgcatctttcattgtaaactcgcgcacgcggatcaatccggctctcggtcttgcctcatcccggaattttgtctggatctggtagatcataaatgggtatttgttgtaacttttggcgtattcgcgcactaaatgtacggcagcctcctcatgtgtcattccaagcaccatctttgcattgttccggtcagtaaaacgtaataattcttctcccacgctctcataacggccggattcttcccaaagggatgccggcatcacaactggaaatgatacttcctgtccgtctaatttatccatctcctcacgcaggatctgctcgattttgtgtgtgatccgtttgagtggaaggtaggaagagtaaatgccgtttgccatgtatttcatgtagccgccttttaccatcagggcatggctgtcgatcacgcagtctgccggtctctcacgaaaacgttctccgattaatttttctaatttcattgtctgcctcctttttgtttgcataaatggaagatgatgatatcaaaagatgtgtttttcatcttttgatatccgaatcctgtacattaaaaaagtcccaagctgcaactaaatacagcttaggacgaattatcttaatccgcggtaccacctaatttcaggatgttcctgcactccggtacaaattttcattgataccttatctctgtaacgggagaacccggcatagcctgatgtttccattcggtatgcagctccatgaccggttcatcatgttccgtgaaagactcgcacctgccgtcctctctctggacactttccatgattactatttcacttcctcgcattaaccgtactttagcattttgtgcgcggattgtcaatcctgatcctgcacaaattcttcccgcatcggtgtaaaaatatctaagaggattccctctttcaggcagacacagccgtgctcgatggaatctctctttaacagggcatcaccaggatttacgatcttcttttctccgttgattgtaaattcaaactgaccagacaccacataggtgatctgagtgtgcgggtgatgatgcagtgcaccgatggcacctttttcaaaatgattctccacacacatcatctcatcggcgtacgctaatattttgcgcttcacgccctcgccgcaaacttctgcatcaatttcattgttaaagttccagatctgattttttttcgttttcatatgaaatccccctcgtataatattattgattttgttttttcagataacgcaccagcgctaaaatacagaccatatcgataaacacaacgaccacgatcgatcccattccataaaagatacctgctgtctctgcgatcttcccaatgatcgacggcattacgatcgaaccgatacttgcaattgttaaaataaaactccacgcgatcggatatttttcaatgagatttcctgcaaaggaaaccgtcgtcggataaattcccgccatgctgtaaccgaaacccatgataccgatcacgatccatacggtactgcggctgaataacagtaaaaagaaaaagcatacaagtcctacgcccatgatcggcagcagtttttctttttgcattctggtggacagccaggctgtcgtcagacgtcctgctaaaatcatcacccagagtacactcgccgtcatctgggatagggatgccggcagaaatcctgtatccttaaaatatgtgatcatccatccgatgacaccctgctccgcgcagagatagaaaaataatgttgcaacgcacagataaaacagcggttctgagaagaatccgaaactgccgccttttttctctttttccacccggtcattttccattgggatcattgcgtataaaatccagcttaaaattcccatcgcaagcataaaataacacgctgtgatccagccggattcccctgttgccgtaaacagtgtcagaagaatcgggaataaaaatgccccgacagagaacatcgcatgcagtccattgatcgtccatgcttttcccggtgctaaactgttgattgccgtgttacagaaattactcgttgctcctctcgcaacacctgtcaggaaaaatgccattgcaatgcaccagttgtgatttccgaaaatgatcagcacatacgaaagtgcaaaaaacagattaaaaaacaaaatactcttttttcttccaatcgcgaccggcagcaatcctgcggtaaaactagaaaacagatttcccacagaatgcagacttacgatcaatccgcaaaatgcataatctagtcctcttgcatccctgataaaaggaagcagggatccaatcgaaagtgccagcattccattcagcaaaaaaacactgtagttgcataaaaactgtttcttttttattttatcctgtaaaaaatccatctgtttctcctcactcattattttcttcgataatctgttcgatcacgtccatgtagtccgcgcaatacttttcatacacgcccatgaccgcctcctgaaaacgctttttttctgccgcagaaagttctaccacttccacaccctgtttcaaagcgatctccttagaatccgcctcacgttctttccacaactttctctcatacagcgcagattcttttgcgcactctaagatcatctgacggtcatcttccgaaagcttgttccatgtatgtttcgaacagatctgcatctccggtacccggttgtgttcatcaactgtataatatttcgccacctcataatgattcatcgcctcataagaaggccagttattctccgccccgtccaccgttccgcgctctaatgtggaataaacatccgcatagggaatcggcagtgccgtcgcgccaagtgcctccaccatatcgaccatcacctccgattcctgcacacggatacgcatacctgccatatcctcaagacaggtgatcggctttttagaattataaaaatttcttgctcccgcatcataccaggaaaggccaatcagttcgcttttacttactttctccaaaaagtcactaccgatcctgccatctaacactttccacatatgatccgaatcagaatacagatatggcatctgcaaaacatttaattccggtatgtactctgctaactgcgacagggaaacccttgcaaaatcaatgcctccatactgcatctgtgcgatcacaccgctctctgcaccaagttccccctctgcctgaactaaaatctttattcttccgctgctctccctctccaccagctcggcaaacttttttgccccaagtgttgtcggataatcctccgtctggttctccgcataggacaggacaaattcgggagctctcacgctgcgcagcctgtgatacagaaaaaatccggcgctcaaaaccactgccgcaaacaaaatcaagattcgtctttttttcatttatcccaatcctccggcagtgttccctttgttcatctgttttaaaatctccatgcggtattccgtaggagtacttcccatggcacgcttaaatacttttgcaaaataatttgaatcccggtatcccacatttacgctgatatcttttacattgatacggacatcggcaagaagctgctttgcccgttccagccggtactctgtcagatatccaatgaaacttttatcaaaacactgtttgaatattttgcagaaataggcgtctgaataattcatcttctccgctacactctgtaaagaaatatcttctttatagtgcatgtcaatatactgtctgatattttctgccacagcgctcatcctgacattgccattttccagttctgcatccttctttttttcctgcatatccacaggcttttcccggacatttttctgcgatccatctgccttttcctcaagcagccgtattgcttcctcaagcaccgctaccagttcttcctcagtccctggtttcagcagataatccagtgcatgtacggagatcgcacgttttgcataactgaattcatcaaatgcagtcagaaaaataatgctgcaatccctgtctttctcccggatctgctccgctgcctccaaaccattcacacccggcatctcaatgtcaagcagcgcgatcttacaatctttttctgtaaaaaactttgccgcctccctgccgtttacggcttccacaacttctaactgtccggaaaaatatttttttatcgttctccccacaatcattctctctatcggctcatcgtccgccaccaacacacggtacatcatgctcccccacttccttatgtctgatctgtatttttaccacagtccccacatcttttttactgtagatttctacatttccatcctgatacattgcacggatccgccggaaaatattgccaaggccaatgcctgtctttccatcttctttttccagttctccccgcagatgcataagtgctgcttcgtccattccaagcccgttatccccaatggtaattaacgtaaatccatctttctgccagatatgtacccggacagtcccaccttcttcttttttcgaaagtccatgaatgatggcattttccaccagcggctgaaatgtaaatgccggaacaatgactttatctgcatccacgctgcaatcctttcggtatgtgattctgtctccgaaacgcatctgctgcagatacatataatcttccataatttttaattcctgtgacaggcacacctccgtgtcctgatttttcaggttatagcggaaaagtgccgacaatgcacggatcattttttcagtagtttccgcttcctcaaggcttgccattccaccgatgacatttaaggtattgaacaggaaatgcggattgatctggctttttagaagttcaagctttgtcatctccagacgcttttccgtctctaacttttcaagctcctcctcatgcaaaagatctaaggtctttcttttttcctccagtgcctgaatgtactctcctgtggcgtatttcattttattgaacgcccggaccagttcaccaagctcatccttgttgtccacctcaacatccctgataaagaaatcatttgcagcaattttctgtgatgcatgtaccagtttaaaaatcggtgccatgatcgtttctttcatcagtgccgccatctctgcaattccaaaaagaagcaggattcctgcaaaaattaccaccagcggaacactgatcagtgtcggaacctttttctggtacgaaacatctccctcctcgatcgtataattcataagtgttccggcataattctttaagtagtcctgcatgtcataaacttcatacagcctgctgacataatctgtcacattatcttccatggacaggattgcatctcttttagtgcaataaacttcatagctgctgcggatcgaccatgtttttgcatagcggagttccccgatcctgcgatactggaatggcagatcataaaccgcatgttttgtacgtttcatggaacgctctaacgcttcttttttctccgtatccggatttctcatatagctttcaaacagtgtgctctcctgctctaatgcctggatcagttcactgcactttgcattgtcctgcaaaataccattaaaatcggtcagtgaaaaccggacaacccagacattaaaaacaacggaaagcaggatggccacacagaccatcccggtaaacactgctattttcttttgaatggtaagctcctgccaccacttttttatccttttcttcaagctgtttatcccatcctgcttctttctccatttagctgtctgatctgccagcccgcatacactaattcgtctctgcgatcctttcttttgcaaatgcaaaaaatggttctttctgtgctcccaaaatacggtttgtaagcatatatccatgtcttgcatcggaaaaaacgatcatcatgccaggctcgtttgccacccgcagctttttccatccaatgctttccttttctttccccacagtcacatggagtcccgcatcgtcaaaggaaagttttacatctttcggcatcgtttttgcctgccctttggctttcagatagatcgcgatcggctggatcaccggaaacagcagacatccaaagagcatcagcatctgcatcagatcccctgaggtacggaaaaattttgctgtaaataaaatcatcgccaccgtaaagaccatgttgcagactcccgccaccgaacgatatgtccggctcattgtcagtttccagaaatctcctgcggtcacttcgctcttaaattgatatgtcatgccatttcctcccgtaattctaaaatcatccgccgtagccgccaaatactctcggtaacagaaggcttacttccggaatgaatgtaagtaacattaatacaatgatcatacagatatagaatggaagtgttgcctttacgacacgttccatttttacaccgctgactgcggaaccgataaataatacggatccaaccggtggtgtcaaaagaccgataccacagtttaataccatgatgataccgaactgtaccggatcaatgccgattgatgttgcgatcggaagtaagatcggtgttgcgatcaggataatcggtgccatatccatgatacagccaaggaacagaagaatcaagtcaattaaaagtgcaatcacgatcgggtttgttgaaaatcctacgatcgcatttgctaccatatccggtacatgtaatgtggtaaggcagtaaccgaaaatactcgaagtagaaatcaggatcaatacgatcgataaggtatcgatacactgttctaaacatttccatacacctttccagtcaagtcctttgtaaatatatacactgacaatcaggctgtaaaatacagcgattgctgcggactctgttgcggtgaaccatccggcaactacaccgataactacgataacaaccgctgcaagtgcccagatagaaataccaatctgcttcaataatcccttaaagctgaacttatctccctttggataatgtttcttctttgagataatgtaagaacctaccatcagggaaactgcaagtaaagcacccggcagatatcctgcaaggaataaacttcctacggaaataccacctgctgacattgcatagataaccatgttgtggcttggcggaaccaaaagtccctcacaggaagaagtaatggtaactgcggtagaaaaatcatcatcatatccctgatctaccatcattgggatcatgatacttccgatagaagcagtatcagcagatgcagaaccggaaattccaccgaaaaaataagatgctacgatatttaccattgccataccaccggtcatccaaccgacgcaggcattggcaagtgcaatcagtttttctgatataccaccggtacccatcagtacacccatcgtgataaagaacggcactgccatcagactgaaagaactgattccttttaccatctgctgacagatcgtggtaagcggcaatccctgtgtcagtaaacaaagtaatgatgacaatgcaactgcatatgcaatcggaaatctaaggagtatcattactaaaaagctgatcagcaatactgtgattgcaattccttgtgcgctcattatttttcctcctttacaaaaattcctttgatatggttataaactgcttcaatctcaaataccaccattgcaattcctgcaagtgggattgggaaatacatccagaattttgaaacacttggcatacttacataatttccttttgcaccgatctggactgcataggaaaatcctactgtaatcattaccacaccaaggattaatactgccacatctgctaaaatatccagtgcacggatcacggattttggcagatactggtcaaatgccgtcatacggatatgtgcatttcttctgattgcaagtgctgcggacaatactgccatgtaggacatcagtgtcagaacgacttcctcgctccatgccggatccggcacaaacggaacgtatcttccgacaacgcagacgcttgtgatcacaagatctgccgtcagcaataatttacatatgaataaaacgatcttatatgtaatgtcatatgccggttttattttatcaacggtctgaaaaaattttggcataaactcatcttcctcctttaaaaatagccatctttagaaaaggagcacagagagcaggtattctctctgtgctcctttgatacatcagtcttttagtttgccatatcaagaatctgctgatataactctttgttatcttttgttgcctcttcgatcacatctttacatgcatcctgccatggtgtgatatcctctacttcaacaacgttgcatccatctgcttttaactcgtctaagatcttgttttctgtctcctcagagatcttgcggttgtactgggaagcgtactcaccagcttctgttaatacatcctgctgttccggtgttaatttatcccatgcctcatctgtgataactacctgaattgctcctaatgtatgtccatctaagatcaggttgtttgcaacttccgggaatgcatttgcctgatagtttgcgatcggctgctctgctgcatcaacaacacctgtctgtaatgcggagtataactcacccatagcaacaacggtcgggtttgctccaagtgcctcaaccatgcctgtcatgatcgggtcatttgatacacggatcttcatgcctgcaagatcttccattccggaaaccggttttacggtaaagaaatgacggaaaccttcctctccgtagaacagtccgcggataccgcttccattctcatgcggctcaagtaaaaattcctgtgccagatctgatgtagcgaaattccagaaatgatctctgtttacgaatgtgaacggtacagataaaagactggatttttctccgccgtagcttgtcagtgcgaatgcagagatacgtgccatatcgatcgtaccgccgccgccaagcatggtatctaagacatctgactcggctcctaatacaccgtttgcctgaatatcgatcgtgatgcttccgccggaaagctcttcgactttgtctttgaaagcggttgctgtctgtccaacgatggttccctctaacgggttaacctctgcataaaccagtgtgaccgccggtccgaccggttctgttgcgctgtcccctgaggatgctgcctcagttgttgtttctgcttctgctgcatctgatgttgcggacgcattagatgttgatgctgcatttgttgttccgccgctgtttccacctgtatttggtgactgtaagccacacgctgtcatggaaaataccattgctgcacatacgattgcggataaaacttttttcttcataagaaaccctcctgtaattggttaatttgtttgctgcgctgcccctctttgccgctgcaactttatgatttaattataggcagaatcttgtacaaagaaaaccgtattatttttgtattgttagcacattcttaacattttttagattttattaatattttcttgatatttttgtacagtatgtagatatttttttgcttttttatatgtgaaactaaacaaaatcctatacatcatcatttcttctcatccaaaagcatcacaccctccgccggattatggtcgattgcaccagctatcggtgatgcaacaccttttgcccagtgccatgcaagcgcgatctgctgcattttcacaccgtgacgttccgaaagttcatgcactcttgtgacgataatctgtctggattgaaatataccttagaggcgcttacaactttgtcacgggcaatattctttttgagcgcctgtcctgaatattcctcgcgcgttcctgcggaatatccgtttgccgtactaaaaaagcattaccacaagtcctaaaataaccagtatcacacccgttgcacggtttaaggtcttcggcgttgctttgttggcaaaaacagccgcgattctcgcccagatcagggtaaatacaacacacaaaatcaatacggtccagtccggtgcaccaccgattgcaaagtgcgaagccgctccggtaagtgccgtaaaggtcatgataaacacactcgttccaacggctgtctttaattcatatccaagcacagaggtcaggatcagaagcatcatcatgccgccgcccgcaccgacaaaaccacagataaatcctatgaggacaccgcatataacagactgcactgcccgcttctccgccgacactccctgcatcgcctcttttgtggtcatgaccgggcgcacgataaatttaattcctaaaaggaatgtcataaagactgaaaagttccccatggccgcagatgggaccagacttgacacatagcttccaaaaacggtaaataaaagtacgctcaccatcatgatgataccgtttcggatatcgagatttttattttttccgtatgtatacgccgacaccgcacttgcaagaacgtccgaggataatgcgattcccaccgccatatacggatccatccctagaaatgtgatcagcattggactgatgaccgccgcggcgctcattcccgcaaaaccggttccaagccctgcccccatacctgcaaaaaaagtaacgattattgtaagtaacatgttcatgtcagtgctcccctttcagcatttcatccagattcttttccatctggttgaggatctctgccatctttttccgtttctcctcatccacgccagacagtatctgttccacaaaatcctgctgcagttttttcccgttttcgatcacaggctctgcttttttcgtgcagatcagctcgacttttctccgatcaccctccactgctttcctctcaaggtatccatcccgcaccaacttctcaacattgacagagacaaggttcgcctttattttccgtacttccacaatatcactcgccgttttataatccgggttatttgccagaaacatcagtatatcaaacgcagtctgtggcagtttcagttccctgcagagtgtcttgcaggttgcactgtacgccagtgacattttgtgggcaaattcaatactcatatttatcatgatccgcctccatttacttcttttttgtattgttcatttttgaagtaattatatagcatttttccaaaatgtcaagactggatttttctctcttaatcttcctcccttgtgatatttctcacccagatatactttttataatgcagataaaccgccggtatcttcacgatctcatccagattgacaatgcagtataccaccatgacagggatttttaatgcaagcgcttccagaaatcctttgtgagcagccggtctgcgggaacaaactacgttttcagatttgaatcaccctgccggtcgtcgcattcaccctgtgcgagatggagatcaccgtccgattctcacttacccgctttaatgcctgcaaaacttctttttcggtctgtgcatccaggtttgccgtgatctcatctaaaaggagcagtttcggctttgccgccgctgcacgggcgatcgacaatagctgccactgtccctgtgaaaagatttcatcggaacatggcgtatcgtacccgttttccagactcatgatcgtatccgaaagccctgtcatctgtgccgccgcacggacatcctccatagtgatcgacggatcgtacagcgtgatctgctcttttaccgttcccggaaccatatgaaaagcctgctccacatagccaaaaagatgccgtttctctgcatccgggatatcttgtgccggaactccctgtatcagcacgctgccctcctttggctcataaagtcccagcagcagcttgaatatcgtacttttgcctgcgccggtgcgaccggaaagtgtaacctgttctccttcttttacctgaaaactgagaccatttagcacattttgttcttcgtaggcaaatgtcacattctgaaattccacaaatacgttatctttcttttgtgtactctcttttctgtaatcagtcttttccggtaattcttccagactgaaaaattcattgatcctgtgcacgcccgccacagcagactgtatggtctggatctccattccaaggctctccaccggggaaaagatctgcgaaatatagttcatgacagcgaccgccgtaccagccgacattccaaacagacttaatacattcgcattgccggaagccgaaaaaagcatgacaaccgccacaaccaccgcattcaggatcagaatgactggtgaatagactgcatcataaaaatttgtctgctccatcgcccggtagctctcgccgatgcaggtatcataacgctctgccatatagttttctttgccgagactccggatcgttctgatgttgtgaagcgtctgcggaacatggcccagggcacggctgacagcacggcggttttcgatctgcgcggtcagcatatttttctgcacgatgcgcgtaaaccagaacagaaacggcagcaacaccaaaagcacaatggcaagccccttgttccgaaaccagatgacggcaagaatactgacgatcttgcatgcatcggaaaacatgctgataatgcctgatgtaaacaggttttccaccgtatcaacatccccgacgaaccgggaaaccactgaccccggctcctgatgtgtcagtgcatctgccgtcagatccgtatatttatccatcaggctgcttcgtagtgcgtgcgtgattttctgcccgaacacaatcagcagtccttcccttgaactttccagtgcccccatgagcagtgtaaatccaaaatatgccaagatcagataaaatgataccacatttcccgtcgtcatggtatctataatagttccaagaatgagcggtggaagaagcgctgtcaggattgcaccggccactgcacacacgatcccggcggaaagccacttctgtttttttatcgtccgccacatgacactgcctacatttttactgctatgcgtcccgctgttcaatttgctgcacgtcccgctatgcattattctgcacgccccctttcttttctgccttgttctgtttcagcacattttcctgcatttactttctccgccgtacttcccttcgtctgctcctcataaagtcttgcatattccgggtatttttccatgatctcctcatgtgtgccgaccgccgcatgcccatgctccatccagatcacctgatccatttccgggaaaagatagagtctgtgggataacaggatcacgatgctgtctgacgtcatcgcctttaaattggtatatacttcctgttccgtattccggtcaagtgcggagaaaggatcatctaagatcagcaccggtcttttatggcacaaagttctcgcaagtgcaagacgctttgcctgaccaccggaaagtctgactcctccacttcccacaaccgtgtcaggtccctgttccatctctgcaacttctctatcaaaacatactgctttcaaataagtttctgtatcctcattttctcccatcagaatattgttttttatactgtcatcaaataattccgggtcgtgtcctaaataaccaatggttccggtcaacacactatttcccatctcgtttaactctctgcctgcaaaacggatacttccctgataaggatattcgcacagaaatgtctttccaaacgtagacttgccggacgcaacggcaccggtaacaccaatgatctgtcccggttttgcagaaaatgtgatatcctcataaatatctgtcccgcccggatatgcaaaactcaaatgggaaaccgtaagctctgcctgtttttgcactctgctttcactttcatgttccacacatttcatgaggggtttgatcctcttccaggaaacctgtgccttgtgaactgcgttaaaaagttttgccgcactcgatgattttaccgaaagtttggtaaaacaggtaagaaatgtggtaaatgccgcaacatcccagactctccagccacttccaagcacgtttttacttccaaaatataaaatgaaaatgacacccgccatcgagatgacacggtagatcggcggaaatgccgcgctccatatattcgcccgcaccgcagatttttcgtaagctgaaagatttttctcatacgcatcttttcgctcctgctcgcatccataaacacgataggtgaccgcattggatgcccggtctaaggtggcggcacttaagatcccggactgctccttataggctgccccggttctctgcacaattcctttcatcttctctgccagaaaatacgaaaccggcgggaacagcatgcttaaaagcgcaagtctccagtcataaaagagaagcattccggcatatgcaagcaaagctacccctgtatcaaatatctccgtggtaaatttccgcatgccctccgcacagtcatccacatccagaatcgcttttgtcatgacatttccggcgccttcctcttccagttctgcccggcttttatgcacaaggctgtcatacagaacatgtttcatgcgccggttgacattgtttgcaaaacgtctcacataaaaacgcttgatatatctggaactctgcaccactgcgattgcgatcacataggctgcgaccagttttcccatatcaggaaatcctgccctgccgccaaggatatccaccagacagcccgccatttttccctcaaaccatggtccggcaaggagtcctaaattgtaaatcaacccggagactgtcaccgcaagaagaactttccactccattttaaaataggaaatcacatggtctgcctcaaatttttgtttttcacttccagcattttttctgtcgtacttatcactcatctgactcaccatccatttccatcctgtcgtctgaaccggactgcacgagttttgacacatcgcaaaactctgcccgccgctgttccttcgaccgccagtaaagtttatctaacgtctcaagaaatgccgctttttcctccttgggcagctccgctaaaagccactcataaaacacgctctcaatggacgcctttgaattttttaactgttccgctttctctgtcgcatacaaaagctggcttcttccatcctccgggttcggtttccggtaaagatatcctttgctctctaaattagccgcacgccttgcagcagcccctttatcaatctttaactgctctctgactttcgcctgtgtgacgccgggattgtgccggatgaaatggataaaatcaaattctgccgttccgattccttcctctttcatcatctttaatgtaaacttgcccgcttcacgcgcgatctttgtgatttttcttcctgactcgtccattgcgatctccactcctaaccaactctgaaaattaaaatctaacttatgactttcccattagcatacaaaaaatagatgtacctgcatctaaccagatgatagtacatctatttttgtgtgtcaatttatctttttcttactttgcacaggaaaaaactttttcctgatttgattcatcaatgaaatctttcttacttctcactccagatttttctatatttcataaaatagtaaatactcatgatcatactgagtatctcgcccgttgtgatcgacagccagactccgtccattccaagcagatttggtaatatcagtaccggcagcaaatatcaatatgccagtacactagcccatgtttctgctatttttactccaccttcggcagccctgcaaatcccactgcaagctcttcatcggtcggaatatagtctgtcatctctccattgttaaacttctcatatgcaaccatatcaaaatagccggttccggtaagtccaaaaacgatagtcttttcttctccggtttctttacatttcaacgcctcgtcaatggcaacacgaatcgcatgagaactctccggtgccggaaggattccctctattcttgcaaactgctctgctgcttcaaatacagaagtctgctctacactccttgcctccatcagtccgtcatcataaagctgtgacagagttgaactcatgccgtgatagcgaagtcctccggcatggtttgcagatggaataaatccgctgccaagtgtatacatctttgctaacggacagacccttcctgtatcacagaaatcatatgcatagcggcctctcgtaagactcggacaggatgccggttcgactgcgataaattgatagtctttttcaccacgcagcttttcacccataaacggagagatcagacccccaagattggaaccgccgcctgcacatccgataatgatatccggcgtaatatcatacttttccagagcagcttttgtctcaagtccaatgactgactgatgtaacaatacctgatttaacacacttcccaatacataacgatatccttctctcgtcgttgcagcttctactgcctcggagattgcacagccaagacttcctgttgtacccggatgctctgctaaaatctttctgccgacttctgttgtctcagacggtgacggggttacacttgctccatatgtgcgcattacctcacggcggaatggtttctgttcataggaaacttttaccatatagactttacagtcaagatcaaaataagcacacgccatagaaagtgcagttccccactgtccagcacctgtctctgttgtcacaccttttaatccctgcttctttgcataatatgcctgtgcaatcgcagagtttaatttatggcttccacttgtattgtttccctcaaatttatagtagatctttgccggagtccccagttttttttccagacaatatgctctcaccagtggtgacggacggtacatgcggtaaaaatcacggatctcctgtggaatatcgatgtatgggttggtatcatcgagttcctgttttaccagttcatcacagaatacatgccccagttcctccgcggtcatcggttttagagttgccgggttcaaaagcggtgctggtttgttcttcatatcagcgcgcacattgtaccattgtgtcggcatctcattctcttccagataaattttatacggtattttcttttcgctcatcttctcctcttttccgcaacttttatcgttactttactgttatgattctctgattcatgattttatctatattttagtatgttagcacattgaagcgccgcagtcaataactttggatcttaatatcggcatcgacgaaagccgtaacacctgtttaccccaaattgcgtttctttttattccactcttgcaacactgctgacaccctccggcgtccgctgctttgtcacaattatttttttgtcgatctggtcttttaattcagatacatgtgaaataattcctaccagacgatttccctcggtgagctgcagcaatgcttttaacgcctgttctaaggcatcctcatcgagtgatccaaatccctcgtccacaaacatggaatccatacggattccacccgcataagactgtatctcatccgacagtccaagcgcaagtgacaatgatgcctggaaagactccccaccggaaagcgtctttacactgcgctttgtcccgttataatgatcaatcacacaaagttccaatcctgctttttccttgcggcttcctgtctcttcctcacgttttaattcatactgcccgctgctcatcgtaagcatcctccggtttgctcggatcagtatcctgtcaaaataagccatctgcacataagtttccagttcaatctttgccttaccgtttaacattccacttgccgtatcggaaagagatttcatccagacatacttttgttcagtctgtgcgatatctttttgttttttgctgacatttttacagatttccctattagtacaataagatgtatattttgaagtcctgttttcttccatctcatttctttttgcacgcagttctcccgcctgcttttcgatctcttcttccggaaacgatattgctttctctgtttcctcaatctgacgaagcagcatctgaatgacgcccttttccgtctctctgtttttttcgtaattatgatacgcttctcttgtcttttctctgttctcttctaaatttctttttttcagggtaaactcgtttatctgtgtctgtaccccctcttttgttacatcctttacctgctctttcagctcattgagattcttttcttcatttgcgtactctgtctgcagacgtaccagctcctgttctgccacattgatctggtcggcaagtgtttttatttctgtttcatcgagcggaatctttttttctaaggcagtcttttttcgttcgtcttcctgttttttggaaagttccgcttttttctcatcggctgctctttgcagcatagtaatcacagactgtacatggtatggttttgcatcaaaatcttctattgacaaaacctgactcccatcagcgttttttatggtctgtaatgtattgacatctgtatctccagttaaagtgctctgattacatgtaattaaattacatgcagattttatatcgtcactgatctgcttttcggcagtttccctgtttccagtcaattttgcaatttcttcctgaatactgctgattgttcctcttatcttttgtattgtttcttcgctttcttttaattcatctttgatctgctctgcacgtttcctgttattttttgcctgtaaaaactgcgtgttccgttcgttttcaatctgcataagctgtgcaaaaacagttttttgatcctctgtctgctctatgccagttccacagtctgcaacgtttttcttccactgctgtttctgctgtgtgcaccgttctgtcgccgtggcaagcatctgtccaagattaatgttctgttcgtttaacataaccagttcatcctgcgcagactgcatctgttcttctaatacatgcttgacatccagatcctttttcgctttttctttctgatctttatattcttcccttctcgcctcatcagcactcttttgcctttttgtctccgtctttatttcatttaaagacattctgacatcaggctcaccaagcagttctcctgcatcctttaggactgctgacattttctcattttcctgtgtcacgagctgatgcgctttttcactcagtctgctgactgactcccttgccttttcatcctccgcttttgcctgttttaacacttcccgatccggagtttcctgtggtatgactgccagtgtcggatgatgtatggctccacagaccggacagggttcgtcttcctttaatccctgcgccagcattcccgcctgtgcatcccagaattgctgttctattctccggtattgttcactgatctgtttctgctctgcggctgctttctgatactgtttttgagttttctccctttctctgctgactttctcccaatcctctaacctgttttccagctcttcgagcctgcgtatcctctctgatacttccaatattgctttctctgcctgttctcccctgctgtctgcaccggaaagctgctcccacgtttctttttgctgctgtaagtccctgctttttacctcatatgatttctgtacgttttccagttctgtaccaagtctctttacttctctttctgatgtgttcaactgttctgcaatctctgtcagatcctgtattttctgtcggatttcttttacttccttctcataggcaatctcctgtcctgccgcatccttgttctgctcctgttcttcttttaacagttgccgctgttctaaaagactgttttctgttttcttttttaaatcaagtttttcattttgatctgaaatatgctcctccagcgcacggctcctgtctctctgatttttcagcgtatccattttttctgtgatcagtcgcatttcatgctctatgcgttgtatttccgcagtaatgccctcataagattttaaggtctctttttcctgctgcagttttccctccagttctgttcgtctctgttcatcctgccgttttttctgaaccttttcttccatatcctggtgcttcttttcctgcgacagaccaatttcctgtattttttcaaacaacaccagcttctgtttatattcttcaatcgttctgcctaatttttcacagcattccgcttcctctcctgccctgtccatatccgcttttgcctgcaccagaagcgcttctaagtccttcagcttctgctgtttttcttccaacaaccgccttctgtctgcattttcacgcactttcccgctaagttcatccatattttttatttgctgatccagcgcctcttttttcttttgcaggcactccaacgcagattcttccgctttacaaagttcttctaaaagtgagattccctcctcgatcctgccgtcaaatttttccttttttaaaagatttattttttctgcgatccttgtcccttcttcatccagagagtcactctcacagacaattccctccatatactgattgatgctgcgccgcagttcatcatattctttccattgtttttttacggcatctttcagtttgtcctgcagcacacgataaatatccgtcccgaatatctgacgaaaaatctttcctctctcctccgtattggcaaacaatactttctgaaaatccccctgtgcgatcattgctatctgggtaaactgtctgcagtctaaaccgatcagctctgtgatggcgcgtgtgacctctctgctttttgtcactggttctctgtcatccgggtattctagtgtggcattcgccttttccgttgtcattcccgtcccacgtcccttcgggcgcatatattccgggttacgctctactgtataccgtttatttgcgtactcaaatgtcagacgcacgaatgttttcacgtcatcttttgcatatttgctgcggaacatatccgctttgcgcacatcaccactggcttccccgtacagcgcaaacgtgattgcatcaaagatcgtggtctttcctgccccggtatcccctgtgatcagaaataatccctgcgatccaagccgttcaaaatctatggtctgctcccccgcatacgggccaaatgcacttattgtaagactgactggtttcataaatcgttcctttcctgccgctcctattttctctcaaatcccaaatatctcgttccctgaaacatcagttttcctgtatttgcttctcaaactattttttcaggaacttatcaatgcaccagctcttccatcagttctctgacaaaatcctgctgttcttcactcatctgctgattattctgtatctcgtaaaattcttcaaacagttccatctctgatttttgctccacatgttcggtcacctcaacctgcctgctctgtctggtcctgctgttatcatagacaagctgcatcagattcgggtataccgtccgaagctttgccattccatccggcacatcctcctcatcggtcagtgtgatctgcagataatcgtctgtttctgtgccctcatagaaatctttcgacatcagttccatgtatgttccccggatctttctcagatcacgaagcggttttaacggaactttttcaatgaaggtatctcccttttcctttatctccatgacaacaacagactttttctgttccgcctcggaaaaagaatatttgagcggggttccgcaatagcgcagtgtctcccttccgatatgctgcgggctatgaatatgccctaatgcaacgtaatcaaaaacatcaaacacttccgccccgatctgatctaatccacccaccgaaacttcctccgactcacatcgcgaagcccctgtcacaaactgatgtgccaccaatatattccgctttgatgcgtccaccggcatatgagatacgacaaactgcagggcatcctgatatgtttccactgtctccacatcatcttcctgtgccagatcctgttttgtcccggcatctttttttccaatggatatcccctctgtcactttcctccacgcatggcgcacgaccgccgggcggataaacggcagcagccagatgcagagttccccatatgcatcctgacatgtaacacacctcacctctccatcataaaccggtgaaacatagacttcccggctgctcataagctgtgcaccaaatgcaatacgttccgcggaatcatgatttccactgactgcaaacacctttttcccgcaatcagcaagtcccgtgagaaactgatcaaacaactgtaccgcctccgcagacggaaccggcttatcatagatatcccccgcgatcataaccgcatccacctgtttttccaatgcgatctctttgatctgccgtaaaatatatttctgatcttcgatcatggaaaactcattgactctttttccaatatgcaaatccgagatatgaagaaatttcatgctctcctcctatactatttcattcgtaatactttacttaactataccatatagcgtcccaaaatacaaacatatgttttgtttttgttgctttttcacaaaaaaacagatctcagaaaataaaaaccactttctggagatccatttttctatttattttgtttccattgtaacagcaatgccgaattgatgatgacgagcacagaacctgcattatgtaccaatgctcccacgaccggatttaaaattccgatgattgcaagcacgatcgccacaaagttaagccccatcgaaaaactcatattgcatttgatcgtgatcatcatccgcctggataatgcaatcagatgcggcagttcttttacttcatcatccaccagcgcaatatctgctgcatccaacgcaatatcacttccaacaccgcccatcgcaattccgatatccgcttttttctgttccgccggcaaggtaatctgcgctaagacatcctcacacggcacatcctcgtcaaccatacggtcgattgcctgtacctgaccaatgatttttgacagtcttatttttcacttatctcttcccgtatctctatcggatgcgcatcggtaacaaagatcattccatcatacaatttttccggcgattgtgatacgcggtaactttgaggaaaaatgctcataaaaaacgcactatagccctctcctaacgatcccatagaaacatgatctgtaatctgctctttcagttgtgaattttccggaacctttgaaaaatccagccagctcatatcataaccggctttcttcgcggctttcgctagaggatcataggaataaaacgtgtgcgtgatacgctttccatcatttttcggaagattgcagttcgtcttgtaaaaatccgttccaatcgcaaaatatccgtcccccagttcatcggaaagaatattccccatcactctggtacctgcgccataatttccaaaccgctctatatgcccattgtgacctgaaataaaaatacaggaattgcccctctgctcttccatagaaaggatccacagcacattttctgccatcaattggtctctgagcacatttccttctacggcagaattgatcactttcccaagagaaatattctgcagcagcgtatctgccagatgatccgcctgtacaatgtcctttacatctgatttttgtaattcttcttttatttctgtgatcactctgctctgctgttcaacatcatactcactgtgctgttcttctgtatcctccagtttcttcagttctgtcacatctatccccgccttttcacatgcttcaatcagatactgcagattataggaccatctttgcatgtcaaacccataaaaccttaaatcatctccatcttttgcagtctcattgtattttcgcatataagagatcagatctgccatctcatcagttctgtatattgcaaaaccaatcgccgcggcagcctgctctgccgttccttccccaccgtgaatgtagcggttcacatactcgcatccaccgtagtctccctccagtgcaaatgctcttatcccggcattttccaccagattttgaaatacggaaagttttaactgctgaaactctgcatttccatgggatgcctcccccagtgccacaatttttgttttctccggtatctttaagtcctccacctgctctgcatattgtgcaaattccgttgtatctgcacttggtccggttccaaatcctccaaaatgggaatatatgctgccggcggcaacaatacctgctaataccatacctgcggttatcaaaatccatgtccgttttttcttcttatttttcttttccataaaatctcccccaaatctgtttttcttattcgatactccaatattaacaaaagggaaaatgttctgccatttcattagcttacattttccctgatgtatcttacatttttgtaagatttatatagttttcaaatttatactgttctataactttacttcccaaaagagtgattgcctgtttcggacaattacagatacagcggtaacacatggtacactgatcccctgggtggggttttcctttttccatgattatatttttcatgggacaaatttccgcacacataccacaccccgtacaatcctcatttatttttaattgatcggtatatcccgctgtctttttataaaaccagagcctttgtccaaaaagtcctgctatatgtgagaaaattgtcagcccctctttcggataatccccctgttttatccgttttgcagcttcataaatctttctgtcagctttttcaatgatctttttattttcttccatctgccttttcaacagcttactgtcgcacacggaatcgggcattttaatatgcacaccgcctaaaatcactgctccgtattttttcagaagtcttgctgcacagcctgcgccatccccactaaatgctcccattgtcgcaacacatatcatttttctgcccttccacaaagaggcattcgttttgataaaatctcttaccatgtatggtgcattcgaaaactgcgtcggatatccaagaataatcgttccatttctttttatcttatcgataacagattcatcctctaatggaaccacatcggctgacgcatcgattaattttaccagttttgtaatgcaatatttcgtattacctgtaccactcagataaattcctatcatttccaaactcctccgtctttcggttattttgacgttttttctatgaatgttttctattgaatattttctatggaatattttctattgaatggtacagcataccaaaaccatcctctaaaaattcactctttgataaatccatcgacattttgatatattcttccttattcgctgcaagctgtatcagtcctgctaacattccccagaactgaaagatcgtaggcattatttttaaatcctctcgcaaatcaccattttgaatgcctgccactaaaaattctttcattttttcattgatttcttcccccacatgataggtagctttctcttctggcaggtaatcatgatctttaaaatcaacattaattttgtccaacaccattttaaaataaaacggaaattcctcctgatactgtattaaacctttacagatcatatcgtatctagcccttgttgtctgctgctcttctaacgcagtaactatatatccatataatttttgcatgctctctaaaaccagcagaccaatgatctcctctttgttttcaaaatatacatataacgtagctttactgtatccggcagcttctgcaatatcactcatggaagttgccgtgattccattttccataaacagtaccgatgccgctgacgcaatattttctctatgtactgccctcggttctttttttcttcgtcccatatacctctcctcttcagttaattaaactcttggtttaattatatggataaatatatggattgtcaatccttacctttacacaacacaaaaacccgcacaaacctttcggttcatgcgggttttccccctatatattaccttttcccaaaaataatatcccctttttaattgatgcaatacaaattatttgtctgcgatagcagccctgtgcatgcagcacagactgcattttaccttataacaaattatttatttgcaatagcagcctgtgctgcagctaaacgagcgatcggcacacggaatggtgaacaggatacataatccagaccaatctt

SEQ ID NO: 5122 - DNA, 107660 bp, Unknown
  gut microbiota DNA sequence
tgtgataattaacttcctaattatcatacaagaaaaagattgtgataaaaaacttcaatttaaaatgaatgatggaacattaataacctgggatagcatatttcttaataaaacgccattatataaattctttaaagaattgcttactatggaaaataaatcggtttgttattctggtgagaaaagtgtcaaacacggtaagtctaaattttttggctctacagcaggtggaatttcgagtgctagatatggtgtggtaaataaattatacgatgaggaaaaattccatggtagacaaggacatggatttgcggccgagcgtgctaataatttatttgataaaattactggtcatcatgcaaaaatagttggagatgataatgtaaaaaatggtgcggacagagtagtagatggagtttttatccaatcgaaatattgtcagacaggtttagcttgtattaatgaatgctttgatgaaaaaggcaacttcaggtatttaaaaaatgggaagccaatgcaaattgaagttccgtcagacaagtatgatgctgcagtagaagccatgcaggaaaaaataagaaaaggaaaaattccaggggtaacggatcctgatgaagcaaaaaacattgttagaaaggggcattttacttatgaacaggctaagaatattgcaaaggctgggtctgtggagtcattgacatatgatgctgttaatggagctattattgcgacttcggcgtttggggtgactacgataatcacattagctacaaatttgtggaatggtgaagattttgaaaactcattaaaaattgcaacattttcaggaatgaaagtgggtggaactgcattcgttacgacaattattgcaagccagttatcaaaagcgggattaaacagtgcgttagtaggaagttcagaagcaatagtttcttttatgggacctaaagcttcggcagtactagttaatgcttttaggagcggaagtaatatatatggagcagcggcaatgaaaagcgcagcaaagttattaagaggaaatgtgataacttcaagtgtgacggtggtccttttatcgtcagtagatatagcaaatatatttcgaggacgtatttcaggaaagcagttatttaaaaatttggcaggtactgccacaactgttgcaggtggaacaggaggatggcttggtggttctgcagtgggatcaatggtttttcctggttttggaacaattgtgggaggattaattggttctgttataggcggtgcagcagcggggaaggcaacggatacagtccttggaagttttattgaagacgatgctgacgagatgattaggattattcagaaagaattcgaagatcttgcgcaggattatttattaaaccagaaagaagcggaaaaatccgttgataagttgagtaatatattggatggaaaaatgttaaaagatatgtatgcttcttcagacagaagtgaatatgcaaggaatcttttaatccctattatagaaaatgaagtaaaaaaacgtaaatatgttggtaaggtaacaaataaacaaatggtacgaagtttgaaagaagttcttgaagatatttcagatcatatggatgaaaataatttggaaagatcagtattaatataaaatgtatgggggaaaaatgagagaaaataaagaattaattgataaactgcgtatgtatacttcttttaacggtaaagaagttatacacaaaatatatatgatacgagacatgtcatttgttaaactaagagattcacttattggcatgggacaaatattagaggaggattttgaaaagcaggtatatgtgattgctattaggtcgggaactgcaaatatgaatacagcagttgtagcgatacaactaatggatgacaatacagtaagctttttaggttacgcaaaagaaggactgataaaacagcatactgcagagaaagcaattttaaaaataatggatcagataaaaccgaccacagatagagaggttcagtgaaaagtcaagctcgatgtggcagacaagtgttccagtgattgttgtgattacgaaatcgtattcggttcctgaacgtaaagaaaatattgagatggtacaagtcgtttttgctggaccggaaggaattatggagttgatcgatgcaacgaatgaccttatgccggaaggcttacaggctggaacagaggatattgctaattttaaattaaacagaaaaagatatctttgtcagggaattataggtgttgcaactacatcaggtactgtagtgggagcagtgcccatttcaattgcagatgctgtaatattgaaacctattgaaattacagaaattaatgcgattgctaaagtctatggaattaaaaatgatcagcagacgaaaaaattttttaattccattattgaagtgggaacagtaagtattgcagcgaagacagcgatttctgccttgaaaaacattcctggaattaatattggtgcaagtatattaaatgcaattattgccggcagtatcatagctgcaataggtgagggaacaacctatatatttgaacagatttatttgggaaaaagaagctttgaagatattgactgggtaactaaagtgttgcagtctaagttgtctaacgaatttatagagaaagtaaagactattataagcaaaacaggtaatcagacagattcaaagaaaacagcaaatttaatttcagctatttttaataatgactgataaaatggattgtatatggagtggttcagtgaaaaaattatcaaaaagcaaaagaaaaaaagcacaggaaaaacagatcagacgagacattgctatgaagaaagcagggaaacctttttctaaaaactgccatcattataattataagttttcggtagcgtcttcaataaattcacagatgttgggaatgagtgtggagagagagccagaactaattggagcaattaaagtgaattcgttattgagaacattagaggatggcagttatgagtgttcgcaatgtagaagaattttttcaacatcgcaggagcagcgtttagaacaattatatcagtatttggaagaaccaataaagaatgaggattttaagagagaattactggaagaaattatattatatccaccgatttattcatcttatgaaagccccatcgaacaaatatacagattgatgtttgctcctaggttggaaaaggtaaatcgaataattgataatgaaataaataagatattgtgaagcactatttcacattggaatacatatcttgtgcatatattacaaaaataataaaaaatatgtgatactactgacagatatatgtcggtatgttacaatctattcaaagcattacattctaacaaaatctatcaggcagactgtgaggaagtagcttcacagcataagccgttttcaaaataagtcaaaaccacgttaagggctgcatatcagcacgcgagccatcaacgtcggatatcagaattttcaatgcttttaaatcaccagtaaatcaaaataaaagcagggaggattcgaaaatatcagacgattctcccgaacaaaagggggaaaacgattatcgcgcaaaggacaaagaaagctttagcagacaagggaaaaaagatccagtggcatcctgcattttatgcggcggcggaactggaactaaaggaaaatatcgaggaacttgatttaatatcagagtatcatctgagcaaagaaccgatccgcatagatcttctggtcataaaggaagaaaatgcagaaaaagtcttaaaaaatgaaatcggccgcatcatgcgaaagtacaatgtgttagaatacaaaggaccgggagatgaactgtcgatagacaccctttataaaacacttggatatgcctgcctttataaaggatatggaaaaacaattaatgaaatcccggcggacgaactgactgtatcattgtttcgagaggcatatccccaaaaactattttgggaattagaacgaaaaggatatgtactggaagaaaaatatccaggtatttattacgtgagagggaacattttattcccagtgcagattgtggtgatcagcaggttgaaccggactatgcacagcagcctaagaatcttatctgcaaatgccgatatagaggatatcaggaagttcttagaacaaacggaaaacatgaagacaccgcgagagcggaataatatagatgcggtattgcaggcaagtgttagtgcgaactatgaaatatatcaaaagataaggagggcgaatggtatgtgcgaagcattacgggaattaatgaaagatgaaatagagcaggatgtagcaagaggagaagcgagaggagaagcgcgtggaattattgacacatgctatgatcttggattgaaggaagacgcaattttggagcgcttgcagaaaaaattgaacatatcactaaagactgcgcaggaatacctaaagactttcggaaagcagatgatataagttaaacgtacacattttcgggaaaacgatcatattttatagatatgttgtaaaatagtgtttttccatgaatatgtataaaaataaagcattacattctaacaaaatctattaggcaaactgtgagaaattatctcacaacataagccgtttcaaaacaaatcaaaaccacgttaaggctgcttatcaacatacgagtcacaacgtcggatatcagaattttcaatgcttttaaattaccagcaaacaaaagtaaaagcagggagaattcgaaaatatcaggcgattctcccgaataaaaagggaggaaacgattatcgcgcaaaagacaaagaaatcgtcatcagacaaagccaaaaagatccagtggcatcctgcgttttatgcagcagcggaactggaactaaaggaaaacatcgaggaacttgatttaatctcggagtatcatttgagtaaagaaccgatccgtattgatcttctgatcataaaagaagaaaatgcagaaaaagtgatgaaaaatgaaatcggtcatatcatgcgaaagtacaatgtgttagaatacaaaggaccgggagatgaactgtcgatagacactctttacaaaacacttggatatgcctgcctttataaaggatatgggaaaacaatcgatgaaatcccggcggacgaactgaccgtgtcattgttccgtgaagcatatccaagagaactgttttttgaattagaacgaaaaggatatgtactggaagaaaaatatccaggtatttattacgtgagagggaacattttattcccggtgcagatcgtggtgatcagcaggttgaaccggactatgcacagcagcctaagaatcttatctgcaaatgccgatatagaggatatcaggaagtttttagaacagacagaaaatatgaagacaccgcgggagcggaataatatagacgcagtattacaggcaagtgtcagtgcgaattatgaaatatatcagaaggtaaggagggcgaatggtatgtgcgaagcattacgggaattaatgaaagatgaaatagagcaggatgtagcaagaggagaagcaagaggagaggcaagaggagaaatgcgtggcagagcggaaggaattgtagatacatgttgtgatctagggttgccagaagacgctattttagagcggttgcagaaaaaactaaatatatcattacagactgcccaggaatatctccaaacctttggaaaacagatcgtaaaaaattaacgaacgtcaggaaaatcaaaaacatatgaactatcagcaaaaagatttagtgagaatagcaaaacgggaaaacaataccaaaagaagttatctggtagtagatccactgcagggaaaacatgttccggtagaaccttcgaaagcactgaatttatttaaaagtcttgcagagaagcttcagggaaaatatgaaggcgagaggctgcttttgatcggttttgcagaaactgcaacagcaatcggtgcgcaggctgcgattactctggaaacaaagtatatccagacaacacgggaagtaataccggatgccagatatttatttttttcggaagcgcacagccatgcgactgagcagaaattggtaaaagatgatatagaccgtgtgataaatgatattgacaggatagtatttatagaggatgaggtgaccaccgggaatacgatcatgaatatcattaagatcataacaaaagagtatcagaaaaaaacaaaatttgcagttgcttcattgttaaatggaatgacagaagaatacttaaaaatttatcaggatgaaaaaatagaacttcattatctggtaaaaacggatcattccggatacggtacggttgcggagcagtatagatgtgatggtttatatatttgtgcgataccggagaatcatacgcaggaaagcgcggatattgatgtgcaatcggagaagaatatgcgggaacatatcatatcgattcccggatggatgaatgcaagacgtttcgttgacgcaaaacaatatgaggctgcatgtaaaaaacttgcgaaaaccgtgatcacagagactgttgtgaaacagggtgaacgtgtacttgtgattggcacggaagagtttatgtatccggcacttctgacagggtacgaaatcgaaaaaatgggatgtgttgtccgctgccattctacgactagaagtccgatcgcggtcagtaccgaggaagagtatccactgcattgcagatatgaactgcgcagcttatatgatccggatcgaaagacttttatttatgatttggaaaactatgacagggttatcgttatgacggatgcagcattagcgtcgttaaaaggattagaaacgctgatttacgcacttcggatgaaaaatgaaaatataacggtgatacgctggtgttaaagagggcacaggaataagggcataatgtgaaaataaaatttttcccatacgaaatttgtgtctcagcagcaaacatgcgatgtaatggaaagcaggaaagaatggagacaagattaaatgagaagttcataccgggatgaggacgtgactcttctgttaaaagatatcaccggcatggtgcagccacagccgaccgaagagagagaaaaactgatacaggcgggaaaacattacagtgaaatgctgccggtcgaatatgtcccgacagaaaaatatatgcaggtgtaccgggaagcgttgaaaaattatgcaaaaccggtagcacttgctgtcggaagacttgcagataagatcattgaaaaaaagggacaggacattgtgctcgtctcactggctcgcgccggtattccaatcggaattttagtcaaaagatatattgcaaaaaaatatcaggtcaatgtaccgcattattccatttccatcatccgcggcagagggattgatgacaatgcgatgaaatatctgttaagccggtatgaaccgggacagttattgttcgtggacggatggatcggaaagggcgcgattttaaatgaattaaaaaaggatcttgcgcagtatgaaggtgtgtcatccgatatcgcagtcattgccgatcctgctaatgtgacagaactgtgcggcacacacgatgatattttaataccgagttcctgtcttaacagcactgtgtcaggactgatcagcaggacattcttaaggagtgatatcattggaaaagatgatttccatggagccgtctattacggagaattaaaagattcggatctgtcctatgaatttatccatacgatcgagaacgagtttgagatggatgtggaaaaagaaaataagtgtgtggaaagctctggtattgacgaggtaaaacagattgcaaagacatttgatattgatgatatcaatctgatcaaaccgggaatcggagaggcgacaagagtattgctgcgaagagttccatggaagatcctgattgatgagaggtacaagggagatcctcagcttggacatctggtgagattagctgaggaaaaaaatgtgtcgatccagtattatccgatgaaacattataaatgctgcggtatcattaaaaaaatgtcagatatataaaaaatactgccggtttccaggaaaatttatgcatacgtcagtttggtctcgtcatgccaaagaaatttatgtatacatcagtctggtctgtcatgccaaagaaattcgtgcatacataagtttagtctgttatgccaaagacctctgcaagaaataagattttttctgcccagttatggtgggttttgtattcgttcatgcgttcacccgcaagatttccggagacaagcgagtctgattttttatcccagtttaaaattgcttttgcatcgttaaaatctgatcttgtaacctgataaactttgtttacgacagaaatctgatttggatgaatgactgtttttccggtaaagccgcagagtttatcatcttttagttcctgaatcaggccattttcccaattatacccggaataatattcccataccggtccggaaacgacgtagtccatgccgtaaacagttatgatatcagaaaaaatatcagcgacaggtctgatccggtgaatggactcgtcacaatgacggcggaatccaaacatgtgacacagatcatttcctccgacacgaatatttaaaacgagatcttccacatgggaaagcctgtctttcagatcatacaggatatcgatacggtgccgcaggtcaatgatagaagaactctcatagatcggcatcatatataatttcctggaagcctgttcgttagcccggatcatttcttctatataagagctggcgttgtcagcagtaaatttcggtatgatataaccggtgatcacctttatgctttccccaaaagccttcgttaaacgttcaatctggccggcattgcggacacggataaagattttcggaaggtaaaaaggatgatcctgaaagctttcaaatatctgatggatggaagagataagatcctgctctgcttctgtcacatagttgtcattgatcgtatcttcaaggcataaagccagagaatatttagttccaaatttttcatgaatcacagagtcggcaatcgtttttttattggcgggacaatagagcagtgcaccgacactgtaataaatcatatcgtttttcaatttgtaaaaatccccctgagtgtataaaaactcttcaaaataacacaagtttaacaacagattgcaaattgaattatagcattaatataggcaaaaagatagatagattcgatgccggacgttttcttgaaaacaggatgccggtatgctatacttttagatgatttttatagaatattgtgctctgtgaaacagggtttttgaggaaggaatagtatgggtaacggtggtaaaaagatacggctgtcatttaactctccggttattttgggatttacgcttgcctgttttatcgtactgattttagataaagtaacaggcagtgcatccacgcgtgcatttttcagtgtttaccggtcatcgttagcaagtccgttcacatacatccggtttttcggacatgtgttaggacatgccagctgggatcatttctttggaaatattatgatgttactggttgtaggaccgcttttggaagaaaaatacggttcggcaaatattctctttgtgattttagcgacagcgctggtaacgggtgtgatcaatttcatatttttcccacatgtccagctccttggggcaagcggtgttgtatttgcattcatattactcgcatctttaacaagtattgaggaggaaaaaatcccgctgacctttattctggttgcgctgatctatatcgggcagcaggtgtatgatggtctttttatcagggataacgtctcaaatctgacacatatattgggaggcattgtcgggtcaggccttggctatgtgatgaacaaaaacaaaatgaacagatattgaaggtgagaatgcgctatgttagaacacaaaaagattcgcagccttgatgattactttgccgatctaaacggaagacagagcagagaggtgtatttttaccggatcaatggatacacggaaaaaatcggggactttataaaaaaatattatgatacggcaagaagagcgggtgtggtgatcgagggaaagatcccaaatcccgatgagaagaaccttgcgtattattctgagatcatggggatggattttcagatgaatccgtcatttatatcgaatggtttaaaaaaatggcttccgcgcatgaacgatctgcaaagacagaatgtggcagattcgatctatgactcgcttgataccatgaggcggaatggaaaaacagaaaatatgctgaaaaatgcatatattaagtttatgtgctggctgtactacaaatttgaacggattgtaaaccagcttggagaaaatgaactgcccaagatcctttatgagggggatatcagtaattacgaactgatgctgatatcgatcctgtccaatgccgggagtgatgtggtgctgctgcagtatcatggtgatgccggatatctgaaatcagatcccgcttccgttttatcagatgatctgcaaatggagaggatgacagctttcccggaaggatactgcttaaagaaagtccgggaggcaatacaaaatgattttgaaaaagaacggctgtatggaagtctgccttctgtcaataactgtaccaatgcatggattgatggaaaaggatttgaggatatcaaaaagagtgtgttgaccagaggaacagatccccgcttcttttataactgtttttaccggatcaacggtgcagaggacaagctgacatatgcgaacgaattgtttcagctgcagcttgaactgaaaaatgccgggcggaagatggtgatcgtaaacggggagatcgaaagaccgacaccggatgaaatcgcagagatccggcgcagaaattatgcaaaaacagatcagcttatcatggatctttccacgaatataaagtatccggcaaatttagaattgcaaaagatcatgcacaaaacatttgtggatattcttcttgcagaatcaggcaaagaaggcgataatttaaacaggctcaccagcaaggcggtttacctgttgtgctggctgaaaaggtatctgccgtttttattttccaattggaagatgccggagatcggatgttttatccatatgggcgggtgccagaatgaaaatgaagcgttgtttctcaggtttttagcaaggctgccggtcgatgtggtgatcctttgtccgaaccggaatgtaccatgccagcttacggatccgctgttgtatgaactgaattatgaggaaagccttaccatggacaggtacccggaggagagttcccaggtcaaaatgggaacggttgcctaccatgcggagagggaactggatacgttaatgtatcaggataccggcatgtaccggaacatgcagtatggaaaggcgaacattatcagtctgcagaccatgtacgaggagattaagatcctgtgggatcaggaattaaagtaccggccggatttcagcgtggtcgatggtgtcgtgaacataccggtcatttttgcaaaagtttccggagtcaaagacggacataccgccggctactggacatccgtaaaagaactggtcacggaagatacagtcgtgataaaaagagcgccttatatagagccgatggcaccgaatccgatgaaaatgtatgctgctgaatttttcaaaaatggaaaactgcagcggaataagatcaaggcacatccaaaatacccgtacggtatcctgcgggaagatattcaggagatgatacttgataagatgcagcttctgatcgatcagaaactgatcagaggaatcggggaaaatggtatggaatacaccgtgattgcgcaggtgttaaatctgccgaaagatatcgtaagactgatccagaaatttgatcttacctggaaaaatccgaaactgatctatatcaatacatcggagacggtcatttcactggaagactcgatcctgacagtatttttgcatctgatgggatttgatattgtattttttgtgccgacgggatatcagagtattgaaaaatattttaacgggcagctaatggaagaacaccagataggggaatataaatatgatctgcaagtccctgacctgaatagtatttcatttaataatacacgccacacctggcgggataaattttttaagagaggtaattagaaatggaggaatcgtatgggacttgattttagcaaaacaacgactgcggcagcgccggcagccacagtggtaccggacacaaaagatgagatcgctgttgtggaacagtatgacattgttgccgacagggaaaaaatgaattcagaactggtcaattcggatgaggttgaccggatcgtcagtacgattgaggtcaacaatcttgagacaatcgtcacatttggagcggaggttgcagaagaaatttcgaaagcatcggatgtcgtgttaaacagcatgaatatgtcacagcttgatgataccagcgaaatgttaaaaacattggcaaagatcatggatcagtttgatattgacgagatcagggaaaatccgggactgtttggaaaattatttggaaatatgaaaaaacagctcgacaagatccttgcaaaatatcacacgatgggcgaggaagtcgacaagatctatgttcagctcaaaggctatgaatcagagatcaaacagtcaaaccgtaaattaaatacgatgtttgaggcaaatgtaaattattatcatgaacttgtgaaatacattcttgccggagagcaggcatgtaaagagattgaagattacattgcaaagagacagcaggatatggcggttaccggagacgagtcgatccagtttgaacttaccagcttaaatcaggcactgatgatgatggaacagcgtacacaggatcttcgaacagcagagaatgttgcaatgcagtccattccgatgatcaaaacgatggagttcagcaactataatctggtcagaaaaattaactccgcatttattgtaacacttccggtattcaaacaggcacttgcacaggcaattctgctgaaacgccagcgcattcaggcagaagcaatgtctgctctggataagaagaccaacgagatgctgatcaaaaatgcgcagaatactgtggaagtttccaaggctaccgctaagatggcatccggaagctcaatccagattgaaacacttgagacgacctggagaacgattaccagtggtattgaagaaacgaaaagaattcaggaagactgcagaaagaaacgtgtggaagatcaggcaagacttgaggcgatcaaggcggatttcaacagacagtatcatatgccgccggcaaacaagtaagttatttctaataactatagattcatttattctaaggagggtaatactatgccaattaatttatcaaaaggacagaaagtagatttaacaaaaggaaatccgggactgaaaaatatcatggttggtcttggctgggatgtcaatgcatttgattccggtgtagattttgacctagatgcagcagcatttatgctgggagcagatggaaagtgcccgacagacaaagaatttgtattttatggaaatctggctcatccgagcgagtctgtaaaacatatgggcgataacttaaccggagagggagaaggcgatgacgagcagatccagatcgatctttccaaagtaccggcaaacattgagagaatcgcatttaccgtaacgatctatgaggcggaggcaagacgccagaattttggacaggtatctaattctttcattcgtctggtggatgagacaaccggaaaagaaatgatccgctatgacttaggagaggatttctccattgagacagcagtcgttgtcggtgaattatacagacataacggcgaatggaaatttaatgcgatcggaagcggcttccagggcggactcgcagcactttgcggacactatggaattgaagtggcataagaggagtaaaatcctctgctcaccagagggttcgcattttgctccgcaaaacaaggagtaaaatcctctgctcaccagggggttcgcattttgctccgcaaaacaaggagtaaaatcctctgctcaccagagggttcgcattttgctccgcaaaacaaggaggattataatgtcaattagtttacagaaaggacagaaggtcagtctgtcaaaagataacgcaggattgtcaaagattattgtcggtcttggatgggatgaagtgcagcagtcttcatccggaggtggattcttaagtgctttattcgggggcggatcaaagcagcagccgatcgactgtgatgcatccgcactgatgttaaagaatggaaaactggtggataaatcagacatcgtttattttggtaatttgcaccataaatcaggtaccgtaaatcatcagggagacaacctgacaggagccggtgatggagatgacgagcagatcgtgatcgaccttgcaaaagtaccacaggagtacgacaaaatcgtaatcgttgtaaatatttatcaggcggttcagagacatcagcattttggcatgattgagaatgcattcatccgtttagttgatgcaagaaacaataatgaaatgtgcaagtacaacctgactgaaaattattccggtatgacggcaatgatatttggagaagtgtacagacataacggagaatggaagttcagcgctgttggccagggtacaaatgacccgggactgggagaactgagcagaagatttgtataaaaaagattgatacattagaggaggttaactacccaaaatgagtaacataaataaagaagagctgatgagaggtctgtcagactcacaggtaaacaagagcaaacaggattttggaacaaatgctcttgcaaaaaaagagacagaatcactgtggtcaatgttcatcggagcatttgatgacatttggatcaaagtattatgtgcagcactggtcatgaaaatcgttatttccgttatcggtgtatttgtaccggcattagcgggagaaaatgatgttgttgagatcataagtattgttttagcaatcgcactggcaaccggattcagtacattatccgagtaccgcaacagttccagaagtgaggcattacaggaagaatacaacaagacttatgcaaaagtcatgagaaatggaaaactggtcaatatccttaccagtgagattgtaaaaggtgatacgatcctcgttcaggctggtgataaggtaccgaccgacggtgtgttatttgaaggacacatcaaagtttcacaggctgcattaaacggtgagtcaagagatgagaataaaacggctgctgataatcttgatgaagcggaatctacagattatgcatctgcaaataaagtatttatgggatcagtagtgacctccggtgaagggtatatggttgcaaccgtcatcggtgatgcatccgaacttggaaagatcaacaaggctctgacggatgataatgaagaggacgagagaaaagatacttcaagcctgaaactggaagtggtagctgccggtatcggtaaacttggtgtgtccgcggctgccattgcaggcgtattagatgttgtactgaacctgatccgtacggatgaaccaatcacagttgtttatgttctgcttttggttgcagaggcagttatgttgatggcatctatcgttatcatggcagtgccggaaggtcttccgatgatgaacagtctggtgcagtccatgaacacagagtccatgtacaagaaaaatattcttgtcagccacaaggcagcattttccgattctgcgtatatgaatgttttattcagtgataaaacaggaacgatcacacagggtaacttatctttggtagaatttatcaccggtgacggtaagatcgcagagaacattccgaatcaggaatttatcgaggcgattacattaaacaatcttgcaaaagtatccgaaggaaagccaatcggaagtaataacatggacagggctcttttgggatatgccctagagcatggctatgatgattctaaaaacgatccggataaagtcgctgacatcagcggatttgattcggaaaagaaatgcgctaccgttacattgaaaaacggactggtttactggaaaggtgcaaccgaaaacatcattgataaagtaacacattatatgcttccatccggtgaagaaaaagaatttactgcagcagataaaaaagctgtggaagatcagatgctcgcccaggcaaagagaacgatgaaattgctttctgttgccaaaatcgcagatggaaaaacagttctgatggcagtgctctgcttaagagataacgtaagaaccgatgcggttgagacagttgagattttaaacaatgccggtatccaggttgtcatggtaaccggtgatgcggaggaaacagcagttgccatcgcaaaggaagctggtatcttaaaagacgagcagaacgatgttgttctcacacatgaagagttagagcagatgtcagatgaagagttaaagaaaaaacttccgaatctccgcgtggtgagcagggcaaaaccgcttgataaaaagagacttgtttctatttcacagcagcttgataatgtctgcggtatgaccggagacggtgttaatgatgcaccggcattaaaacaggcagatatcggatttgccatgggagacggtacagcagttgcacaggaggcaggtgacgttgtcatcttaaataacagtttgacttccattaaggactgcgtattgaacagtagaacaatgtcaaaatcagttggtaaattcttaatcttccagctgaccgtcaatatcagtaccctgttgatgaacattattgcgccgatcctgggatggaccgagccattctccattgtccagattttatggatcaatctgatcatggatactttggcagccatggcatttggcggagagccgattctcgaccgatacatgaatgaaaaaccggcactcagaaaagataacattttaacaacttatattaaatctgcaatcggaacaagctctgtatttatcacacttggctccatcctgatcctggaaaacattggtgggattacagattttgtaacaccggcaggctgcgcggatccggaattatatgaaaaaacatttatgtttgcttttttcatttattcaatcatttttaacagcttaaataccagatctgagagatttaatgtatttgaacacattgaagagaacaagaattttatcattgttatgggtgtgatctttatacttcagaccatcatcattgagattggtggtcaggtattcagcacaacgacattgaatgcaaaagcattatttgtttccatgctgttagcagtgctcattatcccggttgatatggtaagaaaagccattgtttcgaaaaaatgatcgcctttcataccgatttggataatacactcatctattcctataaacatgacatcgggccgcagaagcgaaatgtggaactctatcagggaagagaaatatcctacatcacagaggaaacatatcatctcctgcagctcgtaaaaaatgaaatgctcattgttccaacaaccactaggacgttggaacaatatcagcgcattgatctgggaatcggaccatttccatatgcattggtctgcaacggtggtgtccttctggtaaatggtgtgccggatgaagcatggtatcaggactccctgcatctggtgtcggatagcagggaagaaatgaaccttgccatggaactgttagagcgggaaccacgcagaaaatttgaactccgatacattgaaaagctgtttatctttacaaaatgcaatgatcccgaaacagttgtaaatgatttaaaaacatttctcgatacaaaatatgtagatgtcttttccaacggtgaaaaagtatatgtagtaccgcaaaccctgaataaaggaacggcagtagaccgactcagagaaaaactaaaaccagagttcgtaattgccgccggagacagcacctttgatatccccatgctatcgaccgccgaccgcggacttgtcccatctggattcacacaaaaatatgaaatcccgaaaacatccggagcccggaaaaaaatagatgaaatgacatcgaaaaaaatattttccgatggcctattagaaaaagttctaaaaataaaaacggagtctgttgcagcaggtattattcatacaggataataccacttgcaacagactccgtttttggtatgtgaggtaaagtgccagccactaatccatactcacactgattccgcccttcctctccgaaggctgaataatcactgtaaccggacaattcccatgccactcaaactggtaagactccccggaagcctgtccgataaacgttttccacgaaatatcagccgtcacctgcggatcacaatgtccatttccaacccagcatacaacagcgtccggatcaacagagatcgtatcctgagacatcacattgcttaaaacgatcgggttgccgtcacaaagcacagcaacatatgcatcttttccacgtgcaatcagagtggaagttgcaagacctttctgggaaagcacaccgacaccgataaaacggacactgtaatcacaatcctgggagaaagcgagaatattttcggattccactgagatagtttccccctgctctaagtgatagaccacaacatgctgaccataatttgcgtaatatgtaacagaatcaccatttaaagttaccttcataagtgggagattttctccggtcactcttcgtgcaagctgaccaagcagagcctgcccgatattattctgcggtccaagcaagactttttcaaatttgtaattctttccaccggcattttctccggcgataaatgcacctgcttttgtaaagagtacatcactgccagtgcaggtaacctttaaagtaagttcgtttactgtttcaaatgttaacataacaaatttcctccaaaatataatcctttgtttaaataacctgaacgccgtacaaactgcacagtcctgcgagatcttttgccacgccgtttccgatggcattaaatttccatgcgccgttatgcagatacagttcaccgatcatcatggatgtcacgttcgtatagtattcatccattttaaagctgaccagctcggtgccggcaggatccataatacggatatacgcatcctcaagcattccgaaattcagatttttttcaaatgcttcattgatcgtcagcacaaatacgattctggcaacggatggatctaatctggtaaaatccacggaaatgatctcgcggtctgcgccgccgtcagcgtggaaaaccgtgctgtgatccgggctttcggtctgcccgtaaaagacaaaccaggaatcaccgatcactttaccggatgagccgagcaaaaatgcggatacatccacatcacaggcaggatttttgacattccatccaagacatgcctttatggaagtgagcttcccggaattctccagcggtgttttctgacctttttgcaccatatgtaccagtggaggtaaaggttttgacgccggtgtggatgcgtttgatactgcctgagatgacgtgtggttgatcgaagtgatggttcgtgttgtttttgccccctcaactttgcgttcgttgatggaaagaacggtctgtctggtgacgggagcagaggatctcattggaatatctaccataataaaaaaccccttatcgtttagtaaaataatagaatgtacgcttcgcgggcaatctattgttatgaattaataagtctctggatttcattttaagtgattctgctagaggtgtcaaattgcgaaatgttgacatataagtcaacaaaaacatcggttgcaaaggtttcatcaaaaggaaaaatcgttgcagtagcgccgggaagctgtaagatttccgtaaaatcacaaggtgtaaccagcaatataatagaaatcaaacattttatatgagaaataagttagggaggccggatgggcttccctaatttttttaatcggatttatttggaaattatagaagatccttgttataatacaacaggtaagcagaacaaacagcttctatggcatacaggaatttgagatacaaataatggaatgtatgtttgacagatcattttattatgatgaataaaaatgcaggaatggagaatttatgcagatctatgtggatgcggatgcctgcccggtggtgggaatcgtggaagaacttgcaatcaaatataagataccggtgacgctgttatgtgacacgaaccacgttttatattctgattacagtgaagtaaagatcattggtgccggggcagatgcggtggattttgcgctggttaatttatgccggaagggagatatcgttgtgacacaggattatggggtagcggcgatggcacttggaaaaggtgcatttgcgatccatcagtccggaagatggtacacggatgataacatcgaccggatgctgttagagcgccatatgaataaaaaggcgaggcgggcatccgggaagaatcatctgaaaggaccaaaaaagagaaatacggaggatgatatgcatttccgggaaagttttgaaaaaatgattcgaaagggaatggagaatatttatggcacaacatgaaaaattttatttaaatggtacctggcagttaaaaaaagcggatgaaacactgctctgcccggtggagattccgggttcggtactttccgggctgacagaacacggtttacttgaagatccgttttaccggatgaatgagtacccgacaagagagctgctgaaaaatgattttattttttcaagggaatttgaactgaaaaaagaagagggaagagtgtatgcactctgctgtgacggaatcgacacggtggcagatatttttatcaacggcatgctgataaagcatgtggataacatgcatcttcgttaccggatcctgtgcacaaatgtcctgaaaaacgggacaaacaatatcacagtgaaaatccattctgcaatcgcatatgtaaacgaacatgtgccggcagcgggaaaagagattcattacacggcatgcggtgcgatggaaggaaatcagtatatccggaaagcacattccatgtttggctgggactggggtccacagttaccggatatggggatctggcgtgatatttttattgacagctatgagaaggcagaactgtctgatctgcatatcagacaggaacacatagatggaaaagtttttctgtcggcagaaacaaaagtgatgttgccggaaaaggcacaggacggtgaaattgcggaagctgagtatctggtattgccacagagtgcggaaagtaatgcccggatattgaaagaaagtgtgggaaacaatgattcgacactggcagagaatgcagataattttgaggtaaaaatcacgctgcagacaccggatggaaaacagatttctttttcggatggaaaatgtctggttgaagatccgaaactctggtggccgaacggatacggtgcacagccgctttatacggtgcgtgcggaactttttctgggcggagaatttctggatgcaaaagaactgcgcattggtctgcgcacattgacggtcagccaggaaaaggatgcatggggcgaggaatttgctttttgcatcaatggggtaaagatttttgcaaaaggtgcagactatattccggaagactgtatttattcaaaaattactccggagcgcatttatgagttgttagatacggcagtggcatgtcattttaactgcatccgcatctggggcggcggttattatccggcggatgttttctatgattactgtgatgaacatggtctgatcgtatggcaggattttatgtatgcctgcaatgtctatgagctgacggagaaactgcgggagagcattatagaagaaacgaaggataatgcgggaaggttgagacatcatgcaagtcttggactctggtgcggtaacaatgagatggaatcagcatgggaccactggggcggttttaatgatcattcggatgcgttaaaacaggattacctgaccatgtttgaaaaactgatcccggaagccttaaagagcgaggatgatgtgacgttttactggccgtcgtctccgtcatccggcggtaattttaaagacccggacagtgatgatgtcggggatcgtcattactgggatgtatggcatggagaaaagccgttttccgactatgaaaattactatttcagattctgttcggaatttggattccagtcgtttccatgcaaaaagacgatcgacacatttaccctgcctaaggatcgcaatatcttttcagaagttatggaaagtcatcagaaaaacggttctgcaaatgcgaagatcctgcattacattgcggagaactttttatatccaaaagattttgagagtctgatctatatcagccaggtgctgcaggcgatcgcaatcaagagcggtgtggagcactggcgcagaaacaggggacgctgcatgggtgcaatttactggcagttgaacgataactggccggtcgcatcctgggcaagtatcgattactttggaagatggaaagcgctgcagtatttttcgagacatttttatgcggatgtgctcggcagtttaaaggtatctgcggatgctgtttatacgccttatctgcaaaatgagacgatgcaggaggtgtcgtctgatgtcacggtttttgtgaaaaatatgcgtggggaagtgctgtttgaaacttcacagcgcacagagtgtgcaccattgtccgtggaagccatggaaccggtatctttgaaagaagtgatagagggcagagaaagcgaggtctttgtggaggcggtatttacacattctgatggaactgtgagccgccaggtggaaatgccaaaaccgtataaacatatgcagatcgaaaaagcagagatcatgttcgatgcaaaaagagaggaaaatctgttgacactgcagttaaaatcagatgttccggcattttttgtctcggtggagagcgatgtggatctggtctggtcggataattttatgcatctgaccggaaaggaaccttatgagattacggctattctgccggagtgcgtggaaggcatgcctaagatctgggtacggtcactgtgcgattcgtgggttacggattattcgcaagcttgacacctgttgtcaggctgtgagccagaaactaaagtatgtgaggtgttactgttcactcgcaagcttgacacttgctgtcaagctgtgcgccaaagactatatcatgccagattacagaagaatcactccaaaatagaatgactttacaccacccgatacaagtgctatcataaaaatagttagaaacaactaacaaatgagaagcattttaaagaaggtggaatcctatgaaagtatattgttttggtgagaaagaaaaaccggttatttttcttttccccgggacttgttgtcactggaagggcaattttggaaaagtaatagagccgttggaagaatattttagggtggcatgcgtttcctatgacgggtttgatgagacggaacagacagagtttccgacgatgacggaggaaacggaaaaaattgaacagtatataaagaaagaatttggcggacatatctgtgccgcatatggctgttcactgggcggttcttttgtcggactgcttgtagcacgcggaaatatccacatggagtatggtattttaggtggttccgatttagaccagtcgggaaagtttttggcaaagctgatgacgaaactgatgatgccggttttttatccgtttatcgcgaatggtgagatgaaaattcctttcatgaaaaagaaaatggacaagatgctggcggaggacaatggctatatcagagcgtttatggatatgataaagacgccggatgtcgatatgagccatattacaaaaagaagcgtcgaaaatcagttttactcagacctcattacaccgctgccggatcagatcgacccgtccggaacgcagatacatattttatatgcccttaaaatgggtgaaaaatatcgtgcgcgttacaaaaaacattttgcaggaccgatcctgcatgaactggatctgcagcacgaagaactgcttgcggtttatccggatgattgggtaaaagtgatcgcggagatctgtaacagaaaacagggagattgtgcggcaagatttaaaattaagggaagctgatgaagtggggaaagttgaatcatcagagaaaacaagaagagaaagtgagaaagagtctcaatttttcttcttgtttttttgattgatgttcggtatactgaacgatagttagacaaagctaacaatagtgtaaatcatgcagactccggaaccggaaagttgctacctttcctgctccggtgggattgtctgcaaacgaagaaaaaggagacagcgggaatgaattatttagagattgaaaaagtaattggaagggagattttagactccagaggtaatcctaccgtggaagctgaagtatatttagtggacggtaccattggaaggggaatggcaccaagcggtgcgtcgaccggagaatttgaggcattagagcttcgcgacggcgataagtcaagatatcttggcaaaggtgttaccaaggcagttgaaaatattaatacaatgatcaacgatgcgatcgtcggaatggatgccagcgacatttatgcagtggatgcagcgatgatcgcagcggacggaacaaaggataaatcaaaactgggagcaaatgcgatcttagcagtgtcgattgcagcggcacgcgcagcttccatctcactggatattccgctttaccgtttcttaggcggcatcttgggcaaccgtctgccggttccgatgatgaatattttaaatggtggtgctcatgcggcaaacacagtagatgtgcaggagttcatgatcatgccggtcggtgcaccgagttttaaagaggcactccgctggtgtgcagaggtgttccatgcgcttgcagctctgttaaagagcaagggacttgcaacctctgttggtgatgagggtggttttgcaccggatcttgcatccgatgaagaagcaatccagtacatattagatgctgtgaaaaacgcaggatatgagccgggcagagatttccggatcgccatggatgcagcttcctctgagtggaagagcgaaaaaggaaaaggattctacaaacttccgaaggcaggcaccgagtttacttccgcagagctgatcgaacactggaagaaactggttgaaaaatacccgatcatttccatcgaggatgcacttgacgaggaagactgggaaggctggaaacttctgaccaaagaacttggtgataaggtacagcttgtcggagacgatttgtttgtaaccaatacggagcgcctgaaaaaaggtatcgacaacggctgcggcaatgccattctgatcaagttaaatcagattggttccgtatccgagactttagaggcaatcaagatggctcacaaagcaggttatacggcaatttcttcccaccgttccggcgagacggaagacaccacgattgcagatcttgcagtggcattaaatacctgccagatcaagaccggtgcaccgagcagaactgagcgtgttgcaaaatacaaccagcttctccgcatagaggaagaacttggaaatgcagcagtgtatccgggaatgggtgcatttaatgtaaaataaggaatttacgcacattatagtttattttctcctctatctcatggaaagaacgcgaaaggtcagggatggcttttggcgttctttttatgcaggcagggctgaccggggacattgtgcaaaaaatctcggacgaaaaggatgatccggtgtggatgcgtgagttccggatgaaatcactgcagatttacagacagatgcagatcccggactggggaccgccgatcgacgggctggacatggaccatattgagacttatgtgcgcccgaaaacgaagatgcgcggaaaatggtctgaggcgcgctccatgatcatcagcggatttgcggatgatgtatcgaaggaactgccggattttttagaaacattttatttgcaaaataatccctgacggtctacacttgctatagcaacaatacacaataccgaacaacaaagatacagaaacggtaaagttccgcaggcaggcccgccaacaaaaccttatcgtttctacaccccacaagagaggacaccacccatgccatcattcgtaacattttccaacgtcggcaaaatctaccacaccggcgaactcgacatcaccgccctccatgacgtcaattttgagatcgaaaaaggagaattctgcgtcatcgtcggtgcgtccggtgccggcaaaacgacgattttaaatatattaggaggaatggataccttaaccagcggacaggtattcttagacggacaggaaatctcaaactatgacaaaaaacagctcacctcataccggcgtttcgacatcggatttgtgttccagttttacaacctcgtgcagaacctgacagcacttgaaaatgtagagcttgcggcgcagatctgtaaagatccgcttccggcggcaacagtgcttgaggaagtcgggttgaaagaccgtctgttaaatttcccggcacagctttccggtggagaacagcagcgtgtcgcgatcgcgcgtgcgcttgcaaaaaacccgaaacttctgctctgcgatgagccgaccggagctctcgattataataccggaaaagcagttttaaaattattgcaggacacctgccgcgaaaatggaaaaacagtcgtggtcatcacgcataaccaggcacttacagcgatggcggaccgcatcatcacggtaaagagcggcacagtcgtttccatggaaaaaaatgaacacattgtagacattgcagatatagagtggtagacggttatgagatcaatgatttggaaatcaacattcagggaaataaaggaaagtctcggccgttttctcgctatcctggcgatcgttgcattgggtgtcggattttttgcaggactgaaggtcacacagcctgccatgttaaaaacggcgcagcgttattttgataagacagctctttacgactaccgcctgatctccacggtcggtttttctgaggatgaagtagagaccataaaaaaacaaaaagatgtaaaagcggcagagggagcagtcacgtttgacattgtctgtgagagcggcggcaaagagcgcgtgctaaaaatgcacagcatcacagaggatgttaaccggctggtgcttgtggacggcgaattgccggaaaatgcaggggagtgcgtggtggactctaatctttacggcgcatccatgattggaaaaacgatcaaattgtccgacggcaatgacgaggacgatctggaacatttttcaaaccgcgagtataagatcaccggaatcgtgcagtctcctctgtattcgcagtttgagcgcggaagtacgtcgcttggcaacggcagggtgagcggatttgtctatcttttgccggaaggatttgcagacgattattatacggaagtttatgtgaaatttgcctgcgattttcctttgtacagtgaagaatatgatgcttacatagaacaaaaacaggatgcgtgggaagcactgacggaggatcttgcagcagagcgttatcagacagtgcgttcggaggcagagacaaaacttgcagatggaaaaaaacagcttgcagagaaaaaagaggagacaaagagccagcttgatgatgcaaaaaaacaattagaagatgcaaaaagccagatcgaagacggcgaaaagcagcttgcagatgcaaagaaaaaattggaatatgccccggatgaattagaaaaaaaagaggcagaactgacggaagcagaaaaggcgattcaggagaaagagacacagttagatcaggcggaagttgcacttggaatcggttatgcgcagggagtcggacagatccagaaagcattgaacggaatttctgaggggcttttttccgaaaatggagatcagggaaatggtgcggcaggcagtttttcttcgggagatgcattagcggatgcaggatcacagattgcagatgcaaaggcacagattgcagacggaagagcgcagatcgcggaagcccaaaagcagatcgagagcggaaagagcgccattgcaaaagcgaaaaaacagttggaagagtccaaaacacagatagcagaaaaggaagcagaattatccgatgcgaaaacgcagtatgaagatgggaaaaaggaatatgaggacggactttcaacttacaatgaggaaatagaaaaagcggagaaaaagatcagtgatggcgagaaaactttaaaggaattaaaagatcctgatacctatgtgctcggacgcgataccaatgttgggtatgtctgctttgagagcgattccggtatcgtggacggagttgccgatgtatttccgatcttcttctttctggtagcggcacttgtgtgtgtgacgacgatgaaccgtatggtggaggaacagcggacacagatcggtgtgttaaaggcactcggctacagtgaacataccattatggcaaaatatatgttttattccggctccgcggcgctgaccggatgtgtggctggatttgcacttgggacatttttattcccgaaagtgatctggtatgcatacggcatgctctataagatggattccctggtttatgtgtttgactggaaattagcagtcatttccgtgatcgtatcattgctttgttctatcggtacaacctttgtgtctgtccgccgcgaactgacggaggttgcggcagagctgatgcgtccgaaaacaccgaaagccgggaaacgtgtattccttgaatatataccgtttgtatggaagaggcttaaatttttgcagaaggtttccatgcggaatattttccggtataaaaagcggtttttcatgatggtcgcaggcatcagcggatgcagcgcacttttggtgaccggatttggggtgagggattctgtgacgggaattgtgacgcagcagtatacgcagatccagacctatgatatcggtgtgacttattcatcgtccgtcacaccggagcaaaaaagtgaactggaaagcaaagaacaggacggtgtggaaaaatctgtgtttgtggcagaaaagagcatggatttagttggcagtgaaaagacaaaatccgtcagccttatcattgcagatccggattcggatatgacgccgtttgtcaatttgcatacggaaaaaggagtaccgatcacattcccgaaaaagggagaggcggttatttccgcaaaagtggcagatgaacttgggataaagaccggagataccgtgacgctgcaggattccgacatgaaaaccatatccgtgacggtaagcgggctgtgtgaaaattttgtatataattatgtctatttgtctgcggatacctatgaagaacagatgaaaacggaaccggaatacaaaaacgcatttgtgtgtgtttctgagggcacagatgcacatctgcttggaacatccctgatggcaatgtcggatgtggcagcggtcaatatttcacaggatgacatggaacgtttttcaagcatgatgggcagtatggatctgatcgttgtggtcattattttgtgtgcagcgggacttgcttttatcgttttatataacctgacaaatattaatattacggagcgtgtgtgcgagatcgcaacgatcgaggtgctcgggttttacgaaaatgagacagccgcatatgtgttccgggaaaatacgattctgacatttctcggcgcacttgcagggcttgtgctcggtgtatttttgcaccggtttgtcatgagccagattgtcgtggatatggtggcctttgatgtacatgtaaaaccggtcagctttgtatatagtgtggtgctgactctggtgtttacctggtttgtggaccggctgatgcgaaagaagatcgatgcgatcagcatgacggaatcattaaaaagtgttgattagaaaatagaattggacgttaacgcgggaaagtgttatagtttatttatagaaaacgatgaatcaggagatgatacatatgggaaaaattataacaatcggacgtgaatttggcagtggcggacgagaggttggaaagagactttccgatgaacttggaattgcctattatgataacgagattataacagagattgcaaagagaaccgaacttgcagaaggttatgtgcagcatgtaatggaaaatggtccgactgccctgatgccgatcacaatcgggagaactttttatatgggcgcggatcctgtgatggaacagaacaatgcgatttacagagaacagagcctgttagtacaggaactcgcggagaaatcagactgtgtgatcgtcggaagaagtgcagattatatcctgcgcgacaaaaagccgctgcgcctgtttatttatgcagatatggaatcgcgcatggagcgatgcagaaagcgtgcaccggagcaggaacattttacagacaaagagctgagacgtcatattcaggatgtggataagagacgttccaaatattatcagttctttaccggacagacctggggcgagaagttaaattatgacctgtgcatcaatacttccggtgccaatatcgaggatctggtgaaagtgatcgcaaaattggtaaaataaaatatgcaggaatattatctaaacagtgaaaagaaaatctgtctgatggaattgtctgagtttaaggaattagagggtgcgtatccacataaacggaatttgttccgcagcatgaatccggtacagtactgcaaggcagaaagttacggggactgcctgtttgggacgatgaagataccgcgtgccctaaagggcagagtgacgtatatcgtatttggattttatctgagaggcgaagaactgctgttgatcgaggatggcagtttcctaaagacgtgtcttggaaggctgaaaaaaattatacccacagagtgcagcatgcatcagttcctcgttatgatttttgagatgctgatcgaggatgatgtgatctatctgcagcagcaggaggaaaaattagcctccattgaggaagagcttttaaaaaagatcccggagcatttctatgagatcattctgcagtacaggaaacgtttttcggcatatcatgcatattatgagcagcttgtcaatctggcagatgccatgcagagtgatttcggacagatactgacagacaaggagcgatcgctctggcagctttatgcgaaccgtgtggaacgcctgcatgatcatgtggaactcttgcgggaatatttagtacagatccgtgagttataccagtcactgatcgatgtacagcagaataaggtcatgagtatcttaacggtagtaacgacgatatttctcccactgaccctgattgccggatggtatggcatgaactttccaaatatgccggagttcggatggaaatatgcgtatccggtcgttattgtagtcagcatctgcatcattgcgggagagatcatttattttaagaaaaagaaaatgctgtaagcaggcgagattctgcgcgtaaaataaaatatgtttgacagaaatccggaaatggagagaaatctttgtttccggattttcttgttttcagaacgatatgtcaaagtgtaccagactggaatatattagaataagaatagattaaagaagctgtcagtatggcttatgatataaaaagactgccgagcgaagcgagtgtagatcacgatcatgaagcatcgcttcatgatataaaaagactgccgagcgaagcgagtgtagatcacgatcatgaagcatcgcttcatgatataaaaatttcgggcattacaaaaagtttttataataatggagagatgcgtcaggttctccgtccggtcaatattttgataccgcatggaaaatttgtgtcgatcattgggccgagcgggtgtgggaagtcgacgttatttaatattgtggcgggacttctgccgccgacatcgggagatattacgattggagagaaaagcattttaggggaaaaaggttacgttggatatatgctgcaaaaagatatgcttctcccgtggcgtacgatcatcgacaatattattttgggacttgagataaagggcgtgccgaagcgggaagcgagaaaacaggcactgccactgatggaaaagtacggactttcgggatttgagaaaaattatccgtgcgagctgtccggtggaatgaggcagagagcggcgctccttcgcacacttttgtatgacagggaaattatcctgttagatgaaccgtttggtgcattggatgcgcagacgagacagtctatgcagaactggctgttagagatctgggaagattttcataagacggttttatttgtgacacatgatatggatgaggcaatttatctgtcagatatcatctatgtattttccggtcgtccggggtatgtgaaagaaaaaattaccgttcatttgaaacggccaagaaaacaggaagatatgctggagacggatttctgggatctgaaacagcacttgatgggagggatgagtgatgaaaaaagaagcgtatgaggtggagtattatgaacctaaatccgttttggcgatgcaggcagacaggcgggaagaaaaacactggagaaaacagaaaaaagggataagggcaggacgtatcctgcttggggtcgccatcctgctgttttgggaggtaagtgcacgtctggggtggatcgatgactattactggagctcaccgtccctgatcgcacagactgcgatcgtacagtggaaagagaaaaatcttgcatatgatatctactttacctcgatgtccacgatcggcggttttttagcgggaacattgggcggcgcagttttaggattgtccttctggtggtcaaagacgtttgcaaagatttttgagccgtatcttgtgatgtttaatgcaattccgaaactggcacttgcaccaattttaattgtactgtttggaatcggtttttcatctaaagtgatgctggcatttttaatgacggtaatatcctgtgcgcttgcaacggtcagcggggtggagaatgtggatgagtcgatggaaaccttactttattctcttggggctgccagatggcaggtgtttggaaaagtcgtggttccggcagtgcttccgtggatgcttggaagccttcggatcaatatttcactggcgcttgcgggagcaatcgtcggcgaatttatcgcatcggggcacggacttggcagaatggtcatttatgcgggaactattctggataccacgttagtgtgggttggtgtgatcgttctgtcgctgcttgcgatggtgatgtattttgcggtggtggaactggaaaaatggatgacggaacatctggcgatttatcgtaaggcgtgaggaggacaccagccgctatgttgtgatacacctttgggcacctgagtccatattatattaaaaagtgaaaatgggtcgaaatgtttaaaaggaaaatgttaaagagaaaattgttcagttgtttggcttacgttgtatttgcagcaagtttatttgcgacagcatgcagtggaagaaaaacgcagcaggagagtgtggaactcaaaaaaatcgtgattgcggagccgttacattcgatcgggtatcttccactttatatcgggcagcaggagggattttttgcggaggaaggccttgatgtggaggtgatccaggctacgggcggctcgcatgtgacgtcggtgatgagcggggatgcgtggggagtaatcggtggagtggattcaaatgcaattccgaatgcatccgggaactgcccagatccggtgattgctgtctgcaactgtgtgaaccgcgctaatgtgtatctgtgtgcggcagttggcgaggaatacacaggaaatacagatgaagaacttgcacagtatttcaaaggaaaaaagatcaactccggcagatttggcggcagcccgaatctgtgtgtgcgctatcttttactgtcaattggacttgatccggataaggatgtagtgatggtggaaccggcagatatgtccacctcagttgccgtggtacagagcggtcaggcagatatctcctgggcagcggaaccacagattgttgacggtatgaaatcaggtgtatggacggatgcattttaccagtttacagatcttggagactacgcttactccgtactcagtgtgtcacagtcaaccatccggaatgacccggagacagtacagcactttgtcaatgcaatgttaaaatcgctttctgctgcacaggataaaaaaactgcggtccgcgctgccggaaaggaatttccaaccacaccggccgaagacattgaagcagcgatcgaccgtgcctataaagatggactctggagtgtcgatggaatcatcacaccggaggcagtaaaaaatgatatggaagtatccattgcatccgatgtatatcagggtacctatcagtacgatgaactggtagatatgcagttcgtcgaaaacgcacaaaaacaaaattgaagagagtatttagtagaatagaatgtatgcagatttccggtgctttcctaaggtgccggggaatctgccattcacaacacaccgatacaccttttcccccaaatttgtaaaaataaatttcgtaaattttcgggacaaacccgccatcttatagtataataaccgtactaaagtaatataaccacccccacacaggaaaaggagaaaagcgatgataaatccggcatcaataatgaagatcatgaatgcaaaaaataaattcacggcaaatcacccgaaatttgctgcatttctaaacgcagtattttccaccggcatcacggagggaacaatcattgagattaccgtgacaaaaccgggtgaggaaccgatcacgacgaacatgaaggtgcagcagtcggatcttgaactgttacaggaattacaggacattgcaaaaatgtaaaaatagaaatggagaagcatatgttaggaaaaaaactttcttatcagaccaatggaagtacagtagaatttgaatttgaacatggaacggcgtatgtcacggcagtcacggacacgatcatgaatgtatttgttccgtaccagtcgaaagaccaccgttcaaaagcaatcgagggagataaaagacttccggttaccgtagatgtctctgaggaaggcggagcagtacagattaaaacagataagctgacagccaaagtatacgatgattttttgatcgatttttataaaaaagacggtacacttttatgtgcagatttcaggggagagcgaaagaaaaaaaagaaattaagcgatgaagcacttgcaacgttagagtctgagggacatgtcgtatctgcggagggtgaaaaagaagatcctgttatggtcgtaaagcagatgagcggggatgaaaagttctatggactcggagataaaacaggcgttttaaataaaagaaattatgaatatgaaaactggaattccgatctgccacaggcacacacggacgattttaaggcattgtataaatccattccgtttttgatcacattaaaagatgcgggtgtatttggaatgttctttgacaacacttacagatcacatgtcaatctgggaaaagagaacagcgcctgctattattacagtgcagagaacggaaatctcgattattattttatttccggggaaaaaatgacggatattgtggaaggctatacttatctgaccggaagaacccctctgccgcagctttggacattaggacatcatcagtcaagatggggctatatgtcagctgatgatatcagacgtgtggcacacaaatacagagaactgcagattccatgtgatacgatccattttgatatcgattatatggatgggtaccgcgtatttacctggaatgaaaagggttttggagcaccgggtgcaatcataaaagagatcgcagaggatggttttaaggttgtctgcatcattgatccgggtgtgaaattagatccgggatatgcaaagtatgatgagggaatcgcgaatgattattttgcaaaaacaccggaaggggaagtatacgtcaatgaagtatggccgggcgaagcggtatatcctgattttggaaagccggatgtaagaaaatggtgggcagaaaatcagaaattcttagtggatcttggtgtgcgaggaacatggaatgatatgaatgagcctgcaagtttccgtggagaacttccacaggatgtcgtttttacggatgaggatcaaaagacagatcatgcggcaatgcataatgtttatggacatctgatgtcaaaggcaacttatgaaggattaaaggaagccgatggaagaagaccgttcgtgatcacaagagcatgttatgcaggaacacagaaatactctaccgtatggaccggagataaccagagcctctgggcacatcttagaatggcggttccacagctctgcaatctcggtatgagcggaattgcatttgcgggaacggatgtcggcggatttggtgcagactgtacaccggaattaatgtgccgctgggttcaggttggtgcattttccccactgttccgtaaccattcttccatgggaagtacattccaggagccatggcagtttgatgatgagacgatccgcatctaccgcaaatttgtggaattaagatatcagttacttccatacctgtatgatctgttccgcgaatgtgaactgaccggactgccgattatgcgtcctctggttttacattatgagaatgatccggaagtctggaacttaaacggtgaatttttagtcggagaaaatcttttagctgcacctgttttagagcagggagagacgaaaaagatcgtatatcttccggaaggtgtctggtatgattatgagacaaagaaaccatatcagggcagacagtattatatggtagacgcaccgcttgatacctgtccgatgttcgtaaaagagggaggcatgatcccaacttatgaactggcacagtacgtcggtgaaaagccgtatgataccttgaaaatgcgcgtgtatccgggcaatggaacttatctgcattatcaggataacggagcggattttgcctaccgtgacggtgcttataatgtgtatgagtttacgcatgaaggggacaaaaaagaggcatccgtgcagatgaaaaaagaaggttatacgaaatacaaaaatattttgtttgaataattctaacgcataatggaacccgcacaaaagtattcctcacgcatatgatatagagatgttagcgacaggagcaatgtgtggactataatcaggaacagtttttccgtatgcagatggatgtgccgaaaatgcctttttatatgagctatccgatgcagaatctgtatctgacggaaatggaatatgaaaaagatatggaacgcatgaaggagctttatccgaaagaggtgaagacaatcctttcttatgtggaagatgagtgcgacaagatggagtatgaggggagcctgatgtttgacgagtatccggaccgcctgatgttagaacaggtggcagagcggatctaccgcaatgtggcaggggaagaaaagaatgttgaggcagaacagtactggggcggaatgaatccaccgccgggacccgggatgccgcccccacctccaccgggacctggaatgccgcctccaccgccccctggaggacgtgatgatatgcggagcctgatcggggtattattaaataatgagatgtacagacggcgctgcaggcacagaagatgcagacgctggtggtaaaacaaatgttacagaaaatgggcaggtcataggtacactgcccgttttttaattctctttcttaaaatttcaaaaagaatcagtgataggcattgcggatttgaaaaaaaatgcatacaatatatctgtcgctttttttcgtgtttcagaagaaattacaaagatggcgattttaacggggaaaatgatatttcattcacatagagtaaggagacaatatcgtgcagaaaggtgcaattaaggcagtcgtactgaccgtcattttttttgtggcagtcggagtatttagtatgatgacaaatcatgtcaatgaagatctgacaacagaaatgaaaaatgccacattaccggtcatcacattagagagcagtgagcaggaagtcaatgaattatatggatatcgtacaaagatgaatgctgcgagtatgcgcgatacgatcacaccgattggaaaagacagaaaacttccggttacgatccagacatacgagacaagcgtggatgcgatctcttatgaaatacgaagccttgatggggagagactgatcgccaatgcagatgtcaattcctatgatgagaaaaaaggtacgatcaaagcagaacttgaaatccagaatctgcttcaggagggggaagagtatttacttcttattaatttagagagcggaaatgatgtcatttattattatacaaggattgtggaaatgccaaatgcgcatgtagacgaatccctgaaatttgtaaaagagtttcataataccacgttcaacagtgagacatcgggaacactgtcaacgtatatggaaaaaacaaccggcgataacacaacattacagtttgtttcattaaattcttcattaaaacagcttgcatgggcagattttaacggagagcagttaacgacgccggtgccatccataaaagaaattacggatacctataatgtgatcgtgctggattatgttgtgacgagtatcggtgagggtggcgagagtgaatattataatgtagaagaatattacagagtgcgctatacaagcagccggatgtatctgctcaattttgaacgccggatgaatcagattttccgcggggaaaatgcaagcttttttgacaattatattgagcttgggatacgctccggaaatgtggagtatcaggcgaatgagaccggaaccacggtcgcttttgtacaggagggcgaactctggagttacaatgagacggagaatacactcgcaaaagtgttcagtttccgtggatatgaaggaattgacaaccgtgaaaattacggggaacatgatatcaaaattgtcaggatcgatgaggcgggaagccttgattatatcgtatatggctatatgaaccgcggaaaccatgagggggaagtgggaattgaggtcaatcattatgacagtctttcaaacacaaatgaggagcttgcattcatatcttcggataaggcatacgaggtcatgaaatccgaacttggtcagatgatgtatgtgactgagggcggagaattatatctgatggttgatggcagtgtgtatggaatcgatcttagtacattggaaatgaaagagctgatcaagggactggataaagaaatatatgcggtttcagaatccgaccgttattttgcatggacgaaagacagccagaacggacagagtgatacgatttcgctcatcaacttttccagtgaaaaaacatttaccataacagaaggcagtggaaagtatgtaaaaccgcttggatttatgggagacgattttgtatatggcgtagcgaatgcggcagatgtatcaacggaggctgcgggaaatgtaatcttcccgatgtatcagattaaaattttagatgtgtcatccgatacgccgtccgttttaaagacatacgaaaaaaatggatattatgtttccgggattgatattgaagattacactatgtacttaaaccgtattcagtataatggtacggcatatgtggacgcagatcaggatatgatcatgaaccgggagggagatggaaataaaatagtttccattgtaagcagcagttctgacagtaaagagacccggtttgaaatatctttgccggaaaatgtgggggaaaaggctccaagactgctgactccgagagaaaccatattagagcaggatcgcacgctcacacttgaagataagggtggtaacggaaaatattatgtttatgtaaaaggtgatgtggtttataccacagatcaggtggcaggtgcgatcacaaaggcaaatgaaaagatgggagtcgtagtaggcgaggatcaggagtatatctggaaacgttccagagatgcaatcaaaccggcactctctgatatcgcagtcggcgcggaagatgcttcttccggcagcattgctcagtgtatcaatgcaatgcttgagaaagaaggaattaatatcagtgtcagtgcattgattgcaggcggtgagacaccgaagaatattttgagcaatacaatgaaagatgcaagaattttagatctgaccgggtgcagtgtggaagaagtcctttactatgtaagctgcggtaatccggtatttgcaatgacgggaagcaatgaagcggttctggtggtaggatatgatgccaataatgtcattatttttgatccttcatccggaaacaattttaaacagagtataacggaagcagaagaagtgtttaaaggagcaggaaatgttttcttcacatatctgaaataaagcaaatgcagaaaaaggcaggttttacagatacatttccaatataaatacatgaaaaaaaagagaaaactgcataaaaaaacagtgcttccatagaatagttcgttgaactttaacagatttaagtgagacgtattgcaaattaaagtcgaatgggttatattttgagaagtacttgaaaagaggaagaggatgaatatgagcagaaaagaagtagtggtttcgaatgtttcaaaagaacatgataatccaattgcagaactggttcaggtggcttgccgctatgacagtgagattatccttgagagcaataaccgcaggatcaatgcaaagagtatcatgggaatcatggcatttaatccttcaaagggtatgacagtgaatattgtcgctgaaggaagcgatgaagaagaagcattagacgcaatggagaagtttttagtttgtgagtaagttttgttgaggagggaattcattatggcaaaaggaactgtagcaaaaaataatgcaatcaaagcagaaaagacaaatcaggtaaaggaagcagagcctaagacaaatgagaaggccagtgatgttttacaggcagcaaaaaatgcagcacaggatgtgaagacagcagtcaaagagtctgcatctgaagtaaaagcagcagtaacagaaaagacagcagcagtcaaagaagctgtagaagaaaaagcagcagcaaagactgagacagtcaaagatacagcagctgagacaaaagaaacagcaaaaccggcaagagaaaagaaaccgtcaagagcagcaaagaaagcagcaaaggcagcaaaagaagaattaaaaccggaagtatttatccagtatcaggggaatgaagcgattgttgcagatgtgattgagaaagcaaaaaatgagtttgttgcagatggtcacagagcatcatccatcaagagccttcaggtatatttaaaaccggaagaatttgcagcgtactatgtgatcaaccagaagtttgcaggaagagttgatctgttttaggagcgtttgccagacggacttacatagaaatgagataagaagaaaccgttatacaaaagtgtatgatggtttctttttttgatgccagaatgtttatagacatgcattccattgtataagaaaagccggcacgaaaaagtaccggcttttttgatatttcagaatgaattatttctgctctgccttgtatttagataccagacgttcgattctgtcatacgggtttaacagatcgctgatggaagaatcatggtttaaggtatcaatgatataagcgatgtatttgctcatatcacagctgatgtaatatggtttggataagagttccggtgtctgataggtaaggtttgtggtaacgactttgtagatcgttccatctgcaactgcctgatcaaatttatctaaaccgtttgtgaagagtccgaaagttgcaacgacgaagatacggtttgctttacgtttctttaactctgttgcaacatcgatcatactttcaccggaagaaatcatatcatcgatgatgataacatcttttccctctacggaggaacctaaaaactcatgcgcaacgatcgggttgcgtccgtctacgatacggctgtaatcacgtctcttatagaacataccgacatctaatccgagaacgcttgcaagatatacagcacggttggtaccaccttcatccgggctgattaccatcatatgatcggaatcgatctttaagtcggttacttcgcgtaagataccttttacaaactggtaagcaggctgtacggtctcgaagccttttaacgggatcgcattctgtacacgcgggtcatgtgcatcaaatgtgatgatgttatctacacccattgcagtcagttcctgtaatgctaaagcacaatctaaagattcgcgggaagtacgtttgtgctgacggctttcatataagaaaggaatgatgacggtgatacgtcttgctttaccgccaacggctgcgataatacgttttaaatctgcatagtggtcatccggtgacatgtggttctcatggccgcatacggagtaggtaaggctgtaatttgtcacatcgaccatcaggtacagatcgtatccacggacagactctttgatcacaccttttgcttcgccggttccaaaacgcggaacagcggtagagatgatgtaagaatcgcggcggtaatctttaaaggcaagatcagatgcatgctgatgctgtcttttttctctccagccgaccaggtacttgtctactttcagaccaagctctttgcagctctcaagcgggatcagaccgagtgctccatcaggtaaggtttccaggtttctttcatcgtttggcattgaatggttcctccataaaaatttgtttacatgtatttcaatagattgctctaattgaaggcagaaaatgtattttgtgtttatagaacatcagcgtcttcgtttctgcatccggatatcttccccgaataatttgatcagaacataattgtccataattcttgataagattcgctccgaatacagatcggtaagctgggacaatccgaggtttgtggaaatgatggttgatttccggtgcaggatcctttcgtttaagcacaaaaacaactgggaagtcgtaaaagaatttgtaagctctgtgccgagatcatcgatgatcagaagatcgcaggtaaaaatattttcatttgcggcaatcgcttcctcatcttttgcaaatacacccttgcttaatatatcaaataattggaacgccgtaaagtaaattacagaatgaccgtgatccatcagctcttttgcaacacagtttgacagaaacgttttgccgatgccggtatctccgtaaaagtacagattggaaaatgtatcatcaaagtgatcaataaaatcatgacatttcgcaacggcatcttttgctgttgccaaagatgataacccggttgcaggatttatgtctttatcagaataatagtcaaaagaaaatgtggaaaaattctcacggagcaggatgctttttaaattcgactgggtatagactaaatcgatcgcagcctgtgtaaaacagtggcagcgtttcccgtcgataaaaccggtgtccttacaatccgggcatttgtaagaagtctccagataatcagcagaaaatcctgcttttttcagaagatcctttttttcactgcggtaggaggcaatctgttctttcagggtattaagagccatggtatcaccgtctaagagcttttttgcctgtgcaacggagcaggtcgcaatggcatcatcgatctcacggagacgtgggatcttgatgtaggcataacgggtccgttcttccctgtcatgttcattttttaactgtcgggcatcatatgcccgtataatctcatcgtattgtgaatttgtcagaggcatgttcttatcctaatctccatttttgcctgttttagtatgaagacaatgttttcacactactctatggtatcaatgttttgaattggttgtcagtaacattttttcaagctcatcatattcataggagcgctgcccgatgcttgtaaacttgtttttcggaccggcagcctcctgtgccgatgctttggtgcgttctttatgttcaagatttaaacgttttacatcttccatggtatgtacgtttaatttacgccagttcgagagcattttgtcagtgtaaggaaaactcggctggtggatgctctggatggtctgctgacatgccgcacagatgatatcgatcgaaaaaccatattcggaacgccatttttcaatatagtctgtctcggatggaaccagatttcttcctgtaatgccaaaggagcgcatcaccgcatagtaagccggactgtggatctttgcctcctgtttggcagcggttaccgtccggatgccgctttctgcccattttagcgccgtggcttcgatgtagcggatagcggtgtggtttttgctgacacaatattccaccagatatgcgatcagatccgatgaaaatgaaagctcatcatataaataaataaaagtattcatatccgtctggctgagagggcgtccaagataacgttccgcgacaaaaagaagttccgcaatctggtcattttcctgaaactgttttaattcatcgcgggtgtaatccctttttggcgggaaggattctgtatttaccgaagaaatgccgtcatccggggaatgatatgtgtcttctaaagaggagacactgtctgcttcaggtgtttccgcagccgtttcattttccggaaaatcatcgcctgtgccggttttatccctggatgcagaatcaatcaggcagataccggtcaggttgtgctcagtatcatattctaaccgtaaaagatgcatacgttcccagtaacttagggcgcgtttgacatccttttccgtgtgttcaaatttatctgcaatcgaagaaatcgaaaaagcggaatccggggcattcatcagacgcagcaggtacaggtagatctttacaaattccccgtttgcgtcagacatatattcatcaataaaaatattcgatacactcgtggcagaagatgcactgtcactgtggattagtattttagccatgaaggaaaccctctttcgataatattctaaaagtataagtataaatatttgctgcgccacaaattatagcataggaaaagaaaaaagagaagaacatttttgaatacaaacgctgtaaaatcaagggttgcggggaatgtggataatgtggataaaaaagtggattcataaaaacggaagttatggcaactgtgccggaatacagaaaataagggacataaaagaaaacggaatccgaaaatggatatgtgttatgttaacaaaaaaaatccacattcgatggttgaagttttccccaatcgaatgtggataatgtggataacttatcgaccaagaagatgttcacccacgtttacgatatctccggcacccatagttatcaacagatcaccgtttatacaatttttcagtaaaaatttctcgatctcttcaaaggaaggaaaataatagcattctgttcctttttcctttaattttgcaaggatatccctcgaactgatgccgtaagtatttttctcacgggcagcatagatatcagcaagaacgaccacgtctgccatggacagtacatctgcaaaatcatctaaaaatgcttttgtcctggaataggtgtgtggctggaaagccaagaccaggcgcttgtgtggataatttttggctgcggttaatgttgcacggatctctgtcggatgatgtgcgtaatcatcaatgatagtaaccccgtccacacatcctttgtactggaaacggcggtctgcacctccgaaagcggataatccggcaagaatcgcatccgttgaaatgccaagatcaagcgagagtgcgattgctgcaagtgcatttgatacgttgtgcatgcccggaacgtgaagttttacatccatgacaggggtaccgtgatgcattgccgtaaaggaagcgcatgctgtttcgtcaaaggtaatatcagaaggataatagtcacaggagtcattcagtccgaaagtgattacctgcggatctaagccgctggtgagctctgtgtagttttcaatctctccgtttataatgatcgcaccgtctttttttgtatttcctgcaaattttcggaatgaattgcggatgtcctgaatatctttaaagaagtcaaggtgttccgcttccacgtttaaaataacactgtatcgtggataaaaatggagaaaactgttggtatattcacacgcttcggatacaaaaatatcggacttgcctacttttatatttccttcaatggcttttaagattccgccgacggaaatggtaggatcagcctttgctgcgagaagaatctggctgatcatggatgtggtcgtcgtctttccgtgggtaccggcaacggcgatggaattgttgtaattgtccataatctgaccaagcagttctgcgcggcttaacattgggatgctgcgctcctttgcggccgcgtattccggattgtcttcccggatagcagcggtgtagacgataagatcaatgccgtcggtaagattttcagccttctgaccgtaaaaaatacgggcacccatgtgatctaaatgtctggtcagttcggattcttttgcgtcggatcctgagatggcaaaatgttcttctaaaagtatctcagcaagaccactcatgctgatgccgccgattccgatgaaatggatgtgcagcggctggttgaaattgattttatacatttattgatacctgcctgttttatgaattattctgtttgtttcattatacccgtatgaaattaatttgcaaattcttttggggaaaaatcttttcgacagaaaaaacgaattgtagataaaattttatcgatttgtgcaatgtgtcaaaaatatgtaaaatcagtaaaaaatattgtggaaaatgatgtacatgggatttgaagtgtggtataattaaaaataccaaaaggaatagattgactagaaagtgacgagaggtgattgacgtgattcgaaaagaaatgatagctatgctattggctggaggacagggcagccgtcttggagtgcttacagcaaaggttgccaaaccggcagttgcgtttggagggaagtaccgcattatcgattttccactcagcaactgtattaattcaggaattgatactgttggtgttctgacacagtatcagccgttacgtttaaatacccatatcggaattggtattccgtgggatcttgaccgtaacaatggcggtgtaacggttcttccaccttatgagaagagcaacaacagtgagtggtacagtggaacagcaaatgcaatctaccagaatatgaattatatggagagctataatccggaatatgtcctgatcttatcaggcgaccatatttataagatggattatgaagtgatgcttgatttccataaagaaaatcatgcagatgtgacgattgcaacaatgccggtaccaattgaggaagcaagcaggtttggaatcgtgattgcagatgaaaataaaaaaatccaggatttcgaggagaaaccggcagagccgagaagcaatcttgcatccatgggaatctatattttcagctggaatgttttgaaggaagcattacatgccatgaaagaccagagtggctgtgatttcggcaagcatataattccgtattgtcatgagagaggaaaacgtcttttcgcctatgaatttaacggttactggaaagatgtcggaacgttaggatcctactgggaagcaaatatggagctcatcgatctgatcccggagttcaatctctatgaggaatactggaagatctacacaaagagcgatatcattgagccgcagtatctgtcagaagattctgtggttgagaagagtatcattggtgagggatccgagatctatggagaagtacatagttctgtcatcggtgcaggtgttacgatcggtaagggaagcgtagtaagaaactcgataattatgaaagggacacagattggtgaaggtgtcacgatagataagtcaatcgttgcagaaaactgccagattggaaacaatgtggtgcttggagtcggtgaggaagcaccgaacaagctgaatgcaagcatatattcttttggtcttgtaacaataggtgaagattccgtggtgccggatggcgttcagataggaaagaacacggcgatttccggagttacggaaaaagaagattatccggatggaattcttgaaagcggtgaagtaattattaaggcaggtgactcagaatgaaggcaataggtattattttagctggcggtaataacagccgtatgcaggaactatccaataagagagcgattgcagcaatgcctgttgggggcagctatcgaagcattgattttgcactcagcaatatgagcaattcgcatatacagacagttgcagtactgacacagtacagcgccagatccttaaatgagcatctgagttcctcaaaatggtgggatttcggaagaaaacagggcggtctgttcgtatttaacccgacagttacggtggacaacagctggtggtatcgtggaactgcagatgccatgtatcagaatatcagtttcttaaagaaacgccacgaaccgtatgtcatcattacgagcggtgactgtgtttataagattgattacaataaagtactggaatatcacatcgaaaagaaagcggatatcacggtagtgtgcaaagatatggcaccggatgtggatgtaagccgctttggtgtggtacgcatgaacgaggattccaggatcgtggaattcgaggagaaaccgatggtatcccagtcgaatacgatctctaccggtatttatatcgtgcgcagaagacagctcattgagatgttagagcgcagtgcagaggaaggacgctgggatttcgttacggatattctgatccgttataaaaatatgaaacgtatctacggttacaagatgaaagaatactggagcaatatcgcgaccgttgagtcttattaccagaccaatatggatttcctgaaaccggaagtgcgcagatactttttccatgatgagccaaagatctactctaaggttgatgatcttccgcctgcaaagtacaatgcaggatccgacgtgcgcaacagtctgatcgcaagcggctgtatcgtgaacagcaaagtggaaaattcgatcctgttcaaaaaagtatttgttggaaagaactgtgtgatcaaaaactccattattttaaatgatgtatatatcggagataacacacacattgagaactgtatcgtggagagcagggacacattgaaagccaatacatattactgtggggacaatggtatcaagattgtttctgagaataatgagcgctacgtgttatagaaatgcatttttaggacaagggtaaaacaacttaaagggggacataagacatgcagataacggacgtgaggatcagaagagtagaaaaagaaggcaagatgaaagcggtagtttcaatcacgatcgatgaagagttcgtggtacatgatattaagatcattgaaggggaaaaaggtctttttattgcaatgccaagccggaaggcagcggatggagaataccgtgatattgcacatccgatcaactccggaacgagagagcggatccagaaactgatcttggaaaagtacgaggagacattagctgctgaagagtaaggagcttttggcagcaggtctttgaggaagattgttgtgtcggcagaataaaaagaatgagcggctgtaacaggggattgttgttacagccgctttttggtgtgtgttaaacagttgattcgccaaatgatggtttgttggggacatgcgtcgcccgtccaaatggtgtgtcgcaggcttgtgagtggaatcttacgcaaagccggagttaattttggttccgttgtacgaaaataagaaaagtctaagtgtgtctgggttagattttctcggagtgacgtgaccggcaacaacgagtcatccatgactcgatgctgccttgttctgccatccgtggcagaacatcactgtgtacctatagacacactaagattttctaattttctcccaaagtcacaaaattagcttcggctttgcgcaagatgccagccgtcaggttatgaacaccatttgggtgggcggttcatctcaaaactgggggcgtaggcgcgaatttttgatattcgcttgaatgaaaatatgcttaaaatgctaatgtgctgtatcattaatattcaacctaatggcttcccagaatttttatatgctacattgtattacatgaattatttcgtaaaatgccagacaaaataacacagaataattttttcaaatgtgtatggcaataaacataggcataacgggatacattgaggtttttccagtattatcaaaccaataataatctattaaacatagttatttggaaatatttttttttcagattcagacataaaacactaaaaatttacacccgccaaagttgtaaaatgagttccccggagaagggtggttcacaacttagtggctggcaaatcgcatcaagccgggatccgttttgtgactttgggagaaaattagaaagtctttgtatgcctgttcacaatacagtgttgtgctgccacggacggcagcacaagtcttaatgtgcccggatggcacatttaagacgcacacgtcactccggcataaaactaaatcaggcatacttagactttcttattttcggacaacggaacaaaacagtcccggcttgatgcaatttgccaatctaaaatccccagaaccaccctacacgaggaaactcatgtcacccacaaaccatcatttggcggcagcttattataatgacggtgtgaaaaatacttgtaaaatcaggaaagtcctgtaaaataaaacatagactgcaatgagataaacagtatggtatggtgaacaatatcagaaaaaaagcacgaagatgcaggaggatacatatggaacagttaaaagcagtaatacttgcagcaggcaaaggaacgcgaatgaaatcggatctgccgaaagtggtacatacaatcgaaggaaaatgtctggtggactatgcgatcgaagctgcgatcggagcaggtgcagaggacatctgtctggttgtcggatacaaatatgaggtggtacgggagacgatcctgcatcaggaagtaaactttgtattacaggaggagcagcttggaaccggtcatgcggtgcgttgtgcaaaagatttcttagggaatgagggacagacaatgatcctgtttggggatacgcctttaatcacggcagaaaccttaaagcgtttaagagaatatcacacagagaataagaatacggttactgtattatctgccatggtggaagatccgacaggatatggaagaatcatccgtgatgcggacggtaattttgtgaaaagtgtagagcataaagatgcgagtgaggaagagagagcatcgcatgagattaattccggtatgtatatttttgatacaagggaattaaaagaggcacttgaaaaaatccagccgaataatgcacagggcgaatattatctgccggatacgctgacaattataaaggataaaggactgaaagtagatgcgtttgccttaagtgacccggaggatatcatgggcgtgaacgatcaggagcagttaaaatcagcggcagaggtcatccgcagacgaaatcaggcaaaatagatgggatggaaagatttattccggtcactgtggataaaagatacagaaatggagaaatacatgtttttgatcgtagggctcggaaatccggggaaacagtatgagcataccagacataatatcggatttgatgtcatggatgcgcttgcagagaaatataatatcagtatcagtgaaaaaaaacataaggcactctgtggaaaaggtgtcataaacggggtgaaagttgtgctggcgaaaccgcagacctatatgaacttgagcggggagagcgtggcggagctggtcaattattacaagatggatccggaagaggagatgatcgtgatctatgatgacatcagccttgcgccgggaaatctgcgcatccgcaaaaaaggaagtgcgggtgggcacaatggaatcaaaaatatcattgcgatgaccgggacgcagaattttttgcgcatcaaagtcggtgtcggggaaaaaccggcgggatgggatcttgcagatcatgtgttaggacattttgatgccgcagaccgcgcggaagttgagaaagcgatcgggcatgccgtggaggcagcagaaatgatgatcaccggtgagacggatgcagcgatgaaccgttataatgtgaaaaagaaggaagagtgaaaaggagtatcatgaaaacttttactgaacctttgaaagagctcaaagaatttgaaaccttaagtgcgggggtgcatgatctgcgtggtattgcacagatctcaggatgtattgacgcggcaaaaccacatatcatgtatagtgtaaacaatggttctggaaacagaatcattgttacgtttcaggagcagagagcaaaagaaatctatgaagaatatcgtttctttgatccgaaggcagcatattatcctgcaaaagatatcctgttttaccagtcggatatccgtggaaatgtgcttaccgcggagcgtatcaatgcattaaaaatgctcgcggaggagtcatcctgcaccataataactacgtttgacggtctaatgaatccaatgccaatgccggaaaaatttatccaggaagtcaaaaaggtttccgtcggagatatattaaatctggaagaactcacaaaacatctggtggaacttggttatgagaagaactatcaggcggaaacgatgggagaattttccgtgcgcggtggaattttagatatctttccactgacggaagacaatccgtttcgaatcgaattctggggggatgaggttgattccatccgttcttttgatgcggaaagccagcgctcgattgaaaatttggaggagatttcgatctatcctgcctgcgagcttgttctgacggcagaggagcggcaggagggaatcaaaagaattttaaaagaagcagacaaggtatccgcaaaactccggaaagaaatgaaaacggaggaggcgcaccgcaccaaaagtgctgcagcacagatcgcagaggaagcgggagaactgggcatcagcgcgggacttgacgcatatttgtcctatttctgtgaggagcgggtgtccttgcttgattattttaacagggagaacaccgttatttttgtggatgaactggcacgttccatcgagcgcggtatggtgacggaaacagaattttctgagagcatgaagcagcgtcttgaaaagggatatattctgccgggacagatgcgggagcttttttcctgcaaagaaatactggcaaaaatggaaaagatggcatgcatttccctggtggcgctggacttaaaaaacagccatgtggatatcaaagaaaaatttgtcatcgattcaaagaccgtcaacccgtacaataacagttttgatcttctggtcaaagacctcacccgctataagaaaaacggataccgtgtgatcttactttccggatcaaggacgcgtgcaaagcggctggcagaagacctgatggcggaggaactgaatgcattctattcagaagattttgatcacgaggtaaaaccgggtgagatcatgaccggttatggaaaaataaaaaaaggttatgaatatccgctgcttaaatttgttgtgatctcagagagcgatattttcggcagtgaaaagaagaaaaagaagcaccaccgtacctatgagggagaaaagatcgcaagttttaccgaccttaacatcggtgattatgtcgtgcatgaaaatcatggacttggcatctaccgtggaatcgaaaaaatagaggtcgataagacggtcaaagattacatcaaaatagaatatgcaggtggtggaaacttatatatcctcgcaacgcagttagagctgatccagaaatatgccggcgcggatgcaaagaagccgaaactgaacaaattaggcggacaggaatggaataagacaaagacaaaggtgcgcggtgcggtaaaagagatcgcacaggatcttgtaaaactttatgcacagagacaggatcaggagggatttgtctacgggccggataccgtctggcagagagagtttgaggaaatgtttccgtttgaggaaacggaggatcaggagcttgcaatcgaggcgaccaaaaaagatatggagagcacaaagatcatggaccgcctgatctgcggggatgtcggttacggcaagacggagatcgcaatccgtgcggcctttaaggcagtacaggatggaaaacaggtcgcttttttagtgccgacaacgatcttagcgcagcagcattacaataactttgtgcagcgtatgaaagattttccggtcaacattgatcttttgtgtcgtttccggagcagtgcggagcagaaaaagacggtggaggcgctgaaaaaaggaagtgttgatatcattatcggaacgcacagactgctttcaaaagacgtagtatacaaagatcttgggcttctgatcattgacgaggaacagcgtttcggtgtgacgcataaggaaaagataaagcagttaaagaccaatattgatgttctgacgctcacggcaacaccgattccaaggacactgcacatgagcctgatcgggatccgtgatatgagtgtgttagaggaaccgccgatggatcgtgtgccgatccagacgtatgtgatggaatataatgaagaactggtgcgtgaggcaatttccagggaactctcccgtggaggacaggcatattatgtatacaaccgtgtacgggagatcgcagatgtggcagcaaagatcgcagagcttgtgccggaggcgaacgttgcctatgcgcacgggcagatgaaagagacagagttagagaacatcatgtaccgttttatcaacggagagatcgatgtacttgtttctacaacgatcattgagacgggacttgatatctcaaatgtcaatacaatgatcatccacgatgccgataatatgggactgtcgcagctctaccagctccgcgggcgtgtcggcaggtccaaccggacggcgtatgcgtttttaatgtaccgcagggataaaatgttaaaagagatcgcagaaaaaagacttgctgcgatcaaggagtatacggaacttggaagtggctttaagatcgccatgcgtgatcttgagatccgtggtgcaggaaatctgctcggcgcagagcagcatggacatatggaggcggtcggatacgatctttactgcaaaatgttaaacgaggcagtgaaggaagcaaaaggtatggatgttgcggaaagttttgatacctcgatcgatattgatattgatgcgtatattccgatgggatacattccgaatgagatgcagaaacttgacatttataagcgcatcgcaggcattgagacggcagatgagtcagaagaaatgttagaagagctgatcgaccggtttggagatccgccaaagtctgtcgaaaatctgctttatattgcaagggtaaaatccatggcacatcatctttactttacagatattgcacagaaaggtgatacactgcggttcaccctgtatgagaaagcgaagatcaatgtggcggcaattccggagtttaccgcttcctttgacaaacatgtgaagtttaccatggatgcaaaggaaccatattttacctatttcctgaaactgaataccagggaaaaatatgtggaagcaaaagatgtgatggaaacatttttgcagcgtgcaggggagatgctgatggaaaaataacttgcggctttttacaaaacgaattataataaactgaatgactgcccatatcggaaaaagagggcactgggaggaatatatgaacagcagaaaaattaccgcattattgttaagcagcgctatggctttatctgtactgacaggctgtggcggagtcaataaagataaaacagtggcaactttaaacggagagccggtcaaacttggagtcgcaaactttgcagcaagattcggtcaggcgggagcagatgatttttataccgcatatttcggaaaaaatgtctggacatccgatttatatggaaatggaacgaccgggcaggataattttaaagacagcgtgatggattccttagaagatatgtacgtattacagcttcatatggatgagtataatgtcagcattacagacgatgaaaaagcagcgatcaccgcagcggcagcacagtttatggaagataacagcaaagatgcaatcaatgcacttggtgcgacgcaggagatcgtggaggaataccttacattagagacgatccagagtaaaatgaaagcagcaatcgttgcaggcgcagataccaatgtgacagatgaggaagcaaaaacgggtgcatacagttatgtgggcatttctaagacgacacatcaggatgagagtggcaatacggtagattacacagatgaagagaaagaggagcttgcagcaaaggtagctgactttgcaaaagcagcgaaggaagatggtcttgatgcggcggcagaggatgcaggctatacggtaagcaccggtacttttacgcaggaagatgattctgtggatgacaatcttttagcagcattgaaaaatttaaaagaaggcgaagtaacagatctgatcgatggcgacagctcttattttgtggcacgtcttgataaagaagtggacgaggatgcaacagaggagacacgtcagagcattattgagcagcgcaaagatgatctgtatgatgagacgctcgatggatggaaagagggcatcgagtgggcagtgaaagaaaaagtctgggatgacgtgaatttcgataacctgtttacaactataaaagatacagagacagaaagcacgacggagcaggcaacagagtaaaaagaaaacgtcgaaagcacagtctttcgacgtttttttatgaaaatgggaagtttatagcgggagaaaacagatgaaaaaagacaatatcgtactgatcgggatgcccggagttggaaaaagtactgtcggagtcatattggcaaaagtacttgggttccagtttgtggatgcggatctggtgattcaggagaaagaaggaaagttactgcgtgagatcattgcagaagaggggccggacggatttattgcagtggaaaaccgtatcaacagtgaaatagaagcacatcattcggtcattgctaccgggggaagtgtcgtatatggaaaagaggcaatggagcacttaaggcagatcggaactgtgatctatttaaaattagattatgcggatatcgaccgcagactgtcagatattaaaggcaggggcgttgttttaaaagacggacagacgttaaaagacctgtatgatgagagagttgttctgtatgaaaaatatgcggacatcacgatcgcggaggatggcctgaacgtggaacagacgatcgaaaagatcgtggcgcaaattcaaaaagaatctttgtaaaatcacatcaatggaatgaaagagtcagaggatgaacaaaagattaaaagataaaaaaatgatgtccggtatcattactgctggcggattccttatcatactggcaggaagtgcactttcgcagcagacggcattaggacagagctatcagggcgtgtatgtagacggaacatttgtcgggtatgtggcggaaaatgtcgatgtgaaggatgtaatccttcaggcaagaagaaaactggcagaagaatctgcaagccgtttatgcatggattatgaatggtctgtaaaaacagaaaagaaaccgtttgtgcgtttagaaaagaaagaaacgctggaagaacagttaaaaaagatattagcagagaagacgattgagagcagggagcgtgcctatacggttgcgatcggttcctaccgtggaaattttaagacattggatgaagtgtcagattttctgaatcaggtcagaaaaaaaacggatgaagacaatgcctatactgttgcatatcagacgttggagggacagatcggtggaatattaacggctgatctgaaaagggcagaaaacgaagacgatccggcggaaaccggggggaaagaaacgcaggatatgcaggcatcgtcgcttgcgggcgtttccttagagtctgcaacgcagcttttagatgccgtgacatcggatgtagcagatttttatgaaacgggtgtccttgatatggtatttgtggaaaatattgaggtctatgagaattatgtgcagtcagatgcgtttaccactgcggatgatgccgctgctgaagtaacaaaagagaaagaatcgaataaaatatatgtagtagagagtggtgactgtctctctgtgatcgcacttgaccatgatacaaaagtggcagatattatggcattgaacggacttgagaatgcagactcactgcgggaaggacaggagcttatcattgcggttccggaaccggatttaaagatcaggctgactgtgggagaagtttacgaggaagattatgaggaggaacctgtcattaaggaaaatgattcctggtataccaatcaggaggaagttttagaagagggcgtggcaggtcatcgtgagagaaacgatattgttgtatatgaaaacggtgctgaagtgagcagagagttagcgcaccagaagatcatgacggcagcgaaggcagcagttgtggagcgtggaacgatcgtgccgccgacatacattaagccgcttgccggtggaaggtttacatcaggatttggaagacgctggggaagaatgcataaaggtgtggactgggcatgcccgattggaacaaccgtgtacgcatcctgtgcgggaactgtgatccaggcatcttataacggtggatacggcaataatgtggtgatcagccacgcggacggaagactgacgcggtatgcacataacagcaagctgctggtgaaagtcggccagaaggtggagcagggggaaccgatcgcactgagcggaagtaccggacgttccacaggaccacatgtgcattttgaaatatacatcggaggggctgcagtcaatccgttgaagtacatcagtaactgataaaagttgaacggaagtgtgcggaaatgaagggcatttttgggaatatctgcatatttacaacaaaattgaaactgtgatataattcttgacaaaagcacataatagcaactataattatgtgtttgtatgaaaaggttcatagaggtgtggtatggaacaatatgtcattaaaggaggcaatccgttagtcggagaagtggagatcggcggagcaaaaaatgctgcgcttgccattatttctgcggcggttatgacggatgagaccgttacaatagaaaatttaccaaatgtcagagatatcaatgtgctgttaaatgcaatcagtgatattggtgcgaaggtagacagactggatgcgcatacagtaaagatgaacggatcatttattcacaatctggttgtggacaatgaatatatccgtaagatcagagcatcctattatctgctgggagcactccttggaaaatataaacatgcggaggtagctcttccgggtggatgtgatatcggaagccgtccgtttgatcttcacctgaaaggattccgggcacttggtgcgacggtagatatccgccatggtctggtggttgcagatgcaaagcagctgaaaggtacacatatttatctggataaggtatctgtcggtgcaacgatcaacattatgatggcagcagccatggcagagggtaagacaacgctggagaatgcggcaaaagagcctcacgttgttgatgcagccaattttttaaacagcatgggtgcaaatatcagaggcgccggtacagatgtgatccggattgttggtgttgaaaaactgcacaagacagaatattctatcatcccggatcagatcgaagccggaacatttatgcttgcagcagcagcgacaaagggagatgtcaccgtaaagaatgtcatcccgaagcatttagaagcaatcagtgcgaagctgcttgagatcggatgtgaggtggaagagtttgatgatgcggtgcgtgtggtatcctcaaaaccactgcatcacacacaggttacgacgctcccgtatccgggatttccgacagatatgcagccacagatcgcggttgtgttaggtatttcggagggtacgagcaccgttacggagagtatttttgaaaaccgttttaaatatgtcggtgagctggcgcgcatgggtgccaactttaaagtagagagcaatatagcgatcatcggtggtattgagaattataccggagcccgtgtcaatgcaccggatctgcgtgccggagcggctcttgtgatcgcgggacttgcggcggaaggcatcacggtggtagacgatatctactatattgaacgtggatatgaagaatttgaaaagaaactcgcatcactgggggctgtgatcgagaaagtaagcacagagaaagagatacagaagtttacactgaaagtgtcatagcagttgaaaacatggcagggaaaactgtcatgcaggagctgctatgcagggactattatgtagaagctgctaaacaagagctgttatgcagggactacgatgtagaagctgccatggagagggcgtttccgggtatgggagacgtcttttaccatggcagtttttgcgcgcagacattcatgatgatagcgttttaagggaagagggagaacgatgagaagaatatttcaaaaagaacttgatatgatccttcactggaatcttacactggttggaggatttctgggaacctatgcgatattgctgcatgcaggaaattttggttccgcacagaccggaaatgtcatggagatggcggcggcgctcaccggaaaaaattttgcagaagtggggatacgatttttagcatttcttattttcggaagtgcgatcgtgatttcttatctgttgacgaattttacgaaactggatatgcgaaagctggtgctctgggtagacgcagcaggactcaccgttacagcgatgattccggaggggatgtctgcggttgtgagcctttacccgatatttttctgttcggcatttcagtggggcagttattccggcgcatcggggtataacagtgcaagcatttttactacgaataattttaaacagtcgctgctcgcatggacacagtttgtattgacaaaagatccggaattccggagaaaaggaatcatgtatacgatgacggtactctcattttttgttggtgcatgcattggctgcgtatccgtctatacatatggggcatatggtgcttttataggatttgtaccattgattgtggcacgcctgtttatgtacattggaaagataccggtagagaatggtacaccggaagaaacggaagaagaagcaaaagaagcactcgaagaggcaaatctgctggagaacgatcagaaactgtgatcgttctccgcagaacctctgcggtgcttcttttttacttacagaatactctgaatatgcagatcaagacgtgtagagagatcaatacaggagttgtcgtttaactgtacgatcggtcttgcgagatgctgctggtttaacatcacaatattggcactctgtccgttgcttaaaagaacacggttgttctgataagtggatgcgatatgctgcaaaaaggtaaggataaattttggtttatatttctgaagaccttcctgctcaaatcgttcaatgacctggaaaggacaaagaggagcgcggtaagaacgcgcggcagtcatggcatcgtaaacatcggcgattgcaacaaccatcgagaagtcgtctaagtctttctgggtcgctttcagcggataaccggatccgtcacagcgctcatgatggagcagggcagcttttttgatatgtggatcaatatttaaagttttcaataattcgtagccaaattttgtatgccttttgacaagatcaaattcctcgtcggtatatttgcccggtttgtttaaaatctcatccggaatctttaatttgccgatatcatgcaaaagaccgcagagtgtcaaagtgtctaaagtggcggcgtctactttcagccatttaccgatacggcggcagatcagagccacatttaaagaatgtgcgtaagtgctgtcgtcgtaggcgcgcatattatgcagcatatcaaaaagttccagtgatgtcttgcaggaattgaacagtttgactgtctgttcgagaagatcatcagtgtcaagcggctgattgtgaaaaacatatccctccatggaggactttaaagagttcagtacgaatgaatgatcaaactggaacgtctgaaactctttcgatgcttttactttttgggagtaagccgggataaaatgcggtgtttcaggatcttttggttcatccggatcttcaatacacacttctaaaacacaataaaaggaaagacgcatgataagcggtcttgtaagtgtgacgcccttatcaacgatcatctgtccgttttttgtcaggatctgttcggcagtgaccatgcctggttcaagtttattgactgttaccttcttcataaaaaaccccatttcatttgtacgtctgtcacgttcataattaagtatagtatagaattttcacatttgaaagtcaatctggtttgtgtaaaaggttaagaaaatacaccttgacatttggggaaaacaggtgtattctagccactgtgagtttttcaacttaatatttttagaattttcttattcagagtgatggagatacaaaggatctgtgaagtcacggcaacccctctacggaaggtgccaacctgagcgaatcgtacctgacagtacatatatgttcgaacaataagaggatttgatgattgatttacagctatcacttccacttgtttttcgcaagtggattttttttgtgtaatggagaattacgcaaagaacacgaaaaacactatcagaaaaaggagcataaaaatggaaaaaagattatttacatccgaatccgtaacagaaggacatcctgacaaagtctgcgatgcaatctctgacgcaatcttagatgcatgtatggcagaagatccaatgagccgtgttgcatgtgaaacagcaagctgtacaggctttgttttagtaaccggtgagatcactacaaaagcacagttagatattcctgcaatcgttcgtaaaacagtcaacgagattggttacaacgatgcaaaaaccggatttgacggaaatacctgtgcagttatggtagcgcttgaccagcagtcaccggatattgcaatgggtgttgataaggcattagaggcaaaagagggtgccttaacagatgatcttgataccggagcaggcgatcagggtatgatgtttggttatgcaaccaacgagacaccggagttaatgccatatccgatctctttggcacacaaactggcattacagttaaccaaagtaagaaaagacggcacactgacctacttaagaccggacggaaagacacaggtttccgtagagtacgatgaggctggaaaaccggtacgtcttgaggcagttgtattatcaacacagcatgacgatgatgtgacacaggagcagatccatgcagacattaaaaaatacgttttcgatccgatccttccaaaagagatgatcgatgcagaaaccaagttcttcatcaatccgaccggacgtttcgtaatcggcggaccgcacggtgatgcaggtttaacaggacgtaagatcatcgtagacacctacggcggatatgcacgtcacggcggcggagctttctccggaaaagactgtacaaaggttgaccgttctgcagcatatgcagcacgttacgttgcaaagaacatcgtagcagcaggacttgcagagaaatgtgagatccagttatcctatgcgatcggtgtagcacagccgacatccgttatggtagatactttcggcacaggtaaattatccgatgagaagttagttgagatcattcgtgagaacttcgaccttcgtccggcaggaatcatcaagatgcttgacttaagaagaccgatctaccgtggaacagcagcttacggccatttcgggcgtacagacttagaccttccgtgggaggcagttgataaagctgagacattaaaaaaatatctgtaagagatatctgaaatacaaaactcatttgtcttcacaaaaagtttagacaattttatataaattaaatgggatttgaaatttttcatgctataataggtcataaaggtatgtttatgaaggtcataaaatacccttatgaccttttttgtgggaacagaaaccggaaaggcgaacatgtaatatgaaactgaaatcaaaaatcatcatttctttttgtattatcatatttgttccgatcgtgctgatgatggcggcacttttcagttttcagcgtatacaggtgaaggcgattgagcagacttatggaatcaaggaaaataattacagctatttttccaattccatgcagcttttaagccgttttacgaaagaatgtttcaaggaactgaaagatgcggcgaagaatgatccggcacggctggaggatcaggaatatttaaatgaactcaaccagacattagaggagaagagttcttatctgatcgtgagaaaggataaagagttaatttatatcggtgaggatgcaagcatttcgctgctgacacagctgccgtcgtatggggatacggtgaaagatgaggacgccggcacttacattgatggtgacgaacaggtgctgatcaagcagatcgacttccagtttcaggatgggagtgacggaagtgcctttattgttacgatcttagaggagacagttccggaggtaaagaaacttctcattgatgtgctgatctcgatcctgctgatccttgtgctgactgcgacgatgctgaccatctggatgtataccagcatgatcaatccgatcaaaaaactgcagacggcggcacagaatatcaaggacggcaatcttgatttttcagtggaatcggacagcaaggatgagattggggaactctgcagatcgtttgaggagatgcgcctgcgcttaaaggataatgcggaggaaaagattgagggagaaaaagaaaacaagacgctcatcagcaatattgcacatgatttaaagacgccgatcacggcagtaaaagggtatgcggaaggactgatggatggcgtggcggatacaccggagaagcgggataaatatatccgcacgatctacaataaggcaaatgagatggatacgcttttaaatgagttgacattgtatgctaaaattgatacgaaccgtatcccttacaatttcgcaaagatcaatgtatcggaatattttaatgattgcgtagaagagatcggacttgatcttgaaacaaaaaatatcaggcttgcctactttaattatgtggacgaaaatgttttgatcatagcagatccggagcagcttcgtcgtgtgatccacaatattatcggcaattccatcaagtatctggataaacagcagggatttatcaatatccgcatcaaggatgtcggtgactttattcaggtggagatcgaggacaacggaagaggtatttccgcaagagacctgccatatattttcgaccggttttaccgcgcggatgcgtcgcgcaactcggcaaccggcggcagcggtattggtctgtccattgtaaagaagatcatagaagaccatggtggaaagatctgggcgaccagcaaagagtccatcggaacggtcatgtattttgtaattcgtaaatatcaggaggtaccaaatgagtaaagttttgattattgaagatgaggttgcaatcgcagacctggagaaagattatttagaactcagcgggtttgaggtggagactgagaatgacggcgtggtcggattaaaacgtgcgctctccgaagattttgatatgtacattttagatctgatgctgccgggcattgacggctttgagatctgcaaacagatcagagaggaaaaaaatacaccgatcctcatggtatctgccaaaaaagacgatatcgataagatcaggggactgggacttggcgcggacgattacatcacaaagccgttctcaccgagtgagcttgtcgcgagggtaaaggcacaccttgcccgctatgagcgcctgatcggaagcaacacagtagagaacgacgtgattgagatccgcggcatccgtatcgacaagacagcaagacgtgtctgggtcaatggtgaggaaaaacagtttacgaccaaggaatttgaccttttaacattcttagcagagcacccgaaccatgtgttcacgaaggaagaactcttccgtgagatctgggatatggaatcgatcggtgatatcgcaactgtgaccgtgcatatcaaaaagatccgtgagaagatcgagatgaataccaataaacctcagtatatagagactatttggggtgtaggataccgctttaaactttagtttttatcccaaatattctccgactatttggggtgtaggataccgttttaaactttagtttttatcccaaatattctccgactatttggggtgtaggatatacatttaaactgtaaaggttttttattttgcatgtatcagagaaaagaaaaatggcgcggaagtcagaaaatggcttccgcgccttattgccagtacatcgttttcaaagaagtaatatgaatttgatgaaagtacagatcagaaacggaagattttgatcatttgattgataagaaagaagcgattaaccgtctttgctatgaaaagccggatatgcagatttgctttcggacagaagatgctttgaaaaagctgcatttccgacatgcattgcatgagtgatggatatcttgcagaagagcttgagatagagtataaaaaggggatataataaaaatgttcgggttcagataacaggacagaaaaacagggcacatttttcatatcccgatcaatataggataagcgaggaaacacaaatgagtaactacgaaaaaccagttgttgtaatggcagaagaaagcacagagggcgtgtatcttgcaagcggagatcacctggaacagtgcagatttggaagaacagaggcatctgcaggggcagatgcgtgccaggaatgttctaagagcggtggaaagagagctactcctttgccgggagaagaatctgcaaggagagatgattttaaaagctgcgtggacaatatgccgatcaagcagtagaaatgaggaacagtatgcagccagcgatcatttatgaagatgaagacattatcgtctgtaaaaaaccggcaggcgtggcgacacagaccagacgcatcgggcaggcggacatggagagcctgctaaaaaattaccgtgcatccaaaggggagcttccttatattggtgtggtacatcggttagaccagccggtggaaggcattatggtgtttgcaaaaaataaagaagcagcggcagatctaagccgccagatcaaaacaaaactggcggacaaatattattatgcgatgacggacggcgtgccggaaaagaaaaaaggaaccttagaggatgaacttttacagaatggaaagacaaatacctccgaggtggtggaaagaggaacaccgcaggcaaaacatgccagcctttcctatgaggtggtcgagcaggatggaaaacatgccgttttgcgtatcaaacttgataccggacgccaccatcagatccgggtgcagcttgcacatgcagggatgccgatcgttggggataaaaagtacaacttcaaagaaaacattgcaccgtcgggcggacagcttgcactgtgctcttttaagatcgcgttccggcatccgaaaacgcatagaaaactggagtttgaaattgacaagccttttggtttatcataaaataaatccaaaggtttagatagaagagtaaggagatttatcatggcaaaggacaagaagttagtagaggcaatcacttccatggaggaagattttgcccagtggtatacagatgtggtcaagaaagcggaactgatcgattattcatccgtaaagggatgtatgatccttcgtccggcaggctatgcgatctgggaaaatattcagcatgagttagaccgccgtttcaaagagaccggtgttgagaacgtatatttaccgctgtttatcccggagagtctgttagagaaagaaaaagatcatgtggagggatttgcaccggaggttgcatgggtaacttatggtggtttgaatcagcttccggaacgtctgtgtgtcagaccgacttctgagacattgttctgtgatttctataaaaacatcatccagtcttaccgtgatctgccaaaggtatataaccagtggtgttctgttgtaagatgggagaaggagacacgtcctttcttacgttccagagagttcttatggcaggagggacacaccgcacatgcgaccgcagaggaagcagagcagagaaccatacagatgttaaatgtctatgcggatttctgtgaggaagtattagcaatgccggttgtacgcggacagaagacggaaaaagaaaaatttgcaggtgcggaggcaacttacacgatcgaagcactgatgcatgatggaaaggcattacagtcaggaaccagccacaactttggcaatggatttgcgaaagcatttggcatccagtatacggataaagataacaaacttcagtatgtatatcagacatcctggggtatgacgacacgtctgatcggcgcgatcatcatggtacacggagatgattcgggtctggtgctgccgccgcgtattgcaccggtacaggctatggtcatcccgatccagcagcagaaagacggtgtgcttgacactgcaaaagaagtctgtgaacgcatcggaaaagtctgccgtgcaaaacttgatgattccgacaagagcccgggatggaagttctctgagcaggaaatgagaggtatcccggttcgtatcgaacttggaccaaaggatatcgcagcaggcaaatgtgtggcagtacgccgtgataccagagagaagattgagatcgcattagacgaacttgaagcaaaactgccagagttgttagagcagattcagaaagatatgtttgcgcgtgcaaaagcacacagagatgcacatatctgggatgcacataattacgaagaatttaccacgattgcaaatgagaaaccgggctttatccgtgcaatgtggtgtggggatcaggcttgcgaggacaagatcaaagaagaccttgcagtgacctcacgctgtatgccgtttaacgatcaggagcacatttcagatgtctgtgtatgctgtggaaagccggcacacaaattagtatattggggtaaagcatactaagataattaatagtctgtttgaaaacagatggattactttgaatgaaaacggaactggaaaatgatccggggaacacagccaggtttcacggatcacaaggttctgtttcctttttacataatatgaaaacgattccggtagcgtttctacgatgaattacaggacagaaaaagtacgtgtaacacaaaatattatttttccagggggcaggagaagatgatagaaaaatattatgatggtgcgatagaacaggtagcagccggtttgggaactgtggaaaagaactatcttttagtcagatacagtggacaattttccgtagaaaacttaaatgatacaaagcagcttgagaaaaatgaagacattttcgtacaggtacatgaatttgaaacgggggagattacctgtgcgtatgagccgtatcttaccatgatctgtgatgggttcaggcggtatatgacgggaacgtttgaagaatttatggaaacgtgcgatgtgtattatctgcaccggccggttttgcttggttattttaatcaggataatacagggcgggaggagatcattttgcttgatgaggtggcatatgagcaggaacgcatgttggcggcacttgagcgcatgctgtgtgccattgctgacaggcatccggttctgtttgttttgaaccgttttcagctggcttctaaaagtaccatgcagcttacggcgcgctttttgaaatgtgaaaactgcaatatcggtcttgtgcttggcgtgagtgatatccaggcaatgccggaatttctggtgccggactgggaaatgctgtatgagacattagatgatggcagtaagatttatcatatcggaaattccggcagaaaaaaagaagaaaccatagatgacgaaaaatacgttgactatggaagtgaaaaagtgtaccggaaactgcagaatatggtcgaatttcttgattttgaccaggcggcatattatttagaaaccattgagcgaaagataaaatttgataatcttttagtggatgatgccgcgcgttttcgcatgtggctcttatttgtcaaagtatcgattttaagacaggatattccaaaagcgcttgaaatctgcgaggatctggaaaaaatccatcttgccggaaaggaagaggagtgtgcatatgagcaggattatctgatcgcgaccgcatatatgtaccagggaaaattaaaagaggctttggagatggcaggagaaacataccgcatcgccgggaaaatgtccgatgattaccggatgtttttatccgaactgttggaggcaaagatccagatgtccggctggtataacatctttttctgtgcacaggatgtaaagataaaggaaagcctgatccagaatctgatccgttacaactatcgcaatcacctggcacatgtatatatttatgcgtacgataataagccggagatcgtgaaaaaagcaaaccagtccgaggagcttctgatttatttcagcaggggaatccgcatagcaaaaaaacttggaaatgagtatctgatcaatatggcataccagaaaaatattatgctgtcatcgacaaacggtatgtatgagatatctctgctttattcggtgaggacttatgaggcactgaaagataaaagatcaatccaggcagggcgtatttattcggggattgcatataacttatgtgcgatcggtgaaaatgagcgcgcgatggcttattacaggcatgcaatccgtctgttttatcatctgagggaaccggaagatattgcggaagtgcagtataacatgtctttaaactgcattatgtgtggacaatatgaaaaggcggagttttatctgacacagtgcatgaaagcggtggagcgtctgcatttaaacagcttaagagtctgcaatctatccaaattatatggactgctcgctcttgtgtcgatcttagagggtaaccggtttaactgtgaacgttatttaaacaactgcaggcagtttttaaattacgttatagaaaaagaaaagatgggggataggtttggaacagtccacgattatgcaaaggtcgatgatgacatgtttttgtatacattctcccgcggacttcttgctgtacacgatggagagtataaaaaggcagacgcagattatgagaaagcggaggattatctgagccgatccgagggaaatcagtttttcagctatgcacttttccagcaaaagcggatggaatgtttcaaatgtctcgaaaatcagaaaggttatgagaagcagaaaaaaacgttagaagaatacgaaaggcagcatttcagtacctatggaaaactggcgaaaaaaatgatggatacactgccgccggtggatgaggcggacgggcagcaggatgtttccgaacaggaattagacgtactgctctggcaggagagcatggtattagcctataagagcaagaaacaccagctggattttatttcgacctggcagaaactgattgatgtgaccggggtctgtgcagaggaaatgatcgatgcggtcatgaaaacatttttaaatcactttaatgtggactgtgcggtgtatgcgcgctgtatggagagacagacgcaggtattatacaataataccgggatcgatttaaacgaggagcggacgggcaggatcatcgcatctttaaagcggaatccgggaggctacgcgatctcaaagatcagcagcaactataacgaacaccaggatatcacggcattgtttggtgaggatgacgtgtgctctttggtggcggtgccgtattttaacaatgcaaaactcgaaagttttctgatcacctatgtgaggatgaaggataactggcattcttccgtaaaccggtatatgctcgatgaagatgatttaaatatgtatcagcttttattccgcgaggtaaaatattctttgaaccgtctggacgcatatgataaaatatacgagatgaacaataaactttacctcgcagcagtcactgaccagctcaccggaatttacaacagggaaggtttttaccgtaggatcaaagatctgatagatgaattttcgggtggaaaacggaaaccggaactgggtctgatgtttattgatctcgataattttaagcattataatgatacttacggtcatgatgtcggcgacctggttttaaaggaaatggcagatattttttccggtctgtgtgaaaaacagggatttgtctgccgctatggtggagatgaatacattattgtatttttcaccgcggataaagaaaggctgaaggaaacggcaaagcagatctatcagaagatcgatcaggcggacggttttgaaaaagcgatttctgagaaactgaaaaaacagatttccatccggaaagagcagcgcatttcctgctccattggaatcgtgttggcagaagacattcatggcgaggaagaaatcaaccagatgatcaagagggcggatgatctgctctattcgatcaagacaacgaaaaagggaacttaccgtatatgaaaatcgttttgccggaaaaagtaaaatttatcatagaaacattggaaacacacgggtatgaggcatatgcagtcggcggatgtgtgcgtgataccatgttacaccgcacaccgggcgactgggacatcacgacgcaggcgaaaccggagcaggtcaaagaaatatttgccgaaaagaacattcataccattgacaccgggatccagcacggaaccgtgactgtgatggtggaacatgagggatttgaggtgacgacctaccggatcgacggggaatatgaggatgcgagacatccgaaaaatgtacagtttaccgcgagtctgttagaggatttaaaaaggcgtgatttcacgatcaacgccatggcgtacaatgacaaaaacggcctgatcgacgcgtttgacggtgtgggtgatttagagcgcggcgtgatccgctgtgtgggatgtgccatggaacgtttttccgaggatgcactgcggatgcttcgcgccgtgcgttttgcggcgcagcttgggttcgacatcgaggcagagacaaaagaagcgatggtaaaacttgcgcctgatattgcaaaaatcagtgcggagcggatacagactgaactggtaaaattaattacatccgcacatccgggagaaatcaggactgcatgggaaacaggacttacggcagtgtttctgccggagtttgaccgtatgatggcgacaccgcagaatacaaagcatcattgttattcggtcggggagcacacggtggcagcgctggaacatattgtgggagataaggtactgcgccttaccatgctgttacatgatgtggcaaaacctgtgtgcagaaccacggatgcttccggcaatgaccatttttacggacatcccaaagaaggcagtgagatggcaagaaagatcctccgccggttaaagtttgacaatgacacgaccgataaggtgtgccggctggtgtgctggcatgatgacaatccgccgctttccgagaaaaacgtaagaagggcggtaagcaggatcggagtggaacagtatcctgcattatttgcagtgaaacgtgcggatattctggcacagagtgaataccagagagaagaaaaactctcttatgtagatggctatgaggcgttataccgggaaattttagagaagaatcagtgtcttacaatacgggatttagctgtaaatggaagtgatctgatcgctgccgggatgaaacccggaaaagagatcggggagacattaaaaagtcttttagaactggtgcttgatgatccaaaactgaataacagggaactgctgttagagcgaatctgtagtcatgaataaacaaaccctctcatatgatgaagagacacggggtaagaccgtaatcaatcatatggggggcgtttttttgtataatcgaccggaacagatattagaacaatacgaactggaagtaaagtccatctcaagaggacgggacagctatcagtgtgatacagagcagggaccgaaaattttgcgggaatacagaggatcaaaggagcgggccgggtttttagcggatatgctggatcatctgagtggacagggaagaacggtggagacggtaatgcggacaaaagagggtgagccgttttccgtgaacgaggaggaaacaaaatacatattatatcaggcatttccgggggcggaatgtgacacgaaaaacagggcggatatgctttctgcagtaagagaacttgcattgcttcaccagtctgcgcagaattatgagggcagtgtgccggagtttttaaagtcagggcagaataatctgcttcttctctatgaaaaaagaaaccgggaattgaacaaagtcagaaattatatccgtgcaaaaaagaaaaagaatgattttgagatgatgtttgcggtctggtatccggagtatgtgaaaaaagcacaggagacgacggatattttaaaagatctgggaatccaggaacagctgatcggattctgccatggggactataaccagcacaatgtcattttttcacgggaagggatcgcggttgtccattttgaaaatttcctgtatcaggagagcgtcggggatcttgccaactttatccggaaaatgatggaaaaaaataactggaatgccggacttggcatggatctgatccgcggatatgaccgggtcagaaaactgtcgccggaggaactgaaatatctgtatgtgtatcttgcatacccggaaaaattctggaagatcgccaaccgttattataattcacacaaggcgtggctgtcgggaagaaatatagaaaaactggaaaaagtcgttgcacaggaggacgcaagggagcagtttttacagatgctctttcactttaccgtatagacagtttgcggtataatcaggtgagtaaaaaattgttcaaagctacagtaggagacaggagaatacatgaagataaaatatcagatcatattactgcttacagcaatggtcatgctgtttggcggatgtgggaagaaaaatacggtcgtgacaggacgctattattatccggatcaggagaaagatgcaaaaacggaagaaacgtcggatgatgcagatgagtcggcggagacgaccgaggaaaatgaagctgtgatcggaagtgaccagtttctgatcaaaataaatgacatgcaggaggaatgcctgacgttagagcagattgcatccgggaaagagtatgtgtattattacacacttgcgaccaggtttctcgataaatacggaaaccgcactgcagtgtcttattttgagccgggcagagtgatcacggtgggagaaaaagatgaccagggaaaagtcacacaggtgcagatttcagatgccgtctgggaatatccggatgtatcgcgttattcggtggatatggaccgtggcatttttaagattggagatgagcggtattcctatgatgcagatctttatatctgtgaggatgacctgagaaaacagttgtctgatctgactgaattagatacactgcgcgtgaccggtataggaaaaaaactgatttccattgtggttacgaccggacatggagagcttgctctgaccaatacggatctttttgagggaagctttatccagatcggaagcaaaatttttgcggaagtgaccaaagatatgacaatggagctgccggcaggcacctatactgtgacggtggcaaataatgggtacggcggcagtacggagcttacgatcgagagtggaagaacagagacacttgatcttaataccttaaagggcgcgggaccgaagtttggaaatattttatttgccgtggatgtggaggatgcgctcattcagatcgatggaaaggttgttgatacggaagaggcggttccaatccagtatggagtgcacagtcttacggtcacggcgccagggtacgatacctttaataagaaattatttgttaattctgaggaggcaacgatcgtagtcggaatgtcgggtgacggcaccggaacagacagcaccacggaggaaacggaaacagaaaatactgcggaaacagcaaaagaagcggacagttcggcagagggagcggcaggaagccttgcaggaagtcttgcaggaagtcatacggccggcgaaagcggtggaacaacatcgggaagcagtaccggaacagtagccggaacaactgcaggaagcggtactgacacatcgaccggcacggcagcaggaagcggaaccggcacgggtacatcttcggatctttatacaggaaacagtaccggagatggaacatcaacaggcagcagtgcggactatttatctacattgtcagagcttctgtcaacattatccggtaacagcaactaaaaaggacagaattgtacaaatttagcatggaatagtacttgaaaaacaggttcgttatcgctaatataaaaatagaatcataagtaagtatgggaggaaagaaaaatgggatacaaagaaaattatgagagttggctgaacaatccttattttgacgaggataccagaaatgagctgaaaagtattgagggaaatgaaaaagagatcgaagaccgtttttatatggatctggaatttggtacagccggacttcgtggtgtgatcggagccggaaccaaccgcatgaacatttataccgtgcgcaaggctacacagggacttgccaattatatcagcagggtaaacggacagaaacgcggtgttgccattgcctatgattcccgtcatatgtcaccggagtttgcagatgaagcggcactctgtctggcagcaaacggaatcaaagcgtatgtatttgaatctttaagaccgacaccggaactttcctatgcagtgcgtaaattaggatgtatcgccggaatcaatgtgaccgcaagccacaatccgccggaatacaatggatataaagtatactgggaggatggtgcacagattacacctccacatgataccggaatcatggatgaagtaaaaaaagtaactgattacgcagcggtaaagaccatgccgcttgatgaggcaaaggcagcaggtctctatcaggtgatcggcgcagatatcgacgatccgtatattgcagagttaaagaaactggtgctgcatcaggactgcattgataaagtgggcggagagttaaagatcgtatacacaccgttacatggaaccggaaatattccggtacgccgtgtattaaaagaacttggttttaaaaatgtatacgttgttccggagcaggagctgccggatggagacttcccgaccgtaagctacccgaacccggaagcagcagaggcatttgaacttggacttgccctcggcaaaaaagtagatgcagacctgatccttgcaacagacccggatgcagaccgtctcggcgtgtatgtaaaggacagcaaaacaggggaatatcacagtttaaccggtaatatgtccggctgcctgatcggtgattatgtgattgggcagcgtagggagcgcgatggaagcctgccggctgacggtgcatttatccgttccattgtttctacgaatatggcagatgcgatcgctgactattacggaatcgagctggtagaggtactgaccggatttaagtttatcggacagaagatcttagagttcgagaagactggaaaaggaacctatctgtttggtatggaagagagctacggctgtctgacaggaacctatgcgagagataaagatgcgatcgttgcatccatgacactctgcgaagcagctgcttactataagacaaagaatatgacactgtgggatgcaatgcttgcaatgtatgagagatacggctattacaaagatgatgtgacatctatcaccttaaagggtatcgagggacttgcaaagatccaggagatcatgaatacgctgcgtgatcaggcaccacaggagatcggcgcttataaagtaactgcaatccgtgattacaagaaagacacggttacagatcttgcaacaggcaaggtaacaccgaccggactgccggcttcgaatgttctttactatgagatgacagatggtgcatgggtatgtgtaagaccatccggtacagagccaaaagtgaagttttatctgggtgtaaaaggaacatctcttgcggatgcagatcagaaatcagcggatctttcaaaagcagtacatgcgatgatcgataaaatgctttaatacgaattctggatagaaaatgccgtatgatacagtggtggcggcagattgtgccgatttggaatgcgaagcatcggcaaaatccgttactggaacggggtacgagtgaacagtaactaaaaatgcccatatttcggggattttccttgacaacagaagtaaaaacaagtataaataatgaagtaggtattacagtgtacggatatccgtcagggattggtgcatcagaaaaccgcaaaattaaatttactgtgaaaatccagaggaggaatttttaacatgaacaaagcagaattagttgcagcaatggctgagaaaactgaattaagcaaaaaagacgcagaagcagcattaaaagctttcacagacgttgtagctgaagaattaaaaaaaggtgagaagatccagttagttggattcggaacattcgaagtatctgagagagcagaaagaacaggaagaaacccacagagcggtaaagagatggttattccggcttctaaagctccaaaattcaaagctggtaaagctttaaaagatatggttaacgcataatcataacagaaaagattctaagcgggttccggttgtgggatccgcttttttgttggaggattactatgagactcgataaatttttaaaagtatcccgtctgatcaaacgccgcacggtggcaaacgaggcgtgtgatgcgggaagggtatctgtaaatggaaaaccggcgaaggcatcggtcaatgtcaaagtcggggatatcattgagatcgcatttggaacgaaaaccgtaaaagtgcgtgtacttgatctgttggataccacgaaaaaagaacaggcaaaagatttatttgaatatatagcataaaagcaggcaccttctaatatatttagaaacggtaatagatatttccgccaataaatatcaggaggtcttaggatggatgataaaaatacaaatgtgacaaagtcacataaggtactgcttgcaaaccgcaaaagcggagctttttccggcgtggtggacgtgttgtcatttgatgtggcagagattctgttagagacagaacttggcatgcttttaataaaaggacatgatcttcatgtgaaccgtcttaccctggaaaaaggtgaaattgatattgaaggaagaatcgattccctgacgtattccgatatcaaaaatacaggaaaacaggctgaatctattttaggaaggctgttcaaatgatggctgtcagcgcagcaatcagtgagcaggcagcctcgcttggggtatccatattgattggcggtgcattgtttcttttatatgatattttccggatatttcgcagagtcgtgccacacgggaatttctggatcggtgtggaggattttttttactggctctgctgtactgctgtagtttttgtgatgctgtatcgggaaaatgacggcatggtgcggggattttccataggcggcatcatgattggcatgctgctctactattttctgctcagccggtttgtcatacggatcaatgtgatggtctttgggacggtttttggtctgctcggcaaaatatttggtactattttactaccattcagaaaacatgggaaaaaaattatacattttttcagaaaacgattgaaaaaagtgtgcagagcagttaaaattggattatgtaaactatagcctgacgggacgtttgtgaaaaacagtcaggacagcggtatatcagatggaaggaaacagatatggcaggtaggggacgtcggaaaaaaaataataacagagcaggaaagctttgtattggaatgatcgtcattgcgtttgttgcggtaatgtctgtccagatcatcagagtttaccagaaagatcaggaatacatgcagcaggaggcgtcgcttcagaaacagttagaggaagaaaccgcaaggggagaacagctgagcagctatgagacgtatacaaagtcccagcagtatgtggaagatactgcaaagagtaaattaggacttgcctatgataatgagatcatcttcaaggaagcgaaatgataaaataacaaaatgaaaaaccagttccatgatgtgcgtatgacgcagatggaactggttttttgttaccttctattttacgatggcgtcgattttatccagctcttctttggagaaagaagtatgtccgatgataccgatattgtctaaaatctgttccggttttgaagcaccgatcagtacgcttgtcacatggtcgtcctttaagatccagcttaatgccatttcagcgagtgtctgaccgcgctgtcctgccagttcatttaatgctttgatctgactgagacgttccggtgttaaggaagattcatgtaagaaccgtccgtcttttgcgatacggctgtccgctggaataccgtttaagtagcggttggtcagcatgccctgggctaaaggagagaatgcaatgataccttttttcaggtcatgggcagtttcctttaagccgttctcttcaatggtacggtcaaagatcgaataacggttctggttgatgatgaacggacattttaagtcattcaaaatagccgctgccttctttaaggtcggtccgtcatagttagaaagtccgacataaagtgccttgccgctttttacgatagaatcaagtgcacccattgtctcttcaagcggtgtttccggatccatgcggtgatggtagaagatatcgacatattcaagaccaagtctctttaagctctggtctaaacttgcaatcaggtacttgcggcttccccagttgccgtaaggcccctcccacatatcataacctgctttcgtgctgatcagaagctcgtcacggtaaggcagaaaatcatcttttaaaatctgaccgaaattgcgctcagcgcttccgtaagcaggtccgtaattgttagcgagatcgaagtgggtaatgccgtggtcgaatgcggtgcggcacattgccttcatgttatcgtaacatccggtatcaccgaaattatgccataatcccaaagatacgatcggaagttttaaaccgcttgctccgcagcggttatactgcatggtttcataacgtttactgtctgctgtgtacatttttccatctccttaaatgctttattaatccaattcgccgttcgtcaatcatgcaggcatgttgactcacttgcgttcattataccaaaaaacctgaatgaggtgtgagggcaatgtgaaattcctaaaaataatcaactgttttgaactccctcgaaaggacatcgaaaaagggattttggcgaaaacttttttgaaatcgggatttcctttgacaaagatttttatttcggactcctataatgggatgcacccgaaaaaatccggcagacaaaatgccgtggttggagggagaaataagaaagtgtaaggagaaaaggaatgaaaaagacgggagtcagacaaatgatatttggaatactcgggagcctggcatgtggagtcagtgtgatgggatgttatccgcttgtgccggcatattttaccgcactctatttagaacaggtaaacggagttgtgctgcttgcttttatgtacataggaatgactctgtttatgccgctgaccgcagcggtaaaatacggggtgacactgatcgttatgatcggtgcagtgaagctgatcgaatgggcaaatgaagggtgtccggcatttttggcaggtgtgatggcgggacttaccacactgatcttatcgttttgcggaagtctcctggaatggaaaaaccagccggacggggcagcggtatttttggaggcagtctttatttttggtgcggtaatccttttaaaccgcggtatacatttcctgatggagtggacgccggtgcaacggaaaacagaggaactgccggagcggggaaatggcgagcggctcaaaaattatgcggagtcttttcaggggctgtcccagatatttttaaatatgagtgcaggaaaagaaaaatatgctgcggatgagcttggcagggtacaaaacgaactgaccggaaaagtatgtgcctcctgtgattcctgcgcactctgctgggagagggactgcacaccgctttatggaattttgtcttcaatgatcacatccatctggcaggtgggagagccgggggcggaaaatgaggcggagttaaagaagtactgtgcgaaaagccgggatatggtggaggaggcggtgcgtgtgtttgagcgtgtcagcttaaatcatgcgtggtacaaccgtcttttggaaaacaggcaggtgatcgcggaacagctcgatgccatggcttatatcatgcaggactgtgcaagagaagaacgtgtgctcgatacacaggagagaagagcgatctctgagatacgttaccgggcaaaagaaaggggaatttccattgaggaaatacatctgatcgagactcttgacggcagattaaaactgagtgcggcattaaagagcagaatggggggctgtatttccctgaaatcatttgtgactgcggcgggacatgcattaggcaggcagatgcgggcggcagccgacacgaaaacctttatctcaaaggaaccggtcaactatgttttttatgaggacacggtgtaccgtaatgtacagggaatcgcgcgagtcaaaaaggacggggcaaaaatatcgggggataatttttcttttctggagttagagcgtggagaatttctgcttggactttcagatggaatgggatcagggagcatggcatgtaaagagagtgagatggtcttagatctggttgaacgttttttggaggcgggattttctgttgagacggcgatccgcatgatgaattccgcgatggtcatgaaaggagcggatgatttgtattcaacggtcgatctctgcaagatcaatctgtatacgggaatggcgaagttatataagatcggggcagcagctacctttattaagaggggggcggaggtggaatgtatcacttcccagagtctgccggttggagcgcaggtacagatggatatctctgtgcaggaaacaaaactaacgggcggtgattttgttgtcatggtaacggatggtgtgttagaatatctgcatgtgaaaaaaccggaggataccatgcaggagatcatagagagcatacagacaaataatccggggatactggcaaagaaaatcatggagcgcgtcatgctttttacgggaggaaaggcgaaggatgatatgaccgtgttagcggcatgtatctgggaaaaataaatgacagaagatgtattaaactggatcaaaaaagaaaaactgatgacagaaggggacaccgtgatcgtgggactctccggcggagcggattcggtggcacttttactcgtgcttttggaactgcgccagaggatcggctatacacttctggcaattcatgtggaacatgggatccgcggtgaggagagcagaaaggatgcagcgtttgtggaggaactctgcaggcagaaaaatatcccatgcaggatatgtccggtcaatgtgccggactatgcagccacagagggaatcggtgttgaggaagctgcgaggatactgcgttatgaatgttatcaaaaggcagcagaagagctgaaacagagtggagctggccgtgtcagcattgcccttgcgcatcatgcgaacgacaatgctgagaccgtcttatttcagatggcgcggggaagcggtgtgcatggaatgtgcggtatgcacccgaaacgggtgctgggagatgacattttgattgtgcgtccgcttctttgtgtgtcgaggggacagatcgaggagtatctgaaaaagtgtgggcaggagtaccggacggatggcaccaatctggatatcaattacagcagaaaccgcatccgtcatcatattctgcctgaactttcggtaattaacgagcaggcagtttctcatatcaatcagagtgcactgcttttgcagcaggcggtcagttatatggaacaggaaacaaaaaaagccgtgcagacatgctgcattggcgggggcggtgcatatgttattttagaaaatgagtggaagcagtatccggagatcataagacaggaaatcgttcatgaggtgcttggaaagactgccggcagccggaaagatcttggcatggtgcatgtgcaggatgtctgtgcactgatggagaaacagaccggacgggagatcacgcttccgtatcagatgacggcgagccggatctatgagggggtaagattgtgccggaatcaaagggacaagggcacaggtgttccccagtcattttatgaggttacggcagatgattttgcaaaacttgaggcaggagaaacggtaaatatcacactgccggatgccaatgtaagcctcagactgcttttattttcgggaaaagttgacgaaattccaaaaaatcagtatacgaaatggctgaattatgataggatagaatgtggcttgcagtttcggagaagggcatcgggagattatctgacggtggatgatgcgggacacaaaaagaaactgaaaagctattttattgacgaaaagataccgcagataaaaagagagcacatatggcttttagcgcagcagtcgcatgtgttatgggtcattggcgggcggatcagcgccgtctgcaaaataaaagaagatacaaaaaagattctggaagtaaggatcgacggaggaaattatcgtgaagattaaaaacattaacgttcattttacggaagcagagattgacaaaaagatcagagaattaggtgcaaggatcagtgaggattatgcaggggaatccgtatgcctgatctgtattttaaagggagcatctttctttacctgtgagctggcaaagaggatcaccgttccggtagaagtggaatttatgtctgtttcaagttatggctccggtacggaatccagcggaattgtaaagatcgtgcaggatttatcaacaagcattgaaggaaagaatgtcattgttgtcgaggacattatcgatacaggaagaactttaagctaccttctggagaatttgaaaacaagaagtccaaagagtgtccgtctgtgtacacttcttgacaaaccggaacgcagagttgtggatgtgaaggttgactatgtcggatttgagataccggacgaatttgtagtaggttatggtcttgattataatcagcagtaccgtaatctgccttacattggatttgtggagatagaggaataaaggagaaaagggattgaataataagagaagtggttttagaggatttggagtatatctgatattagttctcgctgtcattgcaatctggtactggctcgatggcaataacgtgaccaacacgtatacaagacagcagtttgagacggcattggcagagggcaaggtaacacaggttaatgttgtgccgaaccgggaagtgccgacaggaagtgtcaacattacattcagtgattcgagtacgcaggtgatgcttgtctcagatgtggcagagatcgagcagtatatgcgggatgcgggatttaagacttataccgtgcagaatccgccggaggaaagctggcttttgacattgcttccatatctgatcatttttgctgcaatgttcattttctttatgatcatgaccaatcaggctgcagcaaactcaggcggcggaagcaagatgatgaactttggcaagagccgtgcgagaagaatgagtgacgatccggcaaaacgtgtgaagttttctgatgtcgcaggattacaggaagaaaaagaagagttagaggagatcgttgatttcttacgcgctccaaagaaatatacgcagctcggtgcaagaatcccgaaaggcgtgcttttggtgggacctcctggtaccggtaagacattgcttgcaaaggcgattgcaggggaagcaggagtaccgtttttctctatttccggttctgactttgtcgagatgttcgtcggtgtcggtgcatcgagagtccgcgaccttttcgaggaagcaaagaaaaatgcgccgtgtatcattttcattgatgagatcgatgcagtggccagacgaagaggaaccggtatgggcggcggtcacgatgagcgtgagcagaccttaaaccagatgcttgttgagatggacggatttggtgtcaatgagggtatcattgtcatggctgcaaccaaccgtgtggatatcttagacccggcgatcatgcgtccgggacgttttgaccgtaaagtggtcgtcggccgtccggatgtacgcggaagggaggaaatccttggcgtacatgcgaagaacaagccgctgggcgatgatgttgatttaaaacagatcgcacagaccacagcgggatttaccggtgcggatcttgagaatctgttgaatgaagcggcaattattgctgcaaaagagaaccgtgcgtatatcaagcaggatgatatcaaaaaatcttttgtaaaagtgggcatcggcgcagagaagaagagccgtgtgatctctgacaaagagaaacggatcacggcattccatgaatccggtcatgcgattttattccacttattaccggatgtgggacctgtctattcggtatcgatcattccgaccggaagcggtgcagcaggatatacgatgcctctgccggaaaaggatgagatgttcaacacgaagggcaagatgttacaggatatcgtcgtatcacttggcggacgtgtggcggaagaactggtatttgatgatattacaaccggggcatcacaggatatcaaacaggcgacacagatggcaaaagccatggttaccaaatacggtatgtcggataacatcggtctgatctgctatgacaacgatgatgatgaggtattcatcggacgcgaccttgcacacaccagaggatacagtgagggcgtggcaagtgcaatcgatcaggaaatcaagcgcatcatcgatgagtgttacgcaaaagcaaagcagatgatcatggatcaccgtgatgtattagatgcctgtgcaaaccttcttttggagaaagaaaaaatcagccagaaggagtttgaggcgttatttgataagtaattgtgcatatttttctgttctcacaaaaatatggtaccaaggtactgtataatatgcataaaaacaatgatgaaaaattgtgaactttgtgcacacttatttgcgggggcatgctattataataaccgtaaaaaccccccaatacattatatatagtttttgctatatcccatagtaaaaataccttctcctaaaaatggaacctgaccccaggtttcattttttttgtcattttttaatctgtaatcagagcacatcttttgaaatacacaaccccataaataattgaaaaaattttccaattatatcttgacacatcagcgaactaaagttataatcctagtaatcttataggaaatatatgaaaaagaaaaaataaaggaacagatgataagatattaagacagttttacaggacagcagacacagattttacctgtgcgtgacgcaggttttacggagtggagggacaatgagaaagaggatggcagcaatccttgcagcagcaatgcttgcaatgggaacattcgccggatgcggcagtgtggcagatgcggatacagtagagatcgtcaatgtttcctacgatccgaccagagaattatatcagacctacaataccttgttcgaaaaacactgggaagagcagaccgggcagaaggtaaggatcatccagtcccatggcggttccggaaaacaggcattggaggttgcgaacggccttgacgccgatgtggtaacacttgcattagagggtgatatcaagacgatctccgattccgggctgatcgatccgggatttacatcagagtttccggacgacagtgctccctatacctcaatgatcgtattccttgtgagaaagggaaatccaaaacagatcaaagactgggatgaccttttaagatcggatgtcagtgttatcactccgaacccaaagacttccggtggagcaaggtggaattatctcgcggcatggtactattttgaaggacagggcgagagtgaggaagacatcacagagcatatgaaaacactatatcagaatgtgctggtcttagattccggggcacgcggttcaacgaccacattcattgagaatggccagggtgacgtcctgattgcatgggagaatgaagcatttttatccatgcaggaggaaccgggagaatacgagatcgttgttccatcggcatcggtgctctgtcagccgacggtagctgttgtagatgaagtggttgacagaagaggcagccgggctgttgcggaggaatatttgaattacctgtattccgatgaagcacagaagcttgcaggagaaaattattaccgtccggcagatcaggacattgcaaaacagttttacacggaggagggaacacatgagatcacagaacttccttccgatggaaaatggatggtgacggatgttgctatggcagatatcagtcactttggcggatgggatgctgtgatagagaaacatttttcggatggcggtatctttgacacgatctatgaacgtaacaggtagtgaagagggaggattgcatgcgtaaaagtaaaaataaaagagtcataccgggttttggcctgtcttttggaattaccataacaatgcttggactgatcgtgattattccgttatgttcgctggtcgtattttcagcaaaactttcatttcctgaatttcttgatacaatcacaagaccgcgtgtgttatcgagctatgcagtcagtttttttactgcattcgtggcggcggcgatcgatgcggtcatgggtatgatcatcgcctgggtgcttgtaagatatgattttcccggaaaagcgatcatggatggcatcatcgaacttccatttgcactgccgaccgcagttgccggtatcgcactgacacacctgactacgacggagggctgggtaggagcattttttcagaagttcggaattaagatcgcgtatacaagactcggaatcatcgtggcgctggtgtttatcggaattccgtttgttgtgcgggcggtgcagccggttttggaaaaaatagatatccagtatgaggaggcggcaaatatcctcggtgcaaacagcaggcagacgatgttccgtgtgatcctgccggagattttaccatccctgatcgccggatttacgatgtcctttgcgagaggacttggcgaatatggaagcgtggtatttattgcaggaaataccccttatgagacagagatcgcaccgctgatgatcatgtcaaagcttcaggaatttgattatgcgagtgcaacttcgatcgctcttgtcatgttagcggcagcgtttgtgatcctttttatcaatgcatggctgcaaagccgggcgtcaaagatcgtcagcggaattgcatagcaaccaggttgcatagcagctaaattgcaggatagatgtatggagacaggcagaatatctgtcaggttttgcagaaatcagatcacaggaaggagaaagctatggagatcagaaaaaattcagggccacttaaatggatcttaatcggtatcagcacattatttctcatagtgatgttgatcctgccgctcacctacgtccttgtcacagcgtttggggagggcattaaagtattcgtggcgtcagtcaccgattattatgcattaaaggcaatcggtcttacattggaagtaacgctgatcgcggtggtggtcaacaccatatttggaattgcggcatcctggtgtatcacgcgattccagtttcatggcaaaaagatcttgtcaacgctgattgatcttccgcttacaatctcaccggttattgccggactgatctatatcctgacctttggacggcagagtatcctttatgagtatctgcggtcggcggggatcaaaatgatctttgcggtaccgggaatcgtggttgcaacagtgtttgtgacatttccgtttatatcgagggagatcatcccggtgctctccacacttggtaccgacgaggaggaagcggctgcactgatgggagcaaacggatttacgattttccggaaaattaccttcccacatatcaaatgggcattgctttacggaatcgtgctctgtacggcaagagcgatgggagagtttggtgcggtatctgttttgtccggtcaccttcagggaaaaacaaatacgatgccgctttacattgaacttttgtatcagggatatgattttaccggagcgtttgcggtatcggcgatcttagtgtgtatggcagtcgtgatcttagtgcttcggagtgtgttggagcacaagggcaaagaagcgtaggcagggctgccagagaagaaaagtaacagcagcgcagttaaggcatcatagcagctggcgcagcatagcagctggtgcagcatggcagtaaatgtactactggaaatggagcggattatggcggaacaaaattatgtagaacttaggcatgtgaataaaaagtataaagattttcaggcatccgacgacatcaattttggaattggaaaaggaaagctgatcgggctgctcggaccgagtggcagcggaaagacgacgatccttcgaatgcttgctggattagaacatgcggattcgggggagatcatcattgatggaagagtcgtcaatgatgtaccggcgagtgagcgcgggatcggatttgtgtttcagaactatgcgctgttccgctacatgaccgtatatgataacatagcatttggactggatgtaaaaaaatggaaaaaggcagatatcagacggcgtgtggatgaactggtggaattagtcgggttaaagggatttgagaagcgctatccgaaccagttatccggcggacagagacagagggttgcatttgcgagagccttagcgccgaacccggaacttcttcttttagatgaaccgtttgcagccattgacgcaaaagtacgtcaggaacttcgaagctggcttcgggagatgattacgagagtcggcatcaccagcatttttgtcacgcatgatcaggatgaggcaattgaggttgcagatgagatcatcataaccaaccatggacatattgaacaggcgggaacgccgatcgaaatctacagccagccgaagacaccgtttgtcacagagttcatgggaagtccgaccagaatcagcaatatcaccagcttccatgggtatgaggaattaggtgaggggcttcatgcggtggtgagaccggaacatgtgagtgtcacaaaaaagacagagcagagccgcttttcttcttccgtggaggaaggtgttgtggagcgcgtgatgtttcgcggcagagaggtcgaacttcatgtaagagtacatgatgtgctgcttgtggcaaaccgcaggttagaggaggcatcgatcacagagggcgagcgtgtcaatgtgttcatttatcaggtgtttgcattcccggcaggtgaaaacggcacacagaatgtaaacattgtagaaaatgccaatattgaaacagagaagctgttttatatttaaggggatcagtgtgaaaaataagatttttcacacgcaagatttgtgctccggcacaaacttgatatgcgcaaaaaactgtgcagaaatggagaattatatgaaaacagaaatcattacatcggatgtgctgatcatcggcggtggaacttccggctgttatgcggcactgactatcgcagagcaaaacccggagcttaaggttgtgatcgcggaaaaagcgaatatcataaggagcggctgtcttgcagccggcgtcaatgccctgaacgcatatatcacggagggaagaaagccggaagattatgtcgactatgccacgaaggatgccaatggcattgtgagaaaagacctgctgctctccatgtcgcagggactcaaccgtgtgacagcgaagttagaggagttagggcttgttattttaaaagatgaaaacggaaaatatgtgacaagaggtaaccggaatatcaagatcaacggcgagaacatcaagccgatcttagcggaggctgtgaaagcacagaaaaacgtgaaagtcatcaatcatgtgaacatcacggattacattacagagcaggataaagtgaccggggcatacggatttgacgtcaatgagaagatagcatacattttttctgcaaaagcagttttatgtgcgaccggcggagcggcaggactttaccgcccgaacaatccgggattttcaagacacaagatgtggtatccgccgtttaacaccggagcgggatacgcgatgggaattttagccggagcagaaatgacgacttttgagatgcgttttattgcactccgctgtaaagatacgatcgcaccgaccggaacgatcgcacagggcgtcggggcaaaacagatcaactccctcggagaggtctatgagacgaaatatggcattacgactgaggagcgtgtctacggtaccgtggcggagaatcaggagggaagaggcccgtgttacctgcatacggaaggcattaaggaagagcagggcaaagatctgttaaaggcatatttaaatatggcaccgagccagactttaaaatggatcgagagcggaaaagagccgaatgagcaggatgtcgagatcgagggcaccgagccttacatcgtgggtggtcataccgcgagcggctactggatcgacgatgcgagaagaaccacattaaaaggactttatgcagccggggatgtcgccggaggatgcccgcagaaatatgtgaccggagcactcgtggagggcgagatcgcggcggagacgattctaaaggatctgaagcagcaagaggaaggtcagcagtcagaaggacaggcttcaaaggaacagttagaaaagctggcacaggcagtcgatcaggaatatgagtcctgttttgcagagaaaaaatcattctttggcacggaacagatcgaggaagccatgcagaaagtcatggatgcctacgcaggcgggatcggaacgaattaccgctacaatgagaaacagctcaatatcgcggaagaaaaaattgaccagcttttcgcactgaccaaagatctgaccgcaaaagatacggatgacctgttacatatttacgaagtaaaggaacgcttagtcgtatgtaaaagcgtcatcgcacatctaaaagcgcggaaagagacacgctggcgaggttttgggcagaacatggactatccgggaacaaaagatgactgggataaaaaagcagtcaattccgtctatgaaaacggtgaaatcaaaattctgttccgtgatctgacacagacaccggattttggtcagaaaggaggtaccctgtgagcatagcgatcaataaaagtaaatgcgtaaaatgcagacgctgcatcgaagtctgtccgggaaatctgatcaaggcagacgcagacggcaaggcatacatcaaagagccgagagactgctggggctgcacttcctgtgtcaaagagtgcagggcagaggcaatcgatttctttttaggagccgacatcggcggcagaggcagtaccttaaccaccagagaggacggagactaccgcctctggacagtcactgcccccgacggcagtcagaccgttatacagatcaataaaaaagatgccaataaatattaaaacacagcaaaatagaggaggatattttatgagtggattatcacatttggacgaactggaggcagaggcgatctacatcatccgcgaagtagctgccgaatgcgaaaaaccggtaatgctttactccataggaaaggacagctcggtaatgctgcacctcgccatgaaagcattttacccggagaagccgcctttcccatttttacatatcgatacgacctggaaattccgtgagatgatcgagttccgtgaccgcatcgcaaaagagaacggcattgagatgttagtttacaccaatcaggaaggtgtggacgccggcatcaacccgtttgaccacggttccgcttacaccgacatcatgaaaacacaggcattaaaacaggcgcttaaaaaatatgagtttactgcagcatttggcggcggccgccgtgacgaggaaaaatcccgtgcgaaagagagaatcttctccttccgtaacgaggcgcaggcatgggacccgaaaaaccagagaccggagatgtggaaactgtataacaccaagatcaataaaggcgagagcatccgtgtcttcccgatctcaaactggacagaaaaagatatctggcagtacatcaaacgtgagaacattgagatcgtaccgctttattttgcaaaagagcgtccggtcgtatacagagacggcaacatcattatggtggatgatgaccgcttcaaattccgtgagggtgagaagccggagatgaaaaaagtccgtttccgtacattgggatgttatccgctgaccggtggtgtggaatccgatgcggagactttggatgagattattgacgagacacttgcagccgtatcttcagaacgtaccagccgcgtgatcgacaacgaggcggcaggcagcatggaacgtagaaaaagggaggggtatttctagatgaaaggtttacttaaatttatcacctgcggtagtgtggatgacggaaaatccacactgatcggacatattttatacgatgcaaaactgctttatgcagatcaggaaaaagcactcgaattagacagtaaagtcggaagcagagagggggccatcgattattccctgctgcttgacggtctgatggcagagcgtgaacagggtatcacgatcgacgttgcataccgttattttacaacagaccgcagaagctttatcgtggcagatacacctggtcatgaagagtacaccagaaacatggcagtgggagcttcctttgcggaccttgcgatcattcttctggatgcgacacagggtgtgctggtgcagacaagacgtcatgcaaggatctgtgcgctgatgggaatccgctactttgtatttgcggtaaacaagatggatctgatcggctatgaccaggaaaaatttaatgcgatccaggcagagattttacagcttgccggcgaacttggactggagagcgtcaagatcattccggtatctgcgacagagggcgataacgtcacaaagaaatccgataacattccatggtacaccggcgaaccgattttaacttaccttgaggaagtcgatgtgactgaaaaggcaaaagagcagggattttatatgccggtacagcgcgtgtgccgtccgaaccatactttccgtggtttccagggacagatcgaggccggagaggtgcatgtggatgataccttaacggtactgccgggcaatgagaccgccagtgtaaagagcattttagtagccggaaaagaggcggataccgcacagaccggacagccggttacgatccagttagacaaagagatcgacgtctcaagaggatgtgtgttggaaaatggcagcggcatcacggcggcgcagaaatttacgacaacgcttctctggatggatgacaataacctgtcagccggaggcgattactttatcaaactcggaaccaaactgatcacaggaactgtgacagagatctcctataagatcgatgtcaataccggggagcatcatccgaccgatatattgggaaaaaatgagatcgcagtctgcagcattgtgttagacgaaaagataccgcttgatgtattcaaaaaacataagaccatgggtgaactgattttaatcgaccgtgtgaccaacatgacttccgcctgcggtgtcgtggagcagtttgcaagcggcaatgagacagaggaaccggtatttgtttacggagacttaaaagcgcgcggagatattttcgaggagttttactataacatggagaaatcttcgattgcgaaacataaaccggagcagaagacctacaccgtgggagatgagatcccgacgaagagcgagacttatgaatatccggagtactttgatattttgatcttaagagatcaggctgccgtacaggtgcgtgacaataagatcgaggcgatccttccattagcagattaccgctactcaggagttccggttgtcaacggaagaggatttgccgtgaatgtgaaatcgcagaaagatctgcaggcattcttagacggatatggacagggagagacggatacagaattctggaaccactggctgaccttcggaacttaccgcaaagtgatcttccatgaaaactattgggaaatctgatgcgcaatcgtttgtgcataattttagtaccagtttttaaaccggtactaaggtactgtttattttgtatagtttgggcggtaaaaaaacttcaaatttgtgcacacttatcctgccgctcatgctattataattactgtaaaaaccccccaatacattatatatattttttgctataccccatagtaaaaataccttctcctaaaaagatagctagccgatagctatctttttttctgaaaaaataaccatgcggttaaattcgcatggttatttttgtttgttcgcaaaagtgcggtatacatcataatagatattttcgcggtttggtccgattaaagaggcaagctctttctgaagatccggatgatccaggatcaggtcaatgatattcggattatactgtgtgccacggccatccgccagttccgaaagcacggtatcaaaatcttttgcattgtgatagttgcggcttaagtaatccgtagcggcatccagacagtcacagatgtgcacgagatcaatgaccgggcggcacggtgaatggaggatgtcaaagtcatccggataaccgcctgtgccgtcataagtgcggtgatgtccatgtgcgatatctgcataacacgcaaaatcaggaacagaggcgagatcctttgctcccgtttccggatgcatgcggatcaggtcaaactcgtaatccgtcagcctgcggtgctgcgtgttgatgatcgggacgattccgtttttaccgatatcgtgaagcatcgaaccctgcacggcgaaatcaatgatatgcgtgcggtttttctgaatttcagaaaccgtcgaaccaagtgccgggcagatcagaagctctggcttatcatcgaaaatatattttaaaagcgcctccgccagataggaaaccataacggagtgtgtcagtgttgccagatgactagaaacgatcagatcaaggataaagtttgtcttttcaaccgggtggtggaacgtatcaagcacgattggatgaaaacatgccatacgcataccatcatactgcgagtatgtgtgcagacggtaatgtcttgtcgacagaaaatgaatgaccatactgcggtaagtgaggtttctgcgatctttttctgcctcggaaagggtggtatgggacagaaagtgcatcagaagaattggaagatccacataaaaggacagataatccagttctgtttcatccggaatcatttctttttttcgggtataataatcatctacgaccgaataagcttcgtcccagcttaatgcctcttcttctgccatgagacgataatattgaaatacgagggcgggcggacagtcgtaaatggaacccttgtgcttaaggacttgggtataatgctgcagtgtcagttcagataaatgcagccgcagtgaatccggaaattcaatatcaaaaagcagcaggtcattttcgcaggagagaaaattgttgatcgttttatttacaattttgggaatgcgcggattgaccgtatcgtaacggcagaacttttcctgcttgcgcagttcgatcagttctaaaaagaactgatatgcctcctcaatcggcagattgtgaagaaacggctcaacacggatcaggttatcataggcgacaaaaatataatcgcggctttccggtacctgaaatgtgtcgatcttatcgcgcagtgctacaacttttttgtaatagtcacttgagcgcagccccatcttatgatcgcctgtgcgggaaagctgaagtgcggaataggcggcgcaggtgtagagaaaaataagactctccacatctttatttgcttcataatgagaaatcagctcttttgcaaaacgaagctgcagggatggctcattatactggctgtaataaagtttacggcaatagcttaagaccagatcatactggctgttgcttaaagtagatttatcttcttttaagtgcgtgaaaaatgaatggaataaaagatcatcctcgatacaaagctgatatcttgaacgcccacagtttttcaggcatctgatccattcttcttttgcagccggagcatgaatctgttcatcccaggaaatgctggtgataaaattattaaaatagacatcgaaaaaaagcttgatatcactgtcagtcaacctgagatcctcctttaaattaaaaattccatacgaaaattatataacgtgaaattatctgtgtaaatagattttaggtcctggtattatgtatatctaacaggatataaggtttgcagtgtctttcagatttttatggtcagtagacttgtttgtgtgttattatttgtataaatgcagttttagacgttgcgaaagtaccattctgtgttataataaatgaagagttttcgtaaattttcgcaaagaaaggaaaatagggattacatgaaccaggaagaatcagtttatgagttaaaccgtatacagagatatattatgcagatgcgtccgctgttaaaaaagaatgcacttttttcggatggaacggcagattacagacagccggtggaaccggatgcaggggatgaagtgactgtccgtttccgtacagcgcgcgataatgtcgatatcgtatggctgtgtaccggagataaaaaatataaaatgaaaaagacagagaccgggggagcctttgattattatgaggtaaaattcacactcggagaggagccgttttactattattttaaagtggcaagcggtctgttaaatgtatattatgaccgctatggtgtcagcaaggaaaaacgtgacgaataccgtttctgcattattccgggattttcaacaccggaatggtcaaagggtgcagttatgtaccagatcttagtcgaccgtttttacaacggcgatacgtcgaatgatgtgctgaccgatgagtactattatatccgttctaccagcagaaagatggacagctgggatcagtgcccgtctgatttttccgtggcagagttttatggcggtgacttagagggtgtcagacagaaactggattatctgcagaatctgggtgtggaagtaatttattttaacccgttatttgtgtccccatccaatcataaatacgatatccaggattatgattatattgacccgcattatggaaaaatcgttgaggacggcggcgggctgttaaaagacggtgtgagtgataacagaaaggctgaacgctatatcaaccgtgtgaccaataagaaaaatcttgaggcgagcaaccgtttttttgcagagctggtagaagagatccatgcgcgtggcatgaaagtgatcttagacggtgtgttcaatcactgtggatcatttaataaatggcttgaccgcgaggaaatctatcaggtaagcggcgattatgaggatggagcctttgtttccaaagacagtccgtaccgcaatttctttggattccaggatcagtttgcatggccgtacaatacgacctacgagggctggtggggacatgatacgctgccaaaactcaactatgaaggctctgaaaaactgtatgatgatattatgcgtgttgcagcaaaatgggtatctccgccatacaatgcggacggctggagacttgatgttgctgcagatttaggacattccccggagatgaaccataagttctggagagatttccgtaaatcagtgaaaacggcaaacccggatgcaattattttagcagagcattacggtgacccgaaggaatggctccagaaaggtgaccagtgggataccgttatgaactatgatgcattcatggagccgctgacctggtttttgaccggtatggaaaaacacagcgatgaggcaaaaccacagttaaagggaagcgtgaaagattttgaagactccatgcgtcattatatggcaagtttccagacatcgcagcttttgtgtgccatgaatgagctttcaaatcatgatcattccagattcatgacaagaactaacgaaaaagtgggacgtgcagcaacacttggcacggcagctgctgaggaaggaattaaaccggcggtgtttcgtgaggcagtggttgtccagatgacatggccgggtgcacctaccatttattatggtgatgaggcagggctctgcggattcacagacccggataacagacgtacctatccatgggggaaagaggacattgtcctgatcgattttcatcgtgatattatccgcattcataaagaacatgaagcactccgcaccggttcccttatgtttttaaaaggagacgataatctccgaagagacgataatctccgaggagatgataatctcctttgttacgcgagatttaaccgcagggagcagtttgttgtccttgtgaataataaggaacaggaacgtgatgtggaacttgaagtatggcagtgcggaataccgaaaaaagcagtgttagagcgtgtgatcatttcaaatgagacgggctattcactgatgccaaaacagtatgaagttgcggatggagtactcaaaataagcctgcagaaatattccgcagttattttgatgtatgacagatcagaaaattagttttcaggttttaaggtatggctttcggacaaaaaatacttgcataatagaagctgctatgctataatcttttcttgtcagagcgcattttgcgtatctgataaatgggcagattcccgagtggccaaaggggacagactgtaaatctgctgcaatttgcttcggtggttcgaatccacctctgcccattgtgtattgtccggtaggaaggcatttttaagtagctcgtgagtgaaagcctttgaatataggaggcagtacatatggaaaatgccggcgtggcggaactggcagacgcgcaggacttaaaatcctgttgtagaaatacagtaccggttcgattccggtcgccggcattatagagattcttctaaagagagatcctgttaacagggtcttattttaattcattaaaaattataataagtaattttgaaattttaatgaaaacaaaatgcatttcaaataaaattgtgctataattctgaaaaacactaagaaggggaaaccgtgttcaaatttgatacggaagaaaggtacgatgaaacaggaaaaagtaacattcattcattcaatttcagcgaaaattactttgctggcggtttttattgttgttgtgtctcttgtagggagtgtgatcaatgccagttcaaaatcgaggaaagttgttgaaaacgtaaattcaaattatattctgagtcttgcagagatgggagcacagacgatcgggaatattccggcagatattgcaacagatgaagaatattcgaaaatcataagtgagatcaacatgacaggagtagagagtgcatatgcatatctggtatcagaagatggtacgatgatctatcatccgaccgcagataagattgggcagccagttgaaaacactgtggttaaagaggtggtatcacagcttgcgtccggaactgttccggaggatgctgttgttgaatatgaatttaatggcggaatcaagtatgccggatatgcgctgacaccagaccatatgatcgtggttgtaactgctgacaaagatgagattgtaaaaccggttaatcagatgatctggtttatgagtataacagcaggaattacacttgttgtctgtgtgattattggatatctgttaagccgcttcatctgtacaccactggaacatctgacagagattatcaaaaatactgcagatctgaatttcagtcataatgcaaagagtgacgatttatgtaaaagaacagacgaaaccggttttatggcgcgggaactccgtgttatgagaagaaatctgcgtgagatggttgcaaatattgacacagcaagccagcagattaccggaaatgtagatggattaaaacaggtaactgagacggtggatcacatgtgctcagataactccgcaaccagccagcagcttgcagcgggtatgcaggagactgcagcaacgactgtaaatatcaatgaaaatgtcggcaccatgaaagaggaagctgacagacttacagaaatggctgaaaaaggtgcagatgtttccaatgaggttatggacagagcaaagaatctgtgtaataagacagtaactgcaagtaaccgtaccatggaaatgtatacgaatgtgaaagaaaaatccgaaaaggcgatcgagggatcaaaggcagttgaaaagatcaatgagctgacaaaaccattatggaaatttcttcccagaccggacttttagcattgaatgcaagtattgaggctgcgagagccggagaagcaggacgtggatttgcagttgttgcaacagagatcggaagtcttgcagaccagacctcaaaagcaatcgcagatatcggtaatattgtaaaggctgtcaatgaagcagttggtaatatgacagagtgcttaagtgagacaaccggatttttggagacgaccgtacttgaagattataaagaatttgaacaggtaggtgcccagtatcaggatgatgcagatgtattcaagtccaacatgaatcaggtaaaagattctatgctgcagctctcggatttgatcgagtcgatcgcacaggcattaagcggtatcaacgatactgtgggagaagcagcagtcggtgtatccgatattgcgtcaaagacaagcggtatggtggagaaaacaggtgctacacatgatatggtatctgagtgttactcctgtgcagacgagctccgtgagatcgttggcaaatttgttttaagataggcgaatccgttgtcatgaattatggcctgtcctcataagatgtggtaatcacagattatgagggcaggcttttttgaattcataggaaattatgtcctatgaattcaaaagccctccgccgggatatctgtgtgaaagtatgcggtagggaggctatgatgcaggagaagtcaaaggaacagggaaatgggcagaagcggggatacaacctgttggataaggaagaacagaaatcgatgctgtcgtgttttgtggaacagctttgcgatccgcttatttttattttgtttgcggctgcggcaatatccctgctgctgagggaatatggagatatgtgcattatacttgcagtagtactgttaaatgccgtggtcggagtgatccaggagggaaaggcgaaacgggcgttagaggcgttggaaaaaatgacaagcccgcatgccctgatccatgatgaggatggaatccgggagattcctgctgctgatctgattcccggggatattgtctgtcttgaggcagggcggcaggtgccggcagatatccggatcatatcagcggttaatttaaaaatcgaggagtcggcgctgacgggagaatctgtcccggtctcaaaaaatacgaccgatcagaacgaggcatatatgaccacaaatgtcacatacggccgtggggaggggatcgtcactgcaatagggatggatacgaaaataggcggtatcgcaaaattgctttccgggacaaaaacggaactgacaccgctgcagaaaagacttgcggatcttgggaaaattcttggtacagtttccgtttttttgtgtatcctgctgtttgtgatggcggttttgcagagacgcaatgtcgcagaaatgctgatcaccgcgatatcactggcggtcgcagcagtcccggaaggactgccggcgatcgttacgatggtactggcactttcggtatcacgcatggtaaaggtcaatacgattgtgaaaagactgccgagtgtggaaacattaggctgtgtgagtgtggtatgttcggataagacgggaacgctgacgcagaaccgtatgacggtgacgaaatgttatacggatgggaaaatctgtgagccaaagcggttaaaccgcagaaaagaccggtattttctggagggatatgcactttgtaacgatgcgtccatccgtggagagcggatcggcgatccgacagaacttgcgctgctcgatatggcggcagggtttgagatacaaagagagcgtttagaagaaagttttccgagaacgcaggagatcgcatttgactctgaacggaaaatgatgacaactctgcatcgtggggaaaaagaaaatgtttcttataccaaaggctcaccggatgaaattttagagcgctctgcatttctgctggaaggtggcgggcggattccaatgacgccggagaaacgcagagagatcgatcaggtgatccatgcgtttaccggggaggcactccgggtactggcacttggaatgagaaatccggcctccggtttaaaggaaaacgggttaacgtttatcgggtttgtcggaatggcagatcccatacgcccggaggcagaggatgctgtgcaggaattttaccgtgcgggtgtaaagacggtcatgatcacgggggaccggatcgacacggcgtttgcgattgcgaaagaactgcacattgcgtcggaagaaaacgaatgcatttccggggaggaattaatggaaatgacggatgaaatgctcgcggagaagataaaaaaggtgcgtgtatttgcacatgtctcaccggagcacaaagtgcgtatcgtggcggcatgcaagaaaaacggagagattactgcgatgacgggagatggcgtcaatgatgcgccgtccctaaaagcagcggatgtcgggatcgccatgggaaaggcgggaacggatgtggcaaaaaatgcggcggatatcgtgctgacggatgataattttgcaacgatcgcaaaggccatcgcgcagggaagatgcatttatgaaaatatccgtaaatccgtgatatttctgctctcctctaattttggggagatcataacaatgcttgtgtctgtggcgtgcggttttgcggcaccgttaaaatcaagccacattctctggatcaacctgatcacagattcccttccggcgcttgcacttggtgtggatgaggaagaaaataaaagctatatggacagaccaccgcgtggaaaagatgagagcctgtttgcgggcggtggattaaactgtacctgcttttatggagcgctgatcgcattgatcagtatggtggcatttttgcagctcccggtggggattctgctccgggcgggaaatcagatcacaccggctgcgataaggacactgcttgtggacacggagcttttaaaccgctgtcagacctatgcatttacagtgcttggaatgtcacagctgtttcatgcgatcggcatgcgtgatgttgaaacgtcattgttccggatgaatcacctggaaaaccggttgatgatcgctgcgtttgtgatcgggatgggactgcagctgcttgtgacggaggtaccttattttgtcgttctgtttggaacctgcagactgacactgcttgaatgggtaaaactgttagtgcttgcatccatgcctttgtttgcacatgaactgttagtattcggaagctgtctgggtgaaaaggaaaatagggaaaatagaaaagaagcaacagggcaggctgtctcatccggcgggcgctggagctaaaaaaaacattcattttttgcggggggtgtgatataatgagatgtccgtaagttttgggcaggtttttgcaggaaaggatattggaaaattatggaagagaaaatgacaatggaaatcacgaacgacagacttgaggaggctattaaggaatatgccgcagaccggaccaaagaacgtcttaccacggttcttaatctgctccgtccgacaaagctgttcgtaccggcgatgttgcaggcaccggatcgcccgattccatgttttttaaagaatagtaatgaagagcattttttggttgtatatacgtcaaaagagcagattccggaggagccaaagagccaggcgatgcttaatatgccattcccggcatgtaataatatcgttgtaaaaccggagttaaaacttgcaggaatggtgatcaat

SEQ ID NO: 5123 - DNA, 29949 bp, Unknown
  gut microbiota DNA sequence
ttattttgatcagatcatctgtgcaacgatggtggaacatggaaagccttcaccggatatctatcagtatgcatgcagacagcttgcgcttttgccggaggaatgtatcgcagttgaggattccccaaacggtgtatgcagtgcttatggtgcaggctgtaatgttgtgatggtgccggatcagaccgaaccggatgaggcattgcgtgggaagctggcagcgagggtggattcgttagatgagatcataaagctgtttaagaaattccctggtctgacaaaggaagacgaggagcatcagctcagtaaaatcatagagattgcgcaggataatttagatcatgcgaaagaagatatccggaagatcaatgaagatcttgccgatctcctcgaagtctacgatgcaaaggataaggaaggactggcactctggaacaatgcaaccgcgcggttaaaggaggatgaacgggaactggtgcgctatgaaaaggcgcgtaagaagccgtattttgggcgcattgatttcagggatccaaaggcgaaagcggatgaggcttattatattggaagagtcggcatcacggacagcagctctgatccggtcgtgctcgactggcgggcaccgattgcatcagtatactatgagagcaggatgggaacatgccagtataccgtgagctctgaggggacatttgagattgatctgaaacgcaagcgcacttacgagattgaaaatgaccggttaaaagatttctttgattcggatgtggtcgccaacgatgaactgctgacaaaataccttgccaaaaataaaaaggcagttttgggcgagatcattgcgacgatccagaaagagcagaacctcattatccgccgttcgccgaaaacgaacatcattgtgcagggtgtcgccggttccggaaaaacgacagtggcgatgcaccgtatttcctatattctatataattataaagatgatttccgcccggaggacttttatattataggaagcaaccggatccttttgaattatattacaagtgttctgccggaacttgatgtgtatggaatccgtcagatgacgatggagcagcttttcatccgccttttgtatgaggattgggacgagacgcggttttcttaccacaatatcgacaagacagatgcaaaaaacagcatcaagggcggcacggcgtggtttctggatttagaaaaattctgccagaactatgagaatcagtcgatcgcaaaagaagacatttatatggaaaagactggaaatctcctgttatcaaaggagcagatcggacgttatttaaaaaataatccgaaagtttccatgcagagcaagatactcatgttaaatgagattttgtatgcaaaatatgaaaatgaggtttccgggaagtccgtgacttttccgccaaaagagaaaaagattttagacaaaaaatacgcgtcttattttggggatggaaaatggagagaatctgtatttactttttacagagaatttttacttgcgcagcaggaggcaggaaaagaagtcgatgtgccggaaacctcgtttgatgtctatgatcttgcggcgcttgcatatatttacaagaggatcaaagagacggatccggtgcgtgaggcgggccatgtagtgattgatgaggcgcaggactttggcatgatgtcatacagatgcctgcattactgtctgtatggctgtacttacacgatcatgggtgatacatcccagaatattcattttgagtatggtttaaacgactgggaagagttgaaaaaactgattttgacaggaacatttgatgcgttcggacttcttaggaaaagttaccgcaacatggtggaaatttctgggtttgcaaatgaaattctgcgtcatggagatttttccatttatccggtagagccgattatccgtcacggaaatccggtgcagacggtggcatgtccggatgaaaatcaattgctggcagataccgtcaccacgatcaaaaaatggcagcaggacggttatgagacgatcgctgtgatctgtcgtgatgaggcggaagcggcacaggctgcggaagaactaaagaaatatgtaaaaattgtagaaacagatctggacaaagccgagttcggggatggcgtcatggtgcttcctgtctcctacacgaaaggacttgaatttgatgctgtgctgctgtttgatccgacgcaggaaaaatacccgtcggataacgggcatgtcaaacttctgtatgtggctgcgacccgcgcactgcatgaacttgtggttttgtaccgtggaaaactgaccgggatccttgccgacaaagtcccggaaggaaaacatatgaaagagtttgcggcagaaaccttgacaaaagcagcggaatttgaacgggtgcagcacacggaaaaagagatcgaacagcagcgcaggatcgagggcgcaaaggatatggcagagcgcgagtatatcggcccgaagcgcattgtcattaaaccgcaggggaaagaaaatgaggctgaggcaagaggaaaaacgttgacagggcagaaaatggcatctgcctataagagagctgtggcagcgccagtcagaaaagcagcagacaactctggaaaaaacgaaggaaaccatacggaggaaatcatcctgtctccgtacgaatttggcgcaatcccggacaatgcgatcctccgtgttaaaggccattcccgaaacaattttgccatcaaatggatcaaaaagacaaaaagctatgtggaactttccagtatgtacggacttttacgcatcacaccgatcacaccggaggtgatccgggtcagtttcgtgaagggtgtcacggaaaaaattggcgatacagcatggaaaggaaaggcggatgcagcatttacatggagtgcaaaagaatccaaaatgctggtagaaattgcaacggaaaaagttaccgtgcgcattgcaaaaaataatggtgcggtctgcttttacaatgagaaaaagcagttactgcttacggaaaaagcggaggaaccgaggtttcaggaaggcggatgtaactggacattttttgaatgggaaaagtccgaacatttgaaagcaaagggactgcttgctgctgattttatggatgtgacagcaaaagcaaaatacgtttcctatggtgggaaaaagttaagaatgccgcttattttatcagagaaaggatacgggcttgccattgcatcgaaaggaactgtgctgttttgtgggatacggacttttggaccttatatcatggcagaggggagtcagagcgattattattttatcagtgaaaagaaccgtgaaaaattagttgagatctaccagaaaacgttgactttacaaccgaagttttaaatatgatatggatactgattgaataagaaaagcggtttgttttataatggagcggataagaaagaataggagatcagtgtgcaaaacttgttttcattagaaagcagcgcaggaaagggagtttaaatgaatataaaaaatttagaaaacaacgcaagaaaatatgtgagcagtcttggaaattttcatgtattagagtatcagtcagacgcctccgttgcgccggaaaatgcgagaaatgagtactttatgagtaaaatgggtgtccgcagacgccagatcgttattgaactaaacggaaaagagtctgccattatccaggcgggcagcatgcagtggatggcaggtcatgtgaaagcaaccacagggatcaagggagtcggtgattttgtcggcaagatggtcaaaggtgcgatcacaaaggagacagcagtcaaaccggaatacgtcggcaacggcattctggtgttagaacctacctataaatatctgatcttagtggatgtcggatcctggggtgaaaagggcatgacgatcgaggatggcatattttatgcctgttccggaaccgtaaaaaataagctgacggcgcggaaaacaatctcatcgaccgtgcttggcaaagaaggatttttcaacttaagtctggtcggggaaggtgtcgcagcattggagagtaacgtgccgtatgaagaactgattgaggtggaacttgacaatgatgaattaaaaattgacggaaatcttgcagtctgctggtcctctggtctggaatttactgtggagagatcgacgaaaacgcttgtgggttcggcagtcagcggcgaaggactcgtcaatgtgtaccgcggaaccggaaaagtgctcatgagcccggtcgcaccgacggcgtcactctatgaggcaacacatacggtggaggcaaagccgggagtggagatgcatgaggcggagtagaagaaagagtagacattatggcgaaaaggacagtttatcatggtggttatacacccgttgaaaacccggaaatctgcgtaggacgcaacacaaaagattttggcgttggtttttattgcacgatcataaaagaacaggcgcagagatgggcaagacgctatgatgcaaaaattgtgtcgatttatgacgtgcgtttaaatcaggatttaaacatcaaagaatttcgtgagatgacagatgaatggctggattttattttttgtatgtggtctgattgattatattgcaagaaaaacaaaaaataagagaactgatattgtaaactggcttggtaaagacaggctgcagaaaatctatgatctggcagatgtttatcattgtgacaatattgacagggtatgcgaagattttatagaagaagcgaaaatcccggatggaatatttgacaatgtagcggattgccgatatgcgataccttctcattgggatattgcaaaagtatataaacgtttgatcaaacaggtggcacaggaaaaacaaattggtatcgtggatgcgctgataaaagtatataattcttttctcagtgcaaagattgatgattataacagcagcctttattatgaaaatccatcttatttgctggagtgctacttggaaaatacaattctataaattaaatttggatagtaacgtcgatctgaagaaaacgctagaatagaaggaaagtttagatgaaaaactggattgaaacttaccaattagaaaatggcgattttgatatttcggatgtgaataaagaattagtgagccagatcccgtcagcaatacagatggggaaagtatatcagcgattgattgttgatacggctctttggaatgaaaattatgttgatgaaatatatagggtttataatagtgatatttgtgatataattataattgtagcgcatattatgaaccatcctatattattgccagagcatatcaaaagggtgggttttaagggaataaataaggctttttatcttacaatctgatcccataaattcggatttatctaatcaatcctccgaaacccttgtattttcaaggaaaatcggcaatttaatactcgttccttatgtattttcccttgtttttgcccttatgagccgaaacaagggaaattttttgtttaggcttccccgaccaccttatcaagcagtcttgcggaagttcgtttcgcttcccttttagagtgagcgtagatgttcattgtggtacttacgtcagcgtgtccaagcagttcctgcacatcctttggtgctgcaccattggagagcagattactggtgaatgtgtgtctcagcatatgaaaatggaaatcttcaaatccttccagcttcttttttgccgaccttgtcataacaccaactgtactcggtgactcgtatgctccgtcagatctcaggcagacaaaggatatttccttgtacccgtcgggtacttcctctgttctcggaatgctgtggcaacctgccttgcggtcttacatagacaaatttgactgaaaaccaatggcaagaattatgttttgaaatatatcactttaaggatactttcttttttgttcaaaaagtgatatactgaacaaagcaattcgaaaggcggtgaactcacacaatgagacttattcgaggtaactactcggtgcagttgtaaatctggcaacagattgtatcgagcttattttatgatgttgtcagttggctgcgcctataattgatgtacaaaacaaaaatattcaaaataggagtagttacgatgaaagaaaaagaattgatggacatttggaaaagagaagaaagtgttgcacatatccacggatgggatttttctcacatcgagggaagatatacggaagaaacggacttaccttggaattatcaaaacatcatactggattacttaaaaccagaaatgaaactgctggatatagatactggtggtggtgaattcttgttatctctccaccatccttatgtaaaaacaagtgcaaccgaagcctatcccccaaatattcagctatgcaaagaaaccttgctccctctcggaattgattttcgtgcaggtgatggaaaggatatgttgccatttgatgattatgaatttgatattgtcattaatcgtcacggtgattttaataccaaagaaatacatcgtgttttgaaatgtggaggaatttttatcactgaacaggttggggctgaaaatgaccgtgaattagtggaacttctcttagggaaaactgaacttctatttccagaacagtatcttgatatagttaaaaaacgattttgtgatgtaggttttgacattttggatgcacaggaatgcttcagaccaatcaaattttttgatataggtgcacttgtttggtttgcgcatattatagagtgggaatttcctaatttctctgtagataattgcaagaacagattactgtatgcacaacaaattttagagaaaaatggttgtattgaaggaaaaattcatcgttttttattggtactacgcaaggcgaaataaaaattgactataaaaaaacaagggcgaagatgtgtagaagcatcttcgccctcgtatcattaatcctatgaaaaaattatttcattattcacaatctctcttgcacaagcctgtatgttattcatcaatcctatccattccataggctgttttgcttttaactgttctgtcacaccctgcttttgagccatttcttcaatcaatctgtggaacatttgctccgcctgttggttaatatctgcaagatagcggttcagtgttccctcaatcaacattgtggtgtaaacgatgtgcctatgctcttttaggtactgcttgtggtgttgcccccataagccgataggctgtgtttcttcttcggaaagtatcagacaagggatataataatctccctgcaattcataccataagccgttgatttcatcaaaaatgtacttgtccatataataaatcctccagtataatatattcgcacatacgccacagttctccgattgccacattctgttatatcttgttatcagattttcttgcccttgtgtttgcccttatcagcttccaagggaagaataaaacagtgtgaaatcgtataataagttaaggtgagcattttgcgataaaccctttattttcaaggcttttggaggattttattaaaaccctgtgagggttaataaccacttataaaattgtggttttcaaattcaagtttatcgacgaaatgagcataattaaaaatagaatatatgtttgacataaaagcggtggaatgttaatataatatcaaaaggtgctgccgatagacggttagccctgtagataattggtaaaaaataaccgcttggtctggcaggacatggggcggttatttttgtgttttgtcattgctcttagaaccaacggtataaccaagattaaaacaggtaatgcataagctgataatggctataaaaagttccgttgtaagcataagaaaatcctccttttgtagattaatatggattcggcaagaaggattatgagtattgtggacggcatcaagcgcaattccgaggaaactgcgtgaaaaatctgatagcaaagagaaatctcattcaacaaaaggtgaagtacatgaaaagaaaaataaaacgaatacaagcagtatgtatctatatgatgttattattattgttgcttttgccacaaacagcaatggcaaaaaatacagaaaaatccaaaaccacatttccggttcaggtaattcataagactggtgatgataaagaaaactttgtgatcgtgatcatgggagatggctataccgccggtcagcaggatcagtttttggaagatgccacccaaaaggcgcgtggaatgctgacatggtcaccatatagggaatattctgaccgtattaatatttacgctgtgcaggcagtttctaacgagtcaggcattggagtgtatggcggtaagagtccggatacatattttcatgtcaaagtatatggaaaggcacccggatttaccaatggcggagatgaaagagccaaagcgttaaggacagaactggaagaaaattatctggatgaaggcgcaaatgttggaacgattcatatactttgtaatgatacaggaagctatggtgcatcagtaaatccattattttctttttctacaaattctgaggataatagtgatggaatggttatggctcacgagactgcccatagtataggcggactcggcgatgaatatgagagatataccaacaaaccaaatatgtccgacactactgatccggagaaaatcaaatggagtaaaatgttaggatttcgcgggatcggaatcacgaatgcaggaacggataccgcatttgcgccaagccgcgaatgtatgatgcggtggctcggacagccattttgcgaggtctgcaagatggaattggcaagaaagctgaataacacggattatgtcagtaaaccggcggctctttatatcagtgatcctgaagtttccattcctcataacaaaaccgcgacacttgacagagacagtgaaaaatacaggattaccgagtctaatgtcacaaaagccaatgatcatgatctggaatttcgcacggtagtacaaaatatggtgaataaagaacagcatcttaaaatgagttttcgtattatcggcgcagatggaataacggtaaaatatagtgcagaaaaagaatttaccattcctgcccttacaaattcatatgacccggatgctgcaagagagtctctttccgttgtacttaatgatgtgtatggtctgacaaacggtgacagactggatggaaaaatcgtggacatggatacgcaggaagtcttagctacagataaaacagctgaccaggcatggagtaccgtaaacattcattaccggttaaagatggaagacggaacggaaacagatcttcctgctacaaaaacatctattgtccatgcaccacgcaattctacatataccttaagaaatcctgagttatccggttatgcctgtgtgggaaacagtgtggatcaggataagataacgatcacggaagacagcatggacattgtttattattatcaggagaacaatgattcctccggagacgaagatcaggagatagcagagtgtacgacaagaccggttacagtgccgtatgattcaaacaggcatacatttgccattagaccaggggagggtgtgaatcttcgatacagtatgaaggaggacggaccttatacaatagaagaacttccggcttatacagacgcaggtaaatatacaatttattttgaagcatcttctgattctgcaaaatcctgttatgggcaggcatctttggaaattacaaaggctgttacagaactaaagcttcttgcaacgcccgcaggatcagagggtgctggcagcgtaacacttaaagttttaaaacagggaatcagcgcagatgaaccggtggatattacttgcaatgattccagcattacactggttaagaaggaaaatgatcagtggacggtatcacttccgaataagacaaagacatattcttttaccgcaaaatataatggcaataaaaactatgcagggagtgaagctgcctgtcaggttattgtgaaagaaaagaagtcacaaactgggggagggacattgattcccccggaaaaaccgacaccagaagaaccaaccccggagaaaccggcaccagaagaaccgaccccggagaaaccggcaccggagaaaccaacaccagaaaaaccggcaccagagaagccgaatccgggagaaacagaagtggttccaaatgtaacacctgtgccagaacttgaaagcaagacagataaaacaataaagaataagaccgtcacaataaaatgtaaatccaggaaagggaaaaaacaggttttaaaacttgataaatcaacgattaattaccttatcaaaaaagaggcaaaagcactgcaattggaatttggaaatgttgcagttatcatggaccgcaatgccttaaaagaaataaaaaaacagatgaattcagatgtgtattttcatgttaagaaattagataaacgcattctttcttcaaaggcaggtaaaattgtcaaaaaacgtccaatgtatgaaatttcggttacaggtgcaaagaaaaaaacgttaggaaaattgaaaaagggaaaggttaccgtaaagatccattataagatttctaagaaagaaaaaaagaaagatctttttgcgtacaccatcaacaaaaaaggaaatgtcaaaaagatttcaaaatcttattatgattctaagaaacagacagtgaactttacaacaaagagcttttctaaatttgcagtgggcggtcgtttgtgagagtgataaaaagttcctggatcaaaaaatacaggaaaatgcctgaattgcgggaattgtaaccatcagttgacagattgacaggcacatttggtagcctgcaaccggtcaaaatgggtatgatggaggcgtaacaaagatcacatcattgaaaaagaaaagaggatgagttatgattttagctgaaaaaattatggaagagcgaaaaaagaacggatggtcgcaggaagaactggcagagaaactttccgtctccagacaggcggtgtcaaaatgggagagtgcccagtcaataccggatcttcagagggtgatccagctgtcagagattttgggggtgagtacagactaccttttaaaagatgaatgtgagacaccgcagctcattgagggagtggaaccttccaacaaagattttccgttaaaaaaggtttcaatggaagaggcaaatgattttatggaaatccggaagaaaaatgcaccgaagatcgcggctgcagttgcagcctgcatcgtcagtccgtcagttctgatatttttggcaggattatcggagacgcagattggaaatatttccgagggtgtggctgtatcggttggactggtatgcctgcttggatttgtggctgcagcggtatttacatttattttctgcggtatgcagacaaaaagattcgagtttctggaaaacgaatgttttgaaaccgcctatggggtagaagggcttgcaaaggaaaaattaaaaaattatgagggaacctttaccggaggaatcgccgttggcgtggtgctctgcatcgttgcggcaatcccgcttttggtggcagcctgtatggatgcgccggatgttgtatgtaccagctttgtatcgctgcttttaattctggtagcatgtggcgtgtatatgataatccgtgtcggtatgataaaaggaagttatgatattcttttgcaggagggagattatactatttcagaaaagaaactgaaaaagaagtcagatgcatttagcggagcttactggtgtattgccactgcaatttatctgggatggagtttctggacaatgcgttgggattttacatggatcatctggccggtggcaggggtactttttgctgcggtatcaggcattttccgtgcagttatgcaaaatgaaaagaaaaaatagaatgaaatacggatacagggcttcatttcttgcagttttcattctgatgtcatctgcctgtgtaaatggattaatctacaataaagaggtatttgacaaagccggttttacagacacgccgaaatcgatcgatgagtttctgggcattaaaggcagattttactgtttccggttattacagtgtatattattatatgcaggaacagggatttgaacattttcgtagtatctgcttttttgcgattagggagaaaaatcaagaattaggacttcctatttggaaaaagatgtagtataatagccacatcgaaaaattcaattgtcacatcagacatcatttccgcagacgattccaacaggtgaaaaaagtaaggagtttatgaatgagagaaaaatatgagagtttatcattagtcgttttgcgtgatctggcaaaggcacggggactgaagaatatttcttccatgaagaagagcgatttggtcaatcgtatgcttgaagaagatgcacgcaaacaaaaagagacggagagtatgcagacgcaggaagagcgcggggagcgtgtgaaagcaaaagagggcacagagcgttcgaaagatcatgcacagccgaaagaatattccagaaaaaggacggaatatgtaccaagggaacgcggaacagatgcagatcgtcagacaaaagaaaagacagaagagccggtagaaacacaggaaaatcagacggcatctgcagcggcagatgataccatgatgagtcttgacagtggaattacggcaaatggtattttagaggttatgccggatggatacggatttatccgctgtgagaattatcttccgggtgagcatgatgtgtatgtttcaccatcacagatccgaaagtttaatttaaaaacgggagatattgtctgtggtaatacaagaatcaagacacagcaggaaaagttttcggcacttttatatgtgactacaattaacggctatcacccgagtgtagcccagaagagaaaaagttttgaagatctgacaccgatttttccgaatgagaggatacgtttagaacgcccgggatgcagtgttgcgatgcgtattgtagatcttgtttccccgatcggtaagggacagcgtggtatgatcgtttcccagcctaaggcaggaaaaacaacacttttaaaagaaatcgccaaatcagtaacatcaggaaatccgaatatgcacctgatcatccttctgattgatgagagaccagaggaggttacggatatcaaggaagcgattgaaggtgataatgtagaagttatttattctacatttgatgaacttccggaacatcataaacgtgtatcggaaatggtacttggacgtgcaaaacgtctggtagaacacggcaaagatgtcatgatccttcttgacagtatcacaaggcttgcaagggcatataaccttacggttccaccaagtggacgtaccttatccggaggtcttgatccggcggcactccatatgccaaaaagattctttggtgcagcgagaaacatgcgtgagggaggaagccttacaatccttgcgacagcgctggttgataccggaagcaagatggatgatgttgtatttgaggaatttaagggaaccggtaacatggaactcgtgctcgacagaaaactttcggaaaagcgtgtatttccggcaatcgatatcgtgaaatcgggaaccagaagagaagatctgctgcttgattccgaagaacaggaagcagttgacatcatgcggaaggcaatcaatggaatgcgcaaagatgatgccgtggagaatattttgaatatgtttgcacgcaccaaaaataatcgcgaatatattaatatggtaaaaaagaacagaattatttaaaaatatcttgatttttttgaaatcatatgttacactgattaagctgtttatcgggactttcctttggagtaagtaccatatgcggatcgggcatacgggtataaaaggattgaacaggcgaaactaaataacgataagaacataaagaggtgaaaatcatgagagaaggaatccatccagattattatcaggcaacagttacatgtaactgcggtaacacattcgtaacaggttctacaaaagaggatatccacgtagaaatttgttccaaatgccatccgttctacacaggacagcagaaatctgcaagaactgacggacgtatcgataagttcaacaagaagtacggcattaacaaatagtacgcaagtgaacatggttaaagataaggttgaggtttatttaatctcaacctttttttagagcgtcggatgattttattcgttaatttcgtgaagaccgacaggaatggaaaacagtgtgaaaatcttctttttcacacataagaatggagattaacatgagatattccgggattggcggacaggcagtcatggaaggtgtgatgatgaaaaatcaggaaaaatacgccgtagctgtcagaaagccagatggggaaattgcacttgaggtttccgaatataaaggtattataaaaaataagaaaatcagaaacatgccggtcttacgcggtgtgttcagttttatagagtcgttgtacctgggtgttgcaacgttgacgttttccgcttctttttttgaggaagaagaaacggaccagaaagaaaagacaaagaaacagcgtgagaaaaaagtattgacagaagagcagcagaaaagacaggacagcctgatgatgggtggtacggttgcattttccattgttcttgctgtcgcgatatttatgattcttccatattatatatctgtattttttcagaagtttacagattcctatatgctgatcgctgttttagaggggctgatccgtctggcaatttttatcgggtatgtggcagcgatttcgctgatgcctgatattaaacgggtttacatgtatcatggtgcggagcataagtgcattaactgtattgaacatgggatggatcttacggtggagaacgtgagaaagagttccagattacataagcgttgtggaaccagtttcctgctgatcgttatgatcatcagtattttcttttttatgttcatccatgtggattcaagagtgttaagactggtacttcgtcttgtgctgatcccggtgatcgcgggtgtgtcttttgaatttataagacttgcaggacgcagcgataatgcgcttattaatctgctcagtaaaccgggacttctgctgcagcatatcacgacgaaggagccggaggatgacatgatcgaggtggggattgcatctgtggaagctgtgtttgactggaagacttatgtggaagaaataagacaagaggacagtagagaacatgacatatcgggaagcaattaatctcggcgaaaaggttttaaatatggcagatgtggcagatgcaaaaattgatgcatggctgcttttggagatggtctgcaagatcgaccgcagcttttattatctgcatatggaggatgaggtcgctgaggaacagttaagtgaatatgagattgcattgcgcaaacgtgcagaacatgtgccgttacaatatattgtcggtgaagcagagtttatgggattgaaatttaaggtcaattccaatgtgctgattccgagacaggatacggagactctggtggaagaagcattaaaagtcgtaaaaccgggaatgaaagtacttgatatgtgcaccggttccggctgtattattgtcagtattgtgcataatgtaccggaggtggaagggacagcgacggatatttccaaacaggcacttcttgtggcaaaagaaaatgcgaagctgaaccaggtttcggtcacgtttgagcgcagtgatctgtttgacaatgtgacagggacatatgatgtgatcgtttcaaacccgccttatataagaaccggggaagtggtaaaactcatgccggaggtgcaggagtttgaaccgatggaggctttagacggcaaagaggacggtttatatttttatagaaagattatcaaagaatgtaaggcatatctgaaaccgggaggacacattttgtttgagatcggttacgatcagggcgaagcagtgtccgggcttttaaaagaagctggatttaaaaatgtgacggttatcaaagatttggcacacaatgatcgtgttgtgacaggaatggaggatatatgtttgataaattagaggatttactgatccgttttgaggaattaatgagtgaattaagtgagccggatgtggcaaatgatccggtgcgtttccgtaagctgatgaaagagcagagtgacctgactccgatcgtaaatgcatataaggaatataaacagtgcaaacagaacatcgaggattcccttgctttgcttgaggaagagtctgatgaggagatgcgtgaacttgcgaaagaagagttaaacgattctaaggcaagagtggaagagttggaaaaagagttaaagatcttattacttccgaaagacccgaacgatgacaagaacgttatcgttgagatccgcgcaggcgccggcggtgacgaggctgctttatttgctgctgaaatttatcgtatgtatctgcattatgcagaaagcagaaactggaagacggagatcatggaagcagatgaaaccggcatcggcggtatgaagagtgttacttttatgctgagcggacagggagcctactccgttatgaaatatgagtccggtgtacaccgtgtacagcgtgtcccggagacagagtccggcggacgtatccatacttccactatcacagttgcagtgatgccggaggctgaggaagtggatgtgcagatcgatgacaaagatatccgtatcgatgtctgccgtgcatccggtgccggtggccagtgtgtcaatacgacagactctgccgtgcgtctgacacatatcccgaccggaatcgtgatctacagccagacggaaaaatcacagatccagaataaggcaaaagcgttcgccctgctgcgtaccaaattatacgacttagagcagcagaaagcccacgatgcggaagcagagcttcgtaagagtcaggtcggaacaggagaccgttctgagaagatccgtacctacaacttcccacagggacgtgtgacggatcacagaatcaatcttacactgtacaaactcgataagatcatgaacggagatatccaggagatcattgacgcatgtatcgcagcagaccaggcagcgaagctggcgaagatgaatgagaatgcgtaaaaaaaagtcatcggagaatatcctatgaatttaaggaaccagagattacctctggttcctttccgtatattctgtttttattctgagattagccagtcgatcaggttgattgattttatgccatcataggaagaatctatgcctgtatttaaggaaagaacgattttttcatagttatcgctgatttttttgagtggtgctaattcccggctacgaacatcttcacttgtcattgattctgtgacctgaacataaagtttgttgtctgcctttgttgcaataaaatccacttcgaaattaccaactttacctatagaaacatcatagcctcgacgaatcagttcaaagtaaacaatgttttctattgcatgaccgctgtcacgatctctgaatccaagcagatagtttcgaagtccgatatcgacaatatagtatttgccaagagtgcgtaaatattcctttcctttgatatcaaatcttttgatgtcgtagaaaaaatatgactctagaagtgcattcacataagcctgaacagtgtgaacacttggggttccttttcgcttcccgttttcaagaagtccttcatttaccaaggtgttgccgatagaagaaacagagatgttgcttccaatgttatcagcaaggaacatgataatcttttttaaaaggacagggtcagtgatttttttctgacctctgcgactttcacgttcgagaatgtctctcataataacggtagagtagataccttcaagcagcaccagtgctttttcctgatctaagcctatgtcagcaatccctggcatgccgccaaatcgcatatatgcatcgaaaacttcacgaagttcataatgttctcctgctttatcaaagacttgtttgcgtgtaccacccaaagcactcttcatttctcttatttcaaaattatgaaacgttataaattcagagaaagataaaggcagcatctttatttctacacatctgccagataaataagtggcatattcagaggagagcatataggcatttgagcctgtgacataaatatcgcagttgaagtcgacgcggaaagagttaacagcatcctcccagtcaggaacacgctgaacctcatcaaaaaagaggtacattcttttatttggtacgatatgttgtttgacatattcgtagaaagagtcactattcatatttttataagcgtgtgactcaaaattcatttccagaatctgattgtcagtaaccccattttccttcaggtggagagtcattaatttcaacaggctggatttgccacatctacggattccagtaacaaccttcactggttcggtgtcttgaaatgctataatcttattcagatataaatctctttttttgagttcatgagtatcgatcatttgacgtacctccttgtgctagtatagcataaacttatgaaaaaataaagtttgtgcactaaaatgcagaaactttaaaaaaatgacattttttgcattataaaatagctagaaacatataggatggaataacaaatacagagctgcagtatatgtgatgatagtagttatagctgtggaagcaattatttgctccatacatcctccggccaggcagcgaagatgaatgaaaattaaggataaataatttcttaccaaaatccccaattcatgctatattttacttgcacccaagcggtgtatcatgtatgatataatgagcgtaagtgagtcaacatatttgaatgattgacgagcggcgaatgttgatcatgtgctgattttgcacatgatatagcatgagttgttatatgaggaggacagacatcatggaaaacgagaatgtctcaaagaattttatcgaacagtttattgatcaggatatagaggaaggacattgcaaaaccgtccatacaagatttccaccggagccgaacggatatcttcatatcggacatgccaagtccatacttttaaattcaggtcttgcgcagaaatacaatggaaaattcaatttaagatttgacgatacgaacccgacaaaagaaaagacagagtttgttgaggcaatcaaagaggatatcaaatggcttggtgctgactgggaggacagactgttcttcgcgtccgactattttgatcagatgtatgaagcagcagtaaagctgatcaaaaaaggaaaagcatacgtttctgatctgagtgcagatgagatccgtgagtaccgcggtacactgacagaaccgggaaaagaagatcctgcgggcagcagaagtgtggaagagaatcttgctttatttgaagatatgaaaaacggtaaatttgccgacggagagaaagtgctccgcgcaagaatcgatatgacatcttcaaacatcaatatgagggatccggttatttaccgtgtggcgcatatgacacaccacagaaccggagacaaatggtgcatttatccgatgtacgattttgcacatccattagaggatgccattgagggaattacccattcgatctgtacactcgagtttgaggatcacagaccgctgtacaactgggtgatcgatgaggttggcaaagatatgattccggataaggatgagatgccgccgagacagatcgagtttgcaaaattatatttaacaaacgtagtgacaggaaaaagatatatcaagcgtcttgtggaggaaggtatcgtagacggatgggatgatccacgccttgtatcgattgcggcactccgcagaagaggatttacaccggaatccttaaaaatgtttgtggaactctgcggtatttccaaggcaaacagctctgtggattatgccatgttagagtactgtatccgtgaagatttaaagatgaaacgtccccgtatgatggcgatcttagatccggtcaaagttgtgatcgacaactatccggagggagagacagagtatcttgaggtagtcaataaccttgaaaatgaggaacttggtgtgcgtaaagttccattttcacgcgaactttatattgaccgtgaagactttatggaagagccgccaaagaaatatttccgtatgtttccgggcaacgaagtacgtctgatgaacgcatactttgtgacctgcaacagtttcgtaaaagatgaaaatggtgtggtgacggagatccactgtacttatgatccggcatctaaaggtggaaacagcccggacggacgaaaagtaaaaggaaccatccagtgggtatctgcagcacaggcagttccggctgaaattcgtctctatgaaaacattgtagatgaggaaaaaggagtgtataatgaggacggaagtctgaatctgaatccaaattccctcactgttttaaaaaactgtgttgttgaggaaaatttaaaagatgcaaaagcatatgacagtttccagttcgtaagacagggatttttctgtgtggatgcgaaagattcgaccgcagatcatctggtatttaaccggatcgtttcacttaagagctcatttaaactgcctaatgcatagcattgtaatgatttgcatttttgccctgaaacgggcgtaacaggaaaggatatgaaatacaaatgaatttatttgcaggattggaaaaatttggtattaaagcagataacacaacggatctgtttgaggatgaaaaaaagccggcagcatccgctgatggtggaaaaacagaggctgctccgacagaggacagttttctgttagacaaggcaatccgttgtactgtttgtgacaaggtatttaagacaaaaatgatcaagaacggacgaatcaaacgtttagagccggatctggatctgcgtccgcgtttcgaatacattgacactttaaaatatgatgtggcatcctgcccgtattgcggatatacagcgatgaaccgttatttcgagcatgtgacatcaggacagatcaaactgatcaaggaacaggtttgtgccaatttcaaaccaacaggttccgatgaacctgccgtcttagactatgatcaggcaatcgagcgttataagcttgcacttttcaatacgatcgtcaaaaaaggaaagaccagtgagaaggcctattcatgtttaaaactttcctggctgtatcgtgggaaggcagaggagttaaaaggaacagatccggagaccttaaagaagaaaaaagaggcaaaagagcaggaagaggcattttaccagcaggcatatgagggatttatgaaagcaatgtctacagagatgtttccaatgtgtggaatggatcagtgtaccgtagattatcttcttgcggcaatggcatatcatttcaaaaaatatgatgtggcttctaagtgtatttcaagaatccaggctacaccttctgcatcgaaaaagatgaaagaccgtgcatatgatttaaaagaaaagatcgtggcagagatcaaaaacagcaaataggcaaaattattatgattgaaataatgattgatttacaggggggagcgaaagctcccctctatgaaaaaatatacgaatatatcaaacgggatgtcattgagggaaaaattcctgttggggaaaagcttccgtcgacaagacttttggcaaagcatttgtcggtaagcagaagtaccgtcgaaatggcatatgaacagctccttgcagagggatacatcaaagcagaaccttgcaggggtttttttgtgtgtgatattacagagctgtatgagtttgggcatatagaaaaagatttcaaacatacatttacatttggaaaaaaagagcaggaagagacagcttgcagccatgttattgatttttccccatatgcaatcgataccatgcatttcccatataatgtgtggagaaaattaaacaaaaatgcactgttagatgacagggaagaattgctgttatccggggatggacagggggactatgggcttcgaaaggcgattgcagcatatctgcatcaggcgcgaggtgtgaactgtcagcccgatcagctgatcatcggagcaggaaatgaatatcttgagattttactgacacagattttaggaagaaataagcgggttctcatggaaaatccaacttatttgcaggcatatcatacatttttaaatatgggatatcagatgatgcttgtttcggtggaagaagatggaatagatccacaaaaggtcagaaattatgatccggatgttgtctatatcatgccttcccatcagttccctcttggaacggtcatgccgttaaaacaaaggctggaattgttgaaatgggcattggagaaagaggaacgctatctgatcgaggacgatcacgacagtgagtaccgttaccgtggaaagccgatcccgtcgctgcaaagcgtggatcattttgaaaaagtgatttatattggaactttttctaagagcattgcgccgtcacttcgaatcagttatatggtgcttccaccggaattgttaaaacgttatcatgaaaaatgtggattttattctacgaccgttcccaaaattcagcaggagatactgcgtgcctttattgaagagggacattttgaacgtcatttgaataagatgagggggatctaccgtgcaaaacatgatttcctgcttgcagagttaaaaaagagaagctgggtagaaaaaatttacggagatcatgcaggactgcatgttttagtacaggtaaacactgaaaaaaaagaaacagaggtatgtgatctggcggaaaaacaaggaatccgtatctatggaatcagtgaatatgttgtacggaaatcggagcagagctgtaatgaaactgtgagaaataaaaatgcttccatagaaagtgaaaaaaacaattttgccggaactgtaccgcataaaccgattcttttacttggctatggaagactgggtgaagatgagatccagaaaggtcttttgatattagatactattatatgatatattcaatactgttttccggtgtttttcgggtgtttgtattgaacaggatcactgcttctcgttccttatatggtcccatttcataaaaaccgacgccggtgccggaaagccgtgtgatggagatcaggcggttggcacgttttggctgatctgtgataaaggtgatgccttcctcaaagaattctttgtcgagttccggatcatccggttcttcataataaggatcgaacacatagatatcactgcccgaaataccggtcagaagaatataatgaggaacttccaggtaaacacgcagcaaaacggcaccgccctgctgtaaggcaccgataatgcggctgttttcagagagtacaacctcgtccttagcgagaaaattgcaggagatcgggaagttttttacctgtccgaactgtgtgatccagttgctcaaaaacatcatggcagatgcggatgtaccgcgttttccaacttcgcctgcttcattataagaatcaagacaatagagcataatatatttgacgatatccgggtaaatttcttcgcggtcaaagagatagcggatggcatttgtcagtgtggtcggaccgcagtcatattcggtggattggtaaattagcagattcttcatgtgtattgcctcttttctttattctaagcaatactataatcagccatgaattttttgtcaatctttcaacaaaaaaggattgacaatttaaaacatagaaaatataatttacctaattcctagtggattactagaaataatatgcgaaaagtactattatatatgctaaaagcgggcatacgggagtttttcgcagaaagtgaggaaattatgagaaaagaaagaagatggaaaaaggtcctgtcagcactggtgctcgcagctgcgatgggagttacggctgttggatgtggaacttccggcggcaatacaggcagtcagccgcagggggaaaatgcggcggcaacagagacagcagaggtttcggatgatattgtaaatatcggtgtgaccaatacacttggaacgttaaatccgcttttgatggatggcggagagaccaataaatatgcgaccagcctgatgtttcttccactggtagaattaaattcgaatctggaatttgagggagaaatcgcggattctgttacgacggaagataacaaaaattttatcgtgcatatcgatgagaaagcatcctggtcggatggcgagaagatcacggcggatgatgtcgtatacacggcactgcgcctgacatcgccagtcattggcaatacttccatgatgtattatgtatttgagggtgtgggcgatgacggctttaccgaggagggagcagagagcattgatggtatcaaagcgatcgatgatgcgaccgtacagttcaccacaaaagaggagatgtctctgaccacatttgagaattcttatgcgcgttatctgatgacacttccaaaacatgtgatcgagcagtacacggaagaagagttaaagactgcagaatggttcaatcacccggatgtcgtcagcggaccatatatggtaacagatttcgatgtcgaccattatatttcttataaagcaaatgaaaattattggaaaggtgcaccgaagatcgcaaaactcaatatcaagatcgtgagcggcagccagctttatgcaggattacagtccggcgagattgatattacacagccgacaatgagtgtcatcccggaggaagattatgatagtgttgaggcactttccaatgtaaatgttgtatacggagaaccggtgaccaaccagtccgtatttatccagacaaaaaatgttccggatgtgcgtgtgcgtcaggcaatgttatatgcaatcgaccgtaagatggtattagaacagcttttaaaaggaaaaggggaagttgcagatggatttctgtcttctgcaagtcctttctatgatgacagtatcgttccggtagagcaggatgtagagaaagcaaaagaactgttagcggaagccggatgggacggatcacagaccttacgcttttatgtgaactctggtgacagtgcatttgtaaatgctgcgaatgtatttgtggcacagtgggctgcagtcggcattaaagtggaagtgcagactgtagattttgcaacactgatgtccgtcgcaggcaccaatgactatgatattttagcagtacagtacacctatgcaccggttgatccatatccggatgtggcatggctgttaggcggcgaggacagctggaccggatacggggatgacagcgtcaatgaagcacttgcaaagacacagacaacaagtgatatggatgagatcaaagggctttactccgttgtggatcagaaggtacaggaagatgttccgatgttctctgcttatattgtcagcgcacaggctgctgtcaacaaacgtctttcaaatgccacaccaagtgtgtacggtttctttaacaatgtggaacagtgggaaattacgaaataaggaacgggaaaatcaatgtcaaaattattacaggtaaatgatctgaccacagagtttaccggggatttttggaaaaaaatcagtgtggatcatgtcagttttgatgtcgcagaaggagagacggtttgtatcgttggtgagtccggctgtggcaagagtgtgacatcactgtctattatgggattattaggaaggggcggagctgtcgttgacggctctgtcctctttgcaaacaaaaatctgctggatatggatgaaaaacagttagatacgatccgcggaaatcagatgacgatgatttttcaggatcctttaacatcgttaaacccggtgtttacgatcggaagccagatcacggagagcatccggattcatatgcatctgccaaaaaaagaagcaggagagcgtgcggtcacgatcttagagaaagtcggtatgccggatgcgcgtgctgcaatgaaaaaatatccgcatatgctttccggcggaatgcgtcagcgagtgatgatcgcgatggcactttgctgtaatccaaaacttttgatcgcagatgagccgacgacggcacttgacgtgacgatccaggcgcagatcatggaactgatacgggatctgcaaaaagagattgggatgtctgtgatcctgatcacacacgatatcggacttgtggcgcagatggcggaccgtgtgtttgtcatgtatgcgggacagatcatcgagatggcatctgtgaaggatcttttttatcatccggcacatccgtatacgaaagcactgcttgatacggttccgggcatttacgatgagagcggaaggacgcttgcatcgattccgggaatcgtaccggaaaattatgaccagattccgggatgcaggtttgcggaccgctgtgcatttgccggggaaggctgtgaaaagaagcaggagatgagggagatagaaaaggatcatttcgtgcgctgccataaggctgacaggagttaaaacaggaatggataaagaactgatcagagtagagaatttaaaaaaatattatgatatcaagggcggtatcattacccataccgtcagtcagatacaggccgtggacggcattgatttttcaataaaaaagggcgagacccttggactggttggagaatcaggctgtggaaagtccacgatcggccagcttttggtgggactgctctcgccgactgacggtgcgatttattatcatggggaaaaaataggtggaaaatctctcacacgcggtgaaaaaaaggcacgaaaacaggcgggaaccaatcttcagatgatctttcaggattcctattcttcactcaatccacgaaaacatatttatgatattttagcacagccgatgctatatcatggtgtatccgataagaaaatgatcgatacagacttaaaacagcttctggatatggttggtctgcctcaaagtgcacttctaaaatacccgcatgaattttcaggtggtcagagacagcgtatcggaattgcaaaagcgttgtccttaaagccggagtttatcgtgtgtgacgaaccggtcagtgcgcttgatgtgtcgatccaggcacagatattaaacctgatccgcgagctgcagaacgaactgggactgacgagtctgttcgtcggtcatgggcttggtgcagtccgttatgtcagtgaccggatcgcagtcatgtatctgggaaagatcgttgagattgcagatgccggagaggtatttatgcatccggtacatccgtatacaaaagcactgacacaggcagcaccggttgcagatccgggacggcgggaagaaaagtcagccgttttgacaggtgaggttgcctctgcagtacatccgccgaagggatgcaggtttcatccgagatgcccgtatgcgagagaagactgcagtgtgagtgagccgatgcttctgccgatggcggaaaaaccggatcatctggtggcgtgtccttattacgaggggacagaaactgcgtaacatacattttttcatccaggaatgaggaatattatgacgaaatatattatcaaacgaatcctgatcgcaattccggttttgctcggcattaccgtgatcgattatgcgattatgtgcatggcggggagtccgcttgaaatgctgcagggaccacgcgtctcggaggctgctgtacaggcaaaagcgatagcattagggctcgacaaaccattttatgtacagtattttgtatggctggggcagcttctgcatggaaatatgggatattccattaaaaattaccagccggttgctgctatgatcacgagtcatcttggaccgaccctgcttctgatgggagtgtcactgcttgtcagcatcctgcttgcggttccggcagggatctacagcgcaatccatcagtattcgaaaggcgattatacggtggtaacattatcgttccttggcagcagtattccgggatttttccttgccatgctccttatttatctgtttacggtaaaattgggctggctgccttccggaggaatgacgacacttggaacatccgggggagcggcggacgtggcggtacacatggttatgccggtcattgtgcttgcagtttccatggcaggaaccaatatccgatatatccgcagcgcggtgcttgaaattttacagcaggattatctgcgcacagcgcgggcaaagggaatcggtcatttcctggtcatcaataaacatgcgctgcgcaacgctttagttccgatcgtgacagtcattggaatggagataccggtactgtttggcggatcgatcatcgtggagcaggtcttttcctggccgggtcttggacttatgacaatgagtgcgatcacaaaccgtgattatccggtcatcatgggcgtctgtctgctctcggcgatcgtggtactgctcggcaatcttctgacggatattttatatgcggtggtagatccgacgataaaacttcagtaaagaggttgaacttatatgagaaaaaagaaaaaagttaatgcaaatgaaacatacatgcagactgtgatgcggcgtttccgcgcacatcatcttgcaaagatcagccttgtgatactggtggttgtcggtctggctgctctgtttgcgccggttgttgcgccttatgatccggatgcgatcgtcggaactttcagcggtgcaccgtgtaaggaatttatccttggaacggatcagatcggcagggatgtgttcagcagacttttatacgcaaccagaatttctctgcttgtaggaatccttgcaacagtgatctccacggtaatcggagtggtactcggtctgatcgcgggatattttggcggtgtggcggatatgatcctgatgcgttttacggatatggtgatgtcatttccttatatccttcttgtgctcgttgcggctgcaatctttaaaccgggtttgtggagcattatcctgatccttggatttgtagactggccgggtgtggcgagactggtgcgtggaaatgttttaagtctgcgtgaaacaaattttgtcaagggaaatgtggtggcagggatgccgcttcgtcatatcttattttcagaaattttaccaaacacagttgcaccgatcctcgtatatgcaacatctgttatggcgatctccatgctggatgaggcggctttaagtttccttggcatgggtgtacagccgccgatggcaagccttggaaatatgttaaacggggcgcagtctatcacggtattgacttcacagccgtggctgtggcttccaccgggaattatgatcgttgtgctggtagtttccatcaactttgtcggcgatgcattgcgtgatgcatttgatccatccggtggacgcaggtaggcggcggatgaaagcgaataaaaatttaaaccacagaaatgatgagagggataacagatagaacgtttgcggagcatgcaggcgatcgtttgttataatagacggcgttgcgggcagaacgtgagaatgtgtagaaatggagaagagtatggaacgaaaggcattagaacagaaacttaccggtttttttgaggaacttcatatgcatccggagctgtcttatgaggaatatgagacgacagagcggatcaaacgggaacttgcggcggcaggcattgagattttgcagataccgctaaagaccggtgtgaccgccatcgtgcgcggcgcaaaaccgggaaaaacttatggactgcgctgtgacattgatgcactgccgatcgaggaggaaaccgatcttccctataa

SEQ ID NO: 5124 - DNA, 40092 bp, Unknown
  gut microbiota DNA sequence
ggtcttaaaaaaagaccgtgcagaatgtgaaaaagaggcactttcccttttagagaaagtcggactctccgataagcgcgacgcttatccgggacagctctccggcggccagcagcagagaatcgccatcgcaagggcactcgccatgaaaccggaactacttctttttgatgagcctaccagcgccttagacccggaacttgaagtggaagttttaaatatcatccgcagactggttgacgagaaacagaccatcgtgatcattacacacaagatgtctttcgcaagagaagtggcagataaagttgttttcttcgatgagggaaaaatcttaaaagagggaacttacaccgaacttgagcagagtaacattccaaggatcacacagttcttaaatatgttgaactaaacaatagacctcctcacaggaaacctgttgtcatgaataagtaaaaaatccgtgcaggatcagttttgatccgcacggattttttgctgtcagccttatctacgctccagataatcattattatgataaatctttttattttccacagcgcactgcatttgaagcagttcctttcaccgatgtttttccggcattttttacggctcttactttatagtaatatgtttttcctttcttcgctttgccgtctgtgtaagaaacaatagtgccctttttcagcgtctttatcttttgatattttccttttttggatgttgcacggtagatctcgtatccatctgcaccttttaccttcttccaggttaattttaccttggacttcacacgttttgccttaaccgcagtcaccttctgcggactggtcgcagccttaatcacattggagtactttccggttaccgtctttttaccgcttttcctgtatgcacgcactttatactgataaaccgttgctgttttgagctttttatccgtataggtattagtttttaccgttgcaaccttctgatattttttcgttgatttgttataacggtatacctgataaccatctgctttctttacttttttccatgttaagcggatggaagtcttcgttgccccggactgtttgaagccggaaacctgtgcaactgtcgttttatctgtattacccggtttctctgtatctcccggtttctctgtatctcccggtttctccgtatctcccggtttttctgtatctcccggtttctctgtatctcccggtttctctgtatctcccggtttctgtcctccggacacgagtgactgatctgtcagtacatatccaccttctgtcacatttaactttgattcatccacatttacaaagcggatatcatcaaaaacaattttcgactggatatcaaccccatttccgtcttctgaaatgctgttacaccagattgcaaacttcgtaacattctttggatcaaaagttccattctgtttaccctttaatttgttaaatgggatcgtaacatattttgcctctgtcgtctttacaaagtcagtcagaaatacttcgaaatcctctccaccggaaacaagctgaactaccagtttctgtccttttccatccggttttacccacatgctgaccgcattgtattcgctgtaatcgtttgtgcttaaacctttcatacgtccggtccatacttccggtccgctcgtcttaagctgataagtaaatgcacctccgtaaacaccttctgctttatgatccttatctaatacaaaggaagaactgcagtttgctgctgaattttctgtaaaagttccattcaggtagtcattgtcatcatagtataattcaaaattttcaatgacattctttgcaagtgtttccttttcttttccaaaactgatataggaaacagtcacaagtgttttgccatctgccacaaggctgatcttaccggtatccgttgttccaagtgcactcagaatatccgcagacagcacaccttcgtaagcaccggatttttccgttttctctgccgtgatcgttttttctgtatttgtatccgggtttgtcagcacaaaacttacactctgtgcatttctcacatttgcttttaaagtaaatgcacttgtgattgccatcttagagaaaacattggcaaaataacctgctgcatttccctgatttgcatttcttacttctttctggtctgcatttccgtaaaagtttgttccattcgcaaaaacagaagatttttcattgtagaattcaataaactcgttgatcagttcctgtccgtgggtatcatcatatttatatgggacataaaagttggtgtctccaaaatttgcccacagtaagaagtacggcattccggtgtcaactgccacctgattaacctgtttgtaccagttgtgtcctgcgatcggatttccttttactaaaattccttcattatccgatccatcggctttcatcacccttacaccggtttcggaaattgcagctacttttccttttgcgtctgcaatattctttaccacctgacaggttttctttaaattatccacaaactcgccggaatattctgccggataagtattgtaatcatcatagtaatcaaatgcaacgatatccacacagtcatcgcccggatagcggtccatatactcttcctctgaagttaacggaccatttggggaatatacataaataaagttgtgtactccctttgatgccagataatcctgtatgtactggaacagcgcacggtatgtctctttatcggttgtcgcagcaccccaccagaaccatccgcctgtattttcatggaatggacggaataaaacaggaatatcgccaagtccgtttgcgtaatctgcaatgatatcaagataggttgtaaactgcgcattgtattttccacccggaagtacttctgcggagcagttattgctcaggtcttttgcctccgaaaaatcacactgtgaaaaatcatattttctcgccgcatccggtgttgcaatgattttttcattgctcatattcggcatatgggtggataatgtgatgatcgcaccctctgcagctgctgccttgctgatctcgatagatttctgaactgcatcatctacgttatcaattccaagttccccgcctgtcagtgccagcgaatcgattccgaccagaccactaatacttccggtcacgtcctttgtatccgaatagacaccgtctctggttgaaacatgcttgcttgtgtcattctgatgtccgaataatacctggtcagcagcatccagtccttttaaatatgcatataacgcttttgctgaacctgatgcattcacatccgaaagtgttacttcttccggcatactggacgtatctgcaagcacagcctctcctgccgtctctgtgatctccgtataatcgcccgctgcattatactgggataaagtcaggttatccagatatacgcttcccaaaaaggcagtgctcacaccaactgttccaatcatcagatccgtgatctttgcagtgtttggtgagaatttgacagtgaccactgctttcttatatccgtcaccgagatctgacgtttcgatctttgcttctttgttgatgatctccacatcatctgctccgttttttgcaaaaatctttgccttaaaagaaccgtcaaaagcttccggatagatcatttcatagcttaaaacattataagccgatacatcgagtccttctgcaaacgactttttaatctttgcctcactccatgtaaaaccttcacaaccggtataatcaagatctgcctttaacattttgcttccctgaaattcagctacactgattcctaccgcattgtcgtactgccagccgccttcctgctcccagcctgcactgcttcctgtctctgcagattcaaaatcatcgatcacactcggatcttttgcaggcagttccggctgcgcttctgccacaccgcttaatgtaacattggaaaatgtacatgttcctgaaaaaccctgaccaatcagtcggaaatatacaccttttaaatcatctgcatccttatcctcaaacttgatcgtaatcgttgttttgtgtgtatcttctgaaaaactgctctgctgtaaatacgggatatcctgactgtctgtccatgtccactcacttcccagcttcacgataccctgaacttttaagtaactttccccggtacccaatgatgcgtacgcctcatcatccagtgtaatatctgccttcattgtgaaatctttcgttgtcacacaatctgcaatactttcatcataagtgatcattggcggattatcccaatcctctgttgcaagatccagtttgtcttttgttactgtgtttgtcccggtataaaacacactcgcttctgccgcatagacatactcgtatccccctgcaaaattgccgcttgaaaacgcaactgcagccgctaaaagagcggctgcaagtcgttttcccataaaacgttttctcataaacttacctccaatacatttattagctttatgcactttgttttttaattatatgttacttcaaaaaacattgtcaattaagcatatattagtttgtaaattttcagagtttttacttaatttttgcttttttaagttgttttatgagattaaaattgtatacttttactttataaattcagataataaattttactctaactcaatccagtctaatttcaattccggtgtcacatactctgctttcagttcataataccccggcataaatttcacacggcacatccgctgtgtcaggaaacgctctccggttccacctgtctggacggttgccatcagttctccattcagatacagattggcagctccctgtgctaatccttccaccgggaaacagaaatgtgcattaacgtttaaaatgctttctttttccacataaaggactgtattttcaaactttcctgcctcgatacggcttccgctctgcagtgcacagacctgctttccgtctgtatttactgcttcttttgcagtaactgtaagcagtggatcaaaatcttttaacggacgtttcatcacaggtgttccaagcaggaaacggcagatgtttttcgcacagcgctgtaactctccaacagtgagttttcctgcctccagtgcctctaaggtatcatcgcctactgcattgatggcagcaccattattgttgactaccatgtataagtcattctgtgcgcgaaccatgaatgaggtgtatctgcggtctgcctccccgccgtttacaacatcattcatcttcgcccaccagtctgtcataacaattccctgatatccccactcaccacgcaggatcgtcgtatttaagtcataattggatgccgtccagtgtccgttgaccgggttgtaagaggtcatgatcgaatttgcatttccctctttcacggcaatctcaaagcctttcagatagatttcacggagtgcccgctcagatacaacggagtttacattatgtctttccgtctcctgattattcgctgcaaaatgtttcacggtcgcagaagaaccggcacttcggattccccttgtcattgccgccgcaaactgtcctgtcacaagcggatcttcactgaaatactcaaagttacgtccatttaatggatagcggtggatattgattcccggtccaagcagggtgtcgatctcgtttccaactaattccctgccttccatctgatataattcttccatcattggaatattaaaggaacatgcaaggagtgttccgatcgggagttgtgttgcctttaatccgctctccatacggatgccggacgggccatcggatgcgcaggcgatcgggataccgtaaccgtgcaggctgtcgctgacaccgccaaatgcggatgctgtacccggtgttaccttcgggctgctcattccctcgccgcggacgatcacggctaactcctcattggtaaactgtgctacaaatgcgtccaattcttcttccacactgctgccatttttgatattctctgcaaccgcctgtaaggtaattcctttatttccggtctgtggcagttcttttggcagacggcttttgatccgctctgccagatcaaccatctgctgtggtgctttttcatatgcacgggcaaacaccccgtcctccttttgcctgcctgtcttaagacgcaaaaattcttttgtcggcgcaagcgcctccttcagttcctctgtgacaacgcaggaagcaatctcatagccgccttttccgtccacattggctttttctgtgcatctgacactgtttccaacgtagatctcatacagaccttcctctaagacatagcaggacttatgaccagtcacaccgctgtcgtcataggaagcaaaccggcttaccggaatggtaagttcaagaacttcctcctcgcccggagcaagcagttttgtctttgcaaatccgcacaatacctttgccggttttccaagctgtccctgtggggcggacacataaacctgggcagcctcttttccggctgctgacccggtatttttcacacggatactgagtgcgatctttgcatcttttccatttcctgtactctccgcttttaccgtctccatggaaaattccgtataagataaaccgaaaccaaactcatacattactttttccggtgcgaatgtctcaaaataacggtagccgacatagatatcttccgcataaatattttctgtcttacttccaaaatggtccgctgccgggtaatcagaaagtttctctgcgatcgtatccgtcagttttccggatggtgtcactctgcccgataacagatctgcaacggcgttcgcgccttccattcctccatgccagatgtaaagaatcgctttgatgtgatcctgatatgctgcatctttcgtccaactcatatcaatgatattagacacatttaaaagcactgccacttcgttaaaatattttgttacgatgcgaagattttctttctcccgttttgtcagaagataactgccttccgtgtcctcgtaatctttatcctcaccggcagttcttccgatcagaaaaatagctttttcagacttttctgctgcgcggcatgcgatctcgtcggtgatttccatctcttcctgatgccacggctctgccgcccagccaccgcctccgttgtcaaacggatgctcctttaaccattctttataggtttctaccagttcctcatttacagggaaagcattgttttctttgattccgtctaaaatatttttgacatacggcacattaaccgctccacctgaaccggttccactccggtaatactcaatctggcttcttccgaaaatagaaactgtctcatcctttttgatcggaagcatatgcccctcattctttaaaagcacggctccctctgctgctgcctctctgcagtatgctgccagttccggcagcggaacaccgattccactgttacccatgataatcctccattttaatctccattcttgcgctgtctttcaatgaaaacaacgttttcatttgcatctcaagtttgtgcgtaagcacaaatcttgcgtgtgaaaaatcttatttttcacactaacaactgtatattgcgctttatttatttaggatcaatactgtgtcgccaggttctacttcctgatctgtcactgtttccactgtctgataatctgatgtattgcacacaaccacaggcgtgatcacgtcataaccggctttttttactgcatcaagatcagcctctatcaacagttctccctttttcacagaatcaccattgcctttatatgcagtaaaatgttctccctttaatgcaaccgtatcaagtcctatgtgtatgagcagttctacaccttctgaagtcgtcatacttactgcatgcatcgtatcaaataacatctcaatcgtaccatcggccggtgcatatatcctgccttccgcaggaataattgcaacaccttttcctaaaatctcctctccaaaagttggatcacttacattactgatcgcaaccgtttttccttttactggtgaacctatctcaatccctttttcttttttcttaaaaaaatcaaacatttccacacctcttttctgctgtattattgtcaggtttatcctgccatacacacacgttttatatgtatcgccagaaacatgatttcctcgctggcaattccgctgccatattccttttcaatatattcagcaatatgtttactgcattcatattccttcggatacttattttccatcatccttgcaaattcaatctcctcatctttcaacaattcatgccggtaaaggcgctgtaccaaaaacttaagatgagtgataaatctctcataatgcagagattcctcatcaaactcaattcccatttccagcctgaccagttctaaaatcttctgaatcatattcgtcatttcaaatgtatcattgatcgtcgtgttgtattctgcattcacaaaatgcagggctataaatcctgcttcatcttccgtaaactctgtacccagcttctcattcaaaagatcaactgcatattttcccatcagatattcctgatggtaaaacttcttagtctcccaaagtaatgcattcttcaattgaatcccctgcgactgtctctggattgcaaaattaatatgatctgtcaaagtgatgtatatattctgattcagttgtacattcagattctttattgcgtaggatataatatcactggtaagctgcatgtgctctaatggaatattttctaaaagttcctgaaactgtctggaaagattctcattctcaatacgaaaaaccttctcgattttgctttcatcaatcagttctcccgtatgcgccttaaacccgattcccttacccatgataacaatttcctgctgattcacatcatatgctgatattacattgttattaatcactttctggataaccatattccactccgtttttgtccctaaaaatttaaaaaaaccaaattttacaaaatctaagccagatatgtaaaatttggttttgcctgcttaccagtaacaatccaatgtactctgtttctatctaaataaattgtagcattcattgtttattatgtcaagttttattcttattatttttgtttttttgttaatatccaccatacttttttcaaaaacctgtacacaataactaattatctcacaaatttgtttcaaagaaagattttaatgcatcatatgccgcatcttcgtcagcaccttccactgttatagtcacagtctggtctttttttactcccatactcataactgccatcagacgggttgcatcaattacttttccgtctttttcgagagttactttacttttaaaatttttaacctcttttacgagcattcccgccggtcttgcatgaatacccaactcgtcctttactgtgtaactgaatgatttcattttaatttcctcctatgcttagattatgcatttattattttatttcttacaggcagcaccattgcaggtgataccgataattcatcaatacccattttcacaaatgtttctgtcaaagtcaggtctgctccaagttctccgcaaattcctgcccagattccttcttcatgggcactgtcaataaccatctggatcattttgagtactgccggatgatgtgaatcatagaaacggtcaagttttgcattctgcctgtcaatagcaagcgtatactgtgtcaggtcattggttccaatactaaagaaatccacctcttttgctagatcatctgcgatcataactgctgcaggagtctcgatcataactccaaattcaacttctttatatggcaatccctctgttgacaattccgttttcacttcctccatgatttcttttacttttttcacttcccatacagatgcgatcataggaaccataatggaaatattgccaaacatgcttgcacgcagcaacgctcttaactgtgttttaaaaatttccggccggttcaggcagattcttactgcacgatatcccaatgccggattatcctcacgatcaagcccaaaataatctatctgcttgtctgctccgatatctaatgtgcggatgatcaccttttttccagccatcacttctgcaaccgttttataggcctggaactgttcttcctctgttggaaaatgatcactctgcaaatataaaaactcacttctgaaaagtccgattccggctgcatcattctgtaaaacagctcctaaatcttttacctcaccaatattagcatagagtttgatctcttttccatcttttgtaacagtcggttttccctttaactgctgtaataattcctgacgtttcttctcattctgctgttttttctcgtattcttttaatatttcttcctctggatcaaggatcaaaatacccttaaatccatctataattgcatactttccattcacttcttttggaattgccgctgataccaatgccggaatattcatcgttctggcaagaatggctgtatgagaattggtagagccttgtcttgtcacaaatgcaagcactctctcccgttctaactgaattgtctcgctcggagcaaggtcgtccgctgctataatatatttttcttcatcggccgcatgcacagtttcttccttccgggataaaatacggatcacacgttcagaaatatcttttacatctgctgcacgttctttcatataatcatcatccatatccgcaaacatccttgcaaaattatctcccgtcgtcgctacagcaaattctgcgttcacagactgcgctactatgatattacgaatagaatccagataatcttcatcctctaacatcatctgatgtacttcaaaaattgctgcatttgcttcaccaacttctttgactgccttgtcataaagtgcctttaattcttctgttgcctgatttttggctgctctaaaacgtgaaatttctgcctgtgtgtcatcaattttcacacgtcttaccacattgttttctttaaaaacttctttgatttttccaatcgcaattcctccgaatgcaatctttccattaatttgctgcatttgttttcccccctctaaacaacaagtcacattgctccacagcatctgcattcaaaatcaaaaaaaccgaaaaagcacacgcaatcataagcgtcttactttttcggtttagtacatttgcatgtgaactaccctcaatatatatttttattatacgtttttaccctgtttttgtcaatatacaatttcgcattatgctaattatatactttgtatacaattatgatataattttcgacatattttcacagatatatcttattcttattggaatgcctgctatctgttccatgctccagttataatcctgtattcaaaagtttatcttatcaccagcttctgacttacaaaaaagcccgaaaaagcttatacctttccgggctttggaaatttacatcaattcagacaagatctgcagcttatttgtaaagctcaaccagtctctgtaagtgctcataacgagcctttgcagcttcctcagatgcagcaaagagtttctgtgctctctctgggaaagatcttgtcagacggctgtaacgtgtttcgttgttcaggaaatcctggtaagaaccatcgcctggcttagatgtcagagtgaatgggttctttccttctgccttcagtgcaggattgaaggagaataagttccagtaaccagcagctactgctttcttcatctcatcctggcagtggttcattccaccttttacaccgtgtaactcacatggagcataaccgatgattaaggacggtccgttgtaagcttctgcctctgctaaaactttaacagcctgagccatgtttgcaccaagagcgatctgtgctacgtatacataaccatagctcatagcgatctctgcaagactcttcttgccgatgtctttaccagcagcagcgaactgacaaacttcaccgatgttggaagctttagaagcctgaccacctgtattggagtacatctcagtatcgaataccataacatttacgttatgtccggaagcaagaacatgatctaatccgccgaatccgatatcgtatgcccaaccatcaccaccgaagatccatacggacttcttagcgaggtaatctttcttatcaagagctgccttagcgtctgggcatccagctgctgcagctttctctaactctgctacaagagcttctgttgcaggtgtatttgcttttgtatcgttctttgtctcaacaaatttatcaaatgcagcctttaactcagcgcttgctttgtcagaagcagcacatttctcagcgcttgcgatagcctgatcacgtaatacttcctgaccaatctgcatacctaaaccatgctcagcgttatcctcgaataaggagttagcccaggccggtccttttttgctgtctttgtttactgtatatggtgatgtagcagccggaccaccccagatagaggaacatcctgttgcgttggagatgtacatatgctcaccaaataactgagtaattaaacgagcgtatgatgtctctgcacatcctgcacaagaacctgagaactcaagtaatggctggttgaactgagaaccttttacagtgttatctgccggcataccaggtttcttgcttacgttagcaactaagtaatcgaatactggctgctcgtctgcctgagattcctgtggaaccatctcgatagcaccaaccggacatactgtgatacactcgccgcatcccatacagtctaatggagatacgctcattgtgtatttgtactcgcttgcctttggttttgtatcagcaactttgatattggaaggagctgcttttacttcatcctcacttaacatgaacggacggattgttgcatgagaacatacaaatgcacactggttacactggatacatttctctgcattccatgtaggaactgttacagctgtaccacgtttctcgtatgctgctgcaccatgctcaaactgaccatccgggttgcccataaatgcggaaaccggtaatgaatcaccatccattaaggaaatcgggttcattaagtcttctaccatcttaactgtctctggacgacctgttaatttcttaggagccggatctgctgccgggttagaccaggaagccggaacctctactttatgaactgcatcaacaccagcgtcgattgctttgtagttcatctctacgactgcatcacccttcttaccataggatttcttagcagcctgtttcatgaaatctacagcctcttcgattggcattacgtttgctaatttgaagaatgcggactgtaagattgtgtttgtacgtttacccataccgatctcgatagctttatcgatagcgttgatggtgtataactgaatgttgttgtcagcgatgtatttcttagcagcagcatttaaatgatgctctaattcttcatctgaccactggcagttgatcatgaatactccgcctggttttacatcctgtaccatcttgaatccttttgttacataagatgggttgtggcatgctacgaagtcagcctgattgatgtaatacgggcttctgattggcttgtcaccaaatcttaagtgagaaattgtgataccaccagttttcttagagtcatactggaagtatgcctggatgtatttatctgtgtggtcaccgatgatcttggtagagttcttgttagcacctacagtaccatctccgccgagaccccagaatttacactcaactgtaccttctgctgcagtgattggagccggttttacttccggtaagcttaagtttgtaacatcatcaacgataccgatagtaaatctgctctttggagcatctttctctaactctttgtatactgcgaataagcttgaaggtggtgtatctttagaacctaatccgtaacggccgcctgttaatacgattgtatcaagacctgcctcacgaagtgtggttgctacgtctaagtataacggatcaccgagtgcacctggctcttttgttctgtcaagaacagcaactttcttagctgtcttaggaagaacttttaagaatgcctcagatacccatggacgatataaacgaactttgataagaccgactttctcgcccttagctgttaagtaatcaattacctcttcagctacatcattaacagaacccatagctacgataacacggtcagcatcttctgctccgtagtagttgaataaatcgtagtttgttcctaatttctcgttgatcttagccatgtatttttcaacgattgccggtaactcgttgtaagctgtgttacaagcctcacgatgctggaagaaaacgtctccgttctcatgagaaccacgcatagccggatgctccggatttaatgcatgtgcacggaatgcttcaactgcgtccatgttgcacatttcttttaagtcagcgtaatcccatttctcgatcttctggatctcgtgggatgtacggaaaccatcgaagaagttgatgaatggaacttttccttcgattgttgcaagatgtgcaaccgggcttaagtccataacttcctgtgggttggtctcacataacatagcgaaacctgtctgacggcaggcatatacgtcactgtgatcaccaaaaatatttaaagactgtgtagcaactgtacgtgcagatacatcgaatacacatggaagctgctcacctgcgattttgtacatattcgggatcattaataaaagaccctgtgaagctgtaaatgtagttgttaaagcacctgcagcaagagaaccgtgaacggcacctgcagcacctgcctcagactccatctctacgacttttacctgattgccaaaaatgttctcctgtcctgctgcagaccactgatctacggtatctgccatcgggctggatggtgtaattgggtaaatagctgcaacatcagtaaacgcataagctacatgagctgcggctgtattaccgtccattgactgttttgctctggacattacttattcctccttatttttgaaaaaataaatgtgatactgcatcaccccatactcctgtgtgaaaagcacaaaatgatacaatttatcgacttgagtcatattttagcatagaattcaccaaaagaaaaggtctttgactgtacaaaaacaagtgcaatctcacatatattttctttcaaattcttccagtggaatcggtctgtcaaataaatatccctgtccgtacaaaaatccacagccacgcaaaaactgaagctgctcttccgtttcaatcccttcaaatatcacttcttcttttgcagagtggataaagtttcccatctgtgaaacaaaattccgctgttcttttaaattaatgcggtcggtaaaacttttatcgattttcaccacatccgccggtatctcaagcagcacgccaagcgaggagtatcctgttccaaaatcatcgatcgcaatgcggaaaccgaatttttcaagttctgaaagcaccctttttaactcatctacattttctaccacaacgctctccgtaacttccacctcaatatacttcggatcgattccataatgatccgccatgcgttttaagcgtccggcaaaattttttccaccgctttcaaagttgcgtctcgaaaaattggtagatatcgtaaacagttcttttcctgcctttttccatcttttcatcgcacgcagaagctgctcataaatgtaaaaatcaagatccaccacatatccgatgttctcgagcggaggtacaaatcttcccggcatgatcatctcaccggtctttgtacgccatcttgctaatgcttctgccccatatattttacgttcttccagattaaatttcggctgcagataaacttcaagttccccttgctgcatggcaccataaaaacgtcctgtaatctggatcgcatcatcgcgtttcgctcgcatttcttccttatatacacagattccggagccaccctgttcttttaccagtttacgcgccagatttgcgctctccaatatcgtatcaaatttttcattcagattttcaatatgacaaattcctaccgaaagtctcagcgtgccggacggatagcgtttctttaatttttcctcgtaatgttctgtgctccatgcaacgagtttttctatttcactctgatcttttccttttaaaaggaggataaaatagtcagaatacatccggcatgccaaaagcactctttcatttgtctgtatacccccagcaaaatcttttaagatggcatctccggtctgttgtccgtagttttcatttacatatgaaaacttatcaatatctatatggacgagagcatagtgttcctgcccctgttttgcttctgctaaaatatttttcagtctatatttaaacgcctctaaattgtacagtccggtaagctggtcacgatcctgcagatgacggatttctttctgatcatcccttaacttattgcgcagtgatacaaaaacggatgttactctggcaagttcacaaaacgttgttctgtccgcactctcaaaataattctgtctgttttgcacaccaaaatacaatcctcctgtcttgctgccggaatattcaaattttgctactgcaatctgcgtgatacggttttctcctgtattccagttttcaaacgacaatcttttatagtgtgtttcatccgtatcattcagtatgacaaaatctccgctgcccgcttccacaacttcggtacgaatcggctttataacatttttttcataaatctgtccaaatgtactccagtaattggtcagcgtcatctgcggaatttgttcatcatattcaaaaactgccaccatatccagatgataccgcctgccgattctttcaagcagcacattcagggaaccattcatatctctcgcatgagataaaagcaaaaatgccgtatttaaaaattctttgtccatcccctgctttttttcataatccacatctttcccacaggtatcaatattgcgtttcgtatgaaccgtcttatttttccccgcaaatgcataattgctttttccactccgcttgattgcgtacattgcacggtctgcctgatcgaacagctctgtataacaatttccatcctgcccggacaccgcaagtcccacactcatcgtcacatgtatgaccgcatcatccccgaccagtttcttttctccatgtctgcagagttcttttgccttttgttccgcctgttttaaagtcgtattatccatcagtaccagaaattcatccccgccgactcttcccaccagtttatgatccggaaactgttcttccaaagccgatgcaatatctgaaatcaccgtatcccccactgtatgtccgaacgtatcgttaatacttttaaaattatcgatatcgatcagaaacaatacatgtgttccttccggatactccttcagtattctctccgcttcctcaccggtcgcaactttgttgtaaagatgcgtcagcggatctctgcgcatctcttcggaaagctgctcctgtatctttctgtctgagctgatatcataacttcttccaataatctttaaaatttttccgtttgtgccccggatactccggtacacggtccggtaccagcaatattgtggtattcctcctccaagggctgtattcatccggtagtcaaatgaacctgacatctccctttcggatgcattctgaatcacttcccggtataacgtctgttcatctttatggataaaagcaagccacttttcaatttccatataatcctgatcatctttttgcagacgtccattgatatggtatttgtgcggaatccggaatctttttcctttcacatcgtactcaaaaggtacatcatccgtcacttcctctaacatggaatactgttcatttaataaaagcagctcatcttccagttctttcctgtcattggtattcttacagatcaaaaggtaatacggcacggcatccttataataatagatactgcaccagaattttacccagcagatctgcccctgccctgaaataattcttacctcgatctcttccgcccttttctgttcccggcatttttcaatcatgtcttcaaaggcacctgcatcctgcagataaacacagtcgtaaaagtcacggcttctctccggttccgcctgttccccatgtcctatcgccttcataaactccgcatttgcgatatcgatctgcaatgaatttccaccttttaatactgcaacccccatcggaaactcatagatcagtccctttctattttccttctccattttttctccattcgcgtatgtaaaaacctgttttcaagcatgttgactctcttgcgttcattatatcatgcgcagaaccagcacatgatcccattcaccgttcgtcaatcatgcaggcatgttgactctcttgcgttcattatatatcatccttcttccaaaatccatgtaatttccaaaactttgtgttttcccatgaaaataggaagtttcggttgcaatctccccacttttctagtatgatacgaattggtgcaattacggtataatggcggtttgcaacagcatccgcacaatcaatattaacaaatcaggagaataacaactatgatcagtgcaaataacgttacgcttcggattggcaaaaaagccctgttcgaggacgtcaatattaagtttactgagggaaactgttacggtcttatcggtgcaaacggtgccggaaagtccacctttttaaaaattttatccggtcagttagaaccaaccggaggtgacgttacgatcacacccggccagcgtctttctttcctgcagcaggatcacttcaaatatgatgaatatacggttctcgatactgtcatcatgggtaacaaacgcctctatgacatcatgaaagaaaaagatgccatttacatgaaagaagactttacggatgaggatggtatccgtgcgagtgaacttgaagcagagtttgccgatatggacggatggaatgcagaatctgacgctgcaacacttctcaacggtcttggtattccgaccgaagaacattatacacagatgggcgatatgcctggtcctttaaaagtcaaggtcttactcgcacaggcattgttcggtaatccggatatccttcttttagatgagccgaccaaccacttagatctcgatgcgatcaactggttagaggagtttttgatcaacttcgaaaatacagtcatcgtggtatcccatgaccgttatttcttaaacaaagtctgcaccaatattgcagatattgattacggcaagatccagctgtatgcaggtaactacgatttctggtatgagtccagccagcttcttgtaaaacagatgaaagaagccaacaagaagaaagaagaaaaaatcaaagagttacaggactttatctcccgtttctctgcaaacgcttccaaatccaaacaggctacttccagaaaacgtgctttagagaagatccagttagatgagatccgtccttccagccgtaaatatccatacatcgatttccgtccgagccgtgagatcggtaatgaggttttgtcggtagaaggcatcacaaaaaccatcgatggtgttaaagttcttgataatgtatcttttatcgttggacacgatgacaagatcgcctttgtcggcggcaacgagcttgcaaaaacaacactctttaagatcctgaccggtgaaatggagccggattccggttcttacaaatggggtgttaccacaagccagtcctatttcccgaaagataacacagagatctttgataccgatcttctgatcgttgactggctgacacaatactccgaaatcaaagatgcaacttatgtacgtggattccttggccgtatgcttttcgcaggcgaagacggaacgaaaaagatgcgtgttctctccggtggtgagaaggtgcgtgtactgctctcccgcatgatgatcatggctacgaacgtcctgatcttagatgagccgactgaccatctggatatggaatctatcaccgcattaaacaacggactgatcaaattcccgggtgttgtactttttgcttcccgtgaccatcaggtcgttcagacaactgcaaacaggatcatcgagttcctgccggacggaacattcatcgataaagtttctacttacgatgagtatcttgaaaatgatgagatggcaagaaaacgtcaggtatataatatgtcttctgacgatgagaacgataactaaaaaaatagcactgaccagaataagatctggcagtgctgtttttaatttttcctaaaatgtggtccattttaatgtataagaaccagatgacgctttgctcatacgctctaccttgatgtagtatgtaccagacggcagatcaaattttgttccaccatttgccaaactgatataccatccatcttccggatataatctggtaacttttgaaatagcagaaactttttttccattgtttttaccagaaaatacttttccatctttattatagaaagttatcttaaaaccatttttttcatttgttccatttgtgtttgcgagataatacagattcaatttagcactcttagtcagtttgattttataccagtctgccttactgtcaccgtatgcaataacacctgtcactttctttccttttgaaagtgtttttgcttttgattttgaacttgcagatgaatctttaatagcttttacagtagctgtgatttttgtacctgcattacactgcactgcaaaataatatgtagtattcttctttacaccatacgttgtggtattgtaaatcttgccggcataatcatttctccagatttcatttttctgaccgatcgtctttttatttttattgcaaaatgtaacataccccttggaattattgtaataagaagaactgcagtcaaactttaaagttaccgtaccagtcacggatggtttgaatttgatataatttaccttcaaattccgtccgctataacactgtgtatctttaattgtaactgtagactttccattccctttaaaagaaagtccggctgcctgtgcttctgtcggagctgccactgtaaataacgtaactgccataactgctgtcaaaaacatgcaaacagctctgtgaaaaaatgtttttctggttttcataaccaatcctccttgttttgcggagcaaaatgcgactgcctttgcaggagcagaggattttcctccttgttttgtaaataatcattttcactttaccacagtactctgctgccgtcaagttcttttatatgattcagtaccattttcccatatatttagttgtgattttagctaattttacttatatattatttaattttactttcaattcattcacatccgcaacaatacagtctgccccggcagtttcaagttccattctgtcaccatagccatacaaaacaccgatcacatacatgccattttcttttgcaccaatcacatcatgttttctgtctcccaccattactgcctgatcagcagtgattttaagtgaatccagagcgtagcggatcacatcaccttttttacttctgctgccgtctaatgtacttcctgcaaaaaaataaaaatattgctcaatttcaaaatacttaaggatctgtacagtatatacttccggttttgatgtcgcgatcacaatcttttttcccagtgaagcaacttccgcaagtaattctttcattccatcatacaaaacattctcaaaaaggccctgcctgctgaaatattccctgtattttccgactgcctcccggctctgttcctctgaaaatccataaaaatcctgaaaagaatccagaagcggtggtccaataaacttctctaatgtatctaaattttcaacctggattccataatacgaaagtgcatgtgccaccgcctttgtgattccctctttcggatctgaaatcgttccatccagatccataaaaatatattccggtctcattgttttctccattttcttttgttttttctattgtaacataccattcttttttctgtacgtttattttcctgatattttatttttatcgcacatattttcataaaatccccatttttacgctgtcttttgcgcatatcaagtctgtgcataagcacaaatcttgcatgttaaaaatgttatttttcacactgcatatcaaattttataagcatccaatccttagtctctcagtctatcgatattgcgtttcaaggactctaccgccgcatcgatatccgaccgacccgtatctctgctgagtgtcatccggaccgttcctgctgcataatcctccggcaccccaagttcttttatcacataagaaatcctgctttcacctgtattacatgcagaacccccggaggcacagatcccatcctcatctaaaaggatcagcaaagatgccccgtccactcccttgaaactgacagatacatttccgggaagtcttttcgtcctgtgaccgttgacacggacatccggaatctcatgcacgatcttttcgatcagataattgcgcagcatcgtctcccggtacattccggcccgcataccttttgcagcaagctccgccgccttccccatcccgacgatcccggcaatattctccgttccggcacgttttcctttttcctgtgaaccaccgtggataaaggatgggatctgcacgccttccctgatatataaaaacccaacaccttttggcccgtgaaatttatgggcactcgcactcaaaagatccaccggataatgacgcactgagattggcacctgcgcatatgcctgcacggcatccgtgtgaaacagtacatccttttcccgcgcgattttgccgatagaaaaaaccggttcgatcgtccccacctcattatttccaaacatgatcgtaatcagtgttgtatcctcccggattgcatgatatactgcttccggtgataccattccatattcatccacgtccagataggtcacttcatatcctagttcctctaaatatttacaggaatttaagattgcatgatgttctattttgcttgtaatgatgtgttttcccttgtgcttatactctcctgcaatacattttactgcccagttgtccgactccgaaccaccggatgtaaaaaaaatttctgacggttttgcctccagtgtaccggcaattgttttccttgccttttctaacgcctgtcttgatgtttccccatatccatacattgtggatgcgtttccaaatttttcttccagatacggatccatcgcctcttttacttcctctgacatctttgttgtcgcggcattatctaaataaattacctttcctttattttcaatcgaactcattttctctccacttccttcatatattaaaatgaactaagtccggattttccggcagactttggaggtttctattgaaaaaattatattccaccaaaagtacgcttttaaccggaaccctctttctcaccctcgccggaatcctcacccgcattataggtttcttctataggatattcttatcgcgtaccattggtgcagaaggtctcggcatttatcagcttatcgctcctgtaaccgccatctgttttgcatttaccgctgcagggatccagacctccatatccaaattcgtttccatggaagttggaagaaaaaatgatgccggtgccaaaacctatctttcgatcgggctttttatctccttatgcctttccacactctgcagcctttttctctatcattatgcggattttattgctgtttcctggcttggtgataagcggtgcacgccgctccttgctgtgctctccttttcctttatcccatgctgtatccatgcctgtatcaacggttattattatggtctgaaaaaaacggctgtcccttcactctgccagttgaccgaacagttcgcccgcgttggaagcgtttatctgatgtaccagatcgccgtcagcgaaggaaaatctttaacgctttccatggtcgtctggggaatcgtctgcggcgaggcggcgagcacactggtatcggtcagtgttttccggatctccgatggaaaccggcgcacccccggcaaaagcaggaaaaatctctatacctgcaccaaaaatctgctctccatggcagttcccttaacctcaaacaggatcgttctaaatttatttgcagggtttgaaaatgtcatgctgccaaaccgcctgttagctttcggctatacccagtcggaagcactcagtgtttatgggattctcaccggaatggcaatgtctgtcatcatgtttccgtccgtgatcacaaactccgtgtctgttcttctgctcccgacgatatcagaggcacaggccgccgggaaaagaaataagatcctctacaccataaaaaaaacgatcgagtcctgccttttacttggctttctctcgaccgcgggatttcttgtcaccggaaattttctcggcaattttttatttaacaatgcgcttgccgggacctttatcgcaacgctcggctggctctgtccgtttctgtatctcagttctaccttaagcagtatcctgcatgggcttggtcatcccggcatcacctttgaattaaacctggtctcctgcacgatccggatcctgtttgtcctgctcgctgtcccggtctggggaatcagaagctatctttggggaatccttgtcagtcaggcggtcacggcactgttgtccatctttatacttttaaggaaaaccgccggatacacattcggcaggaataatataaagacacaaaaataaccgcacagtctggtaaaccgtgcggcatttttgtcaaaccatatgtcggactaacagctgttttctttaacacatcatgctgtattcctgtaattttttctttgcctccgggcttaagtatttcggaacctggatctgtactttcacatactggtctccgtgtatggacggattctttctggaaacgatcccttttccgcgcagcctgatcttgcttccatcctgcgttccgcccttgatattgcagtccacatccccgtagagtgtatggattcttgcttttccgccaagtgctgctgtcacatacgggatcgtaacggtcgtataaacatcaagtcctttccgctcgcagccattctttggacggatctttatctttaagaacagatcgcctgtggtaccgtcagcaccggtatgacctttgcttttcagccttaactgttccccgtcatccatgcccgccggtatgcgcactttaaatgactggatttttccgtcactgccacttaatcttatgaccttctcacagccaagtgctgcctcatcaaaatccaccgtcacctccgcttccacatcgcgccctccgcgaaagtggctgccgctgtttcctccggtaaattcccggtaaaacctgtctccgccaaagccattccccgatgcattacccctgctgtttcctccaaagaactggccaaacatatcgtcccagaaatcacccgcctcgccgttttcaaaatgaaacccggaaaatcctcctccatttgcagcacgccttgcctgctcctccgagaatccttcctcaaatgcagccattccgtactgatcgtaaagtttctttttctccggatcatttaacacagaatatgcttccgtgacttccttaaacttctgttctgcgttcggatcgtctttattcgtatccggatgatatttttttgcaagtttccgatatgctttctttatcgcggacgcatccgcatttttatcaattccaagtacctcataataatctcttttcatgatcgcactacctccaatcaaaacaaaaacagagagacatcacgcatcgcctctctgttttccccggtcatcccggtaatctatctctcccatggcgatgtgcttcgctttcctgtttgggattttagtttttatttttattgcaatcatactatagcacttgttttagcactcgtcaatagagagtgctaatagtttataaatattttattcataattatttctcacttcatccgcacccatatagatcacatttctctgtggaacaatgccgctctttcgaaacagatccctgactgtgacaaattcatagccctgttcttttaaagcaggaatgatcgtctttattgcctcaactgtctgcgtattgccttccatatcatgcagtaagataataaatccgggcttcgcatcccgaaggatcctgtctgcccgctctttcgctgtcacagaaggctcccagtcctcacagccatatccgcagataaaagtaagatcaatcagatcatacattttctggttataactgatatacggaggccggaagaactccggtttttctcccgtaatacgcacgatctgttccgtcgtatagctgacctcgtccaaaatctcccggtcattaagttccggcatccccggatgcgttttggagtgattttcgattgaacaccccatatcatatgcacgccggatcaggtactccgactgctctgtaattttctgtccaatcagaaaaaaacttgccacgatatcgttttccttaagcacatccaatacctgatccgtaattcccggtgtcggtccgtcatcaaaggtcagtgccacaaattttttttccgtcatacaactcctcttttctgagacatttacacactactgcctcattctcgccttttctataccatatattaatacagtctcacacagactgcaatccactttcttagaaaagcagagcaagcccgtgcacgagaaatgctgccacccaggcgacaaggcactgccatacgatcacacctgccacccattttcttccaagttcacggcggattgacgcaagtgccgcaacacacggtgtataaagcagactgaataccagaagtgatgctgctgccgcatcagatagcgctgcctgcacattacctccaaataaaatctcaagcgttgagatcacactctcctttgccatcacaccactgatcagggatgtacagatacgccagtcccccagtcccaacggggcaaacagcggtacaaggccgttcgatatcagcgcaagcatgctgtcctttgaatcatttacaatattaaaatgaatatcaaatttctgcaaaaaccagatacagatcgttgcaaggaaaataaccgtaaacgctttctgtaaaaagtcttttgctttttcccataaaagctgcatgacattttttaaccccggcagacggtaattcggcagttccatgacaaacggaaccgcatccccgcgaaacagtgtcttgcggtaaagcagtgccaccaaaataccgatcacaattccgcctaaatacagtgcacacatcacaagtgctccatactccggaaaaaatgcactgacaaaaaacgcatagatcggcagttttgccgaacagctcataaacggtgtcagtaagatcgtcattttacggtcacgctcacttggcagtgtacgagttgccattactgccggaaccgtacagccaaaaccgatcagcatcggaacgatacttcttccagagagtccgatctttcgtaataacttatccataaaaaatgcaacacgggcaatatatccactgtcctccatcagagacaggaagaaaaacagcgtcacaacgatcggaagaaaacttaaaatgcttccaactcctgtaaaaataccatcaattataaggtcatgcaacacttcattgacacctgcagcagaaaggagctgatccactgctgctgtcagcgcatcaatccccatctgtaaaagattctgtagtcccgctcctattacatgaaacgtaagataaaacacgatcagcatgataccgataaaacaagggattgccgtatattttccggtcaggatacggtcaattttctcgcttcgtatcctttccctgctctctttgggttttactactgtcttttcacagactttttcaataaaggtaaaacgcatatctgcgatcgctgcactccggtcaagtccacgctctttttccatctgaacgatcagatgttcgatcgcctctttttcattttcatccagatgcagtttttctaagatcagatgatccccttcaatgattttcgaagctgcaaaacggatcggtatctgcgcttctttcgcatggtcctcgatcagatgcgaaactgcatggatacagcggtgcacggctcctccaaagtcactctcatcacaaaaatcctgccttcccggacgttcctgatattttgcaatgtgaagcgcatgacgtaccagctcatccacaccttcattttttgccgctgagatcgggacaaccggcacaccaagcattgcctccatgccattgacatccacagaaccagagtttccggtcatctcatccatcatatttaatgcaatgaccatcggaatatccatctccaaaagctgcatcgtcaggtacagattgcgctcgatgttggttgcatcgataatattgatcatcgctttcggcttatcttcaagtacaaaattcctcgaaacgatctcctcactgctatatggcgacatcgaataaatacccggaagatctgtcaccgaggtattcggatgcccttttatcgccccgtcctttcggtcaactgtcactcccggaaaatttccgatatgctggtttgaaccggttaactgattaaacaatgtagtttttccacaattctggttaccgacaagtgcataggtcagcttttcctgctccggcagcggctttccgtctcccttcacatggtatttcccctcttctccgagtcccggatgcacggactgattgatgttttttgcaccttcatgtctgcgcgaacgctcactgatcagttcaatttcaatctgctccgcatccgaaagccgcagtgtcagctcatatccatgaatctgcagttccatcggatctcccatcggtgcaaatttaataacggttacctctgcccccggtattactcccatatctaaaaaatgctgtcttaatgccccttctcccccgactactttaatcacagcactttttccgatttctaattcttttagcgtcatttttctttatccttcgtgttgatattgataatctttatcgattatacactgtttccatgaaaaaacaaagaattatttttttattattatggaaaaaccgtgactaaggtgctagaataaccttcggaaaatatataaggaagaaatttgtctttcaaaaaatcatatagatatggagattggtgtgaaaaataagatctttacgaaaacgagtacatctgatgcacatttatacagcaatcaggatctgcggaaactattggttccgatcatcgttgagcagctgctttcctccctgatgggaactgccgacacaatgatggtcagcaacgtcggctctgccgccatttctgcagtatccctcgtggattccatcaatattttagtcattcaggcactctccgcactcgctgcaggaggtgcgatcctgtgttcccagtatcttgggagcagcaacaaaaaagctgccaatgaatcagccagacaggtgctttttgtcatgaccgttttatccgtgacattgtctgccatctgccttttattccgtggtccgctgcttcacgtcattttcggtgccgtggagacagatgtcatgacaaattctcaaatttattttctatttaccctgttatcctttccttttatcggactgtatgatgccggggcctcgatcatgcgcgcccagaataacagcagggaaccaatgatcatttccatcatttccaatttcttaaacatcggtggaaatgctattttgatttttgttttcgggatgggcgtggagggtgccgcaatttcaaccctcgtatcccgcatcttctgcgctgttgtcgtgatctacaagctgcgcagtgaagaggaaccgatctttattaaaaattatgccgcaatccgtcctgatttttcactcatcaaaaaaatactgttcatcggcatcccgtccgggatcgaaaacagtatgttccagttcggtaaactcgcgatccagtctacggtctccacacttggaaccgtcgccatcgctgcacaggcaatgacaaatatcctcgaaaatctaaacggtgtcgccgcaatcggtgtcggcattggactgatgactgtggttggacagtgtctcggtgccggcagaaaagacgaggtcatttattacatcaaaaaactttcctggctcgccgaggcagcgatcgtgatcagctgtcttactgtgcttgccctgacaaaaccaatcaccctgttaggcggcatggaagcggaaagtgctgacctgtgttttaaaatggtcatctttatcacgattaccaaaccgatctcctgggtattatcttttatcccggcatacggcatgcgtgcagccggagatgtcaaattctccatgatcacctcctgctgcaccatgtggctctgccgtgtgagcctttgtgtctatctctgccgtgtttggggatttggcccgattgcagtctggatcggtatgtttgccgactggacgctccgcgccatcgtattttcgatacgcttccacggaaggaaatggttaaaccaccacattatcgactaaacaaacgcctgtctgatgctgtcataatgaaggaattttcctttctccccaagttttttgatctcctcagcggaagcaaacagatatccatctgtttcttcctcctggagcttgatatctgactcgtcaaaatcagcagaaaaacgatacacatccacaaaatagttatccccttctcccggattatctctacggtaggtaaacagatatccgccatcccacgcagcaacatccagtccggtctcctccctgatctcacggagtactgcagtcttagaatcctctcccgccatcgcagcaccgccggaaacctcccagcagcccggtgcccacgcttttgtcataacacgtttggtgatcaggaaacgtccatccgttctttttatcacgccaagtacggtcagatgatattcgccatcctttaaacaccagtcattccgtttcatcgttctgccggtgcgctcttttttttcattgtaaatatcccagaattcctgtttttctgtcatctgtattttcctcatttcatttttctcgtgctgcttcgatatttttatcataacaaacctcacgtccctcagacagatctgttattttatatcccgttactatcacacggtagcacgtcaaagtgcccttatctctattataaacaaaaatccggtttcggcaacttatttaaaaaaaacaaattcaccgatcagataaaaaataccactcagccagaacgccatgcctaaaataaaggtcagcagatcttccatctgaaaatttttccgcagataacacagtttttttggattctcctcattaatccggatcgtataaatttttcctttttccagcgattttttttctttccgcgtaatcctctccatcgtgcactggcggaattttttttcctgataatgataggaaaacagcgcatacgttctgacacgatcgcccattttctttgtcactgttttctcaaataccgcatccacaggcaccctgcaatggatgcgcgcacgccatttccgaaattcgattccaactaacagtgtcccatacactaccccgattatccccagtaaaataaatgttacattcatactggtctcccttcccaaaacctcctgtgtcaccccggcagactctgtgctacgcagagtgcaccccagccctcttatgtcaagttaatgtcaacaacttttttgagtcaaaatagctgaaagccgcataacttcgttggggttatggtaagttagtgtcaagtcagagtgaattggtggtaaattagtgtcaagttgctttggggaggtttactcctccccaaaagcataattccattcaatctctactctcttatccctgtatatgataacctttttaatgaatacatccaccgcttcctgcgtcagcttttccatctgagaaaaccggataatctctttcatatcctgtttcggttgattgtattcctccgtaagcctgctaaatgcaagctctgtttcttctattttacgtgacagctcctgcatctgtaaagcaattccatccgccctgctgcggtattctccggcttctatctgctttacagcatagttttcgtacaatgtatctttctctgtctgcaaactccgatactgcatccgataattacccagctctttattcagcctgttccattcttctttctgaaattgttcaagactctcacgctgttttatcaaatctccacggcgcatcaactcccggtacaattccgtcaacacaatctcttccagaatgtctgccctaaaataagtacagcagtccggtatctgcagcagggaatgtttcctgcaccagaaatgatttggcatcttaccattgtttctctgcggtttatagttgatcgcatatccacacccaccacaatatattttccctgtcagtgggtgtttttcccgtttccttttcgtggactgttccgggcggtaagcagatgcaagtgcaaatacctccggcgttaccagcggctcgtgatgatccgtaattactttccactcctcctttggcacagcaatcccgtttttacttccaacagacttgcggactgatttaccgtaagccatttcgcccagataaaaacgattattcaggattctcctcactgccgtattgctccatgtatgatgctccctttccattttcctctcaggatgacgcatctgtgtaacagtcggcgtctgcttggcaatcagctcctttgctatctgcgtactgctcattcctttttctgccaatgagaagatatggcggacgatttctgcctccttttcattgacaatcaccgtatttttttcaatttcactcttggcataaccaaaaggaacctgtccgaatacatattccccatttgcacatttattttgaaatgatgtttttactttgaccgatatatccttactgtaaaggtcatagagaagcgtctggaaagcagtatccagcggggtggtacttccttcatgctccctgctgtcataatggtcatttacggcaatgaaccgcactcccataaaggggaaaatctggttgagataatcacccagttctatgtaatcccttgcaaaccgggacatatcctttaccagaatacaactgattttactctgctttacctgttttaacatctcctgcagccccggtctgtccatattcgtaccggaaaaaccgtcatcacaaaattctgcaacctcctgtcccattagttcagcatcatttctgatataatctaaaagcattttccgctgattggaaatactgttgctttcccgctgctctgtggaagctttaccgtccagggcatcatcctctatggaaaggcggagatagattgcaatcttcctgctgtctgtcattttttcacctgcctttccaccagtgcatcactgtatgtaaataagacttccacccttttccccggatacacatagattttatctatcagcgattcaataagctccctggtaagtacctgttcattctttagttttatcaatgcacggactgctttcagataggtttctccgtcacgctcaaggcttacttcctgctctctgaagttcttctcctgcttctccaaatcccgcagcctattttctttgcacatcttatactccacatagtctttctgtgaaagattgcccatgcggtatgccatatacttatcactttcttcctctgcaagtctttcttttgcgtaagttacggatcgaaggctccgctccagctcctgctttttctgccggatgatttctcctgccttatccagatatattctcttttttttcagactggtatcaaactctttttctaacagtgaaaaaagaatatccgtcaacacattttgggggatacggttagaggacggacaactatccgtcttggtcgccccgccgtttaagcagaaatatccatctatccgcatcctgctgccatctgcatagtgcttcacatagctgtgtcttgtcattttccgcccgcatacgccgcagtacagcaccttgtcaaaaatattttctccgattgggcaaccttccgttggatgagcatggctttttgtctgctcccgcagtttcttccttactccggccgcttccttcccaatctccggcgtgatcagcggctcatgggcttcttcttttaccacccagtcatcttccggcttgtgaatgcggttattttcatcccttgcagtaatgctggtctttccctgtaccagctttccagcgtaagtgtcacttttaataatgcgttccacaccacttttatcccatcctttgtaagctgcatccggtgggcagtagacctctcccgttttgtgatagaccgccggcggattgatcttacgagtgttcagatcatccgcaactgccgtatagctttccgtctcaataaatttctgaaaaatgtatctgacaatctcctccgtattttcatccggtatcagcctgcgtactttgccctcccagactgccttatacccataaggtgcaggaccgcccacataggagccttcttttcttctctgtgccagagaagctttcgctttcacggaaaaatccttagcatacatatcatttaccagattcttgatttccgataccatctgtttcgtttcattgccgcctgccccggtatcaaagccatccgccactgctatgaaacgcacaccaaggaatgggaaaatcttctcaatataatttccggcttccagataatttctgccaaaacgggacaggtcttttacgatcacacagttaatgtctcccatgcggacatcctgcatcagccgctgaaacgcaccccggttaaaattggttcccgtctttcccaagtcgatataacagtctgcaacttcgattttatccgtatgttttccgttccattcctcaatgaatttcctggcgatctctatctgcacctctactgattcattctttgaagtttgcctgcaaacttttttgtctatatctgcggagagtctggcataaataccagccttatactgcctgttcttttgcaccccggaagtgctcgcaggtgtgcccgccccttttcccgctgactgtctctttgatgttcttcccatactcacgcactcctttccctgccgctttcctgccccgaaagtgcagtgacatattcctgcatgatccggtattcatcccgaaaataaaactctatctcaagtcttttatcctcgtacacataaatgcgctttaccagacttgttaaagtatgccggtcaatttctgcaagtttcaaggaatcctgaaattttgccagccttgaagcactaactacacccttctgtagcatcctccgtatcagatcctgctgctgttcctgtgctttctccagttcctgtgccttactctgaaactccttatgcagacgttcaaattcttcctttgttacgacattctgccttagatcgtcataaagccctgcgcagagaccgtaatacttatcctgctcctgtttcagccgcgtaagctccttctggcatcccgcaactgcttccagatttgtctctttttctttcgcctgttcaaaaagtttactctgcgctaaaaagtcattggcatatctgcgaaccgcaatgctcaccagttcctttaaagtattttcctctatgctgtggcggctgcatccctcgccccggttttttgtggaacagatatagtacaccttattggattccttataccggactctgcgccgcaccatctgttcgccgcagtccccgcaaaacagaagtcccatgaatggacttaagcttttgctttccgggcttacccgtccgtccgtctgaagaagattctgtaccgcttcaaaatcactgtctgaaataataggctcatgggtattttccacacgcacccattcttcctttggtttctcaacactctttttcaccttataattgactttctctgtcctgccctgcagcaggtgccccagataaacttcattggtcaggatacgcttcaccgatgaactgctccactgtgaaccggagccgccggtaaacccgccccggtagttaagccccgtagactttttatattctttcggggaaagaatgtgcagctcgttcagcttctttgcaatggcagacaccgccattccctcaattttccaccggaatatcctgcgtacaatctctgccgcataatcatccaccaccagcttgttcttattctccggagacttgcgatagccatatacggcaaaaggtgataagcattccccggctttccgtttcactgcaagctggctttttaccttggtggaaatgtcccggcaataagaatcattgataaaattcttgaccggaatcacgatctggcgttctccggtgtctgccgatatgctgtcgtaatgatcagttaaggcaatgaaacgcacaccaagaaccgggaatatcttttccagatacctcccggcttcaatgtaatcgcgcccaaaacgggacaggtctttcacaaccacgcagttaaccctgcccgcttcaatatctttcatcattctgttaaattctggtctgtcgaaattactgccggaaaagccatcatctacataaatgtcatagagttcaatatcctcctgttcatttaaaaaggaacggatcaactccctctgacttcctatgctgttgctttcggctttagatacgccatttatcatggcgttgccatcatgctccgctttcacattgtcatctctggaaagacgcagatacatggcggcaaagaatttagattgttctttcatgttatcactcctgacttttttgttagggggaagccggtggcttttccattccataaaatcaggagttacgctgatttgtcctgatattaggttagcatagataagaggatttttcaatccaaatataaatttttcaaatatgaatttcggataacctttgcagatattccgccattttatcatctatgctggctccgtctttttggaacctgaccttaactacataatcaccgatccgattgacatagacattgttcgtctgccttgcaaacgcatccagcttcttctccacaggcagggatgtatcaatctctatgtccctcaaatcagtcagagtggaaatatctaccgtccttatatccacggcagccatttcttcaagtctttcctttgtcagttccaaggcttctctcctttccggacagcataatcttgctgctatctaagtctattcttttaccggattgtcctatgctatagcattttccttatccataaaataactgtctgttttcttccttataataaagtcttccacatccataagcctgtccgtgaccggcatggtcggcagggtattcagaatttctgcccggtatctgccacgcagggatgccctgctgtctaagatggaaaataccgcggtgtccttttcccggcggatgccgcgcccgaaccactgccttagcttaatcagcatttccgggatgatgatgtccctacggtataaatcaaagtcctcatactggtttctctggtattccatgaccggatcaggcacaggaaatggcagttttaccacgatcagactggaaaggatatcccctgcaaggtcaatcccctctccggcgctgtcactggcaaacagcactccgtttccgcttcttctaaagctacttattacatccagtctacctctgcccatgagaaacagcggataatcagaaagctgctccttcagaccataaaacaccctctccatgagccaataggatgtaaaaaggatcagggtatgcccatgagtagcagacacgatctgcactatttcctccatgatcgcctgtatgtatctgtcatcccggatattcggaaacggcatacgctctggtatatagagcagaccgttactctgaaaatcaaagggtgaggacttgctggtttccatgattcttgataaagctgcaaaggaaatccctgtcattctcttgaagtgactgaaatcaccccggactgacattgtgccggacgtaataataaccggtatcggtctgctccagatgtcatggaataaaatctgttccagttccatcgggaccgcacacagagcaagcctgccgttctccctcttttccatccagcagattgcatttccgctgtttagaaatacggtcagcttgtccgtcagctcctgacaacgctttttcaggccctgcatccgcattttctgtccgctgttttcctgataggataagggaagctgctccaaagcctttgccatgtgcctcatataatttttttccatggaacctatcactatttcaatcctgcttccctctctggtatgatttcctgctaaatctcccgccagtctgtcaaatatctgtctgttatattccgcaagctgactccgtaacacagtaagttcatccatggctgcggttcttctgttcgcttcactcaaagtcacgataagttccgcatcctgctcgtcccagactgtgcggtacatctgtcttgcggcatctatcagcttgtgagactcatcaaacaccattgccccatatctcggaaagagaggttttctgccctgcttctgtccgattagatcggcaaggatataattgtgattcgtaatctgaaaatcaaaattatccgtcatgcactttttcttaaaattcataaatctgcataaaagcgaataaggacatgacttattgcagcgaaacacgttgattctgccttttacatagggtgtcagcacggcatcatccagatcaatcctgtcaaattcctgctccctaagccttgccagttccagtatcagattggcatccacttctctctgcaaattttttatggatgtctcatatatcttcaatctggagtcacagacataatgccgttttcctttccgcaccacaaaagataatggtttgtcaattacatggtgttctaaaaggatcccggatatctgcggtatgtattcctctgtcaatgctttctgcaaagctatggtggatgttgatatgactgccggaatcttcttatctgaataaatgttatgtaccgtcagtgcaaggatatatgcgtgagtttttcctgtccccacttccgcctcacataaagccagtttgttttcctgcaatgcccggagcatttcaagagaaagttctttctgttttaccctcagattcattccatgtttcggtaaaatctcatcaaataaataaattaataattcttctgcactctttgccatcgttacgcctcctaaaatttcttagtgccataaagcagcacaggaatagactggaaggtatcggtttggctttttactaacaaaaatgagcttccatccagcccatgatttctactgctttataaaaaggtgcatcagccatcctgccggtaagcaggcatcataaaagccgcccacattctttctcaaacgtgggtgtgcattttcccgtcacttatgcgggccactggcgtggaagtatcattatttccgaccggtatcatcgcatcctgccccaccacgggcagtaaagccacagatatttctcgcttggaataatccgcatggcgtaccctgacttgtgctatccggctctccggccggtcggatgtgtgcctgatacacagatatgaagttgtcaaagtgcagtaaaaggggactattttgaacaaaagaaaaccccttcacctaattcgccgctaggtaaaggggcctgccgaaaaaaaaattcattttattttaatatggtaacgataattaggaattatcggataaaaattagaa

SEQ ID NO: 5125 - DNA, 22079 bp, Unknown
  gut microbiota DNA sequence
tgttaattcagtcagtacttcttatgaagactcacagcgggagatgcagcttaagtgtgtgagccagagcagtgaacttgataccatgatgcagaacgtttcacagtcagtggaaatggtatacagcattgcagttgccaaactggaacatgcagcatctttccggacaagcagggattatgtggatacttatacaaagcagatgcttcctatcctgatgcagtcagcacagaacacaaagggagcacttacagcgtatatccgttataatcctgaatttacggaaccaacaagcgggcttttccttacaaggaacaacagtgacagtgaatttgagagtgtgacaccaacagacttttccatgtatgatccgagtgatgtggagcatgtcggatggtattatattccggtacagaatggaaaagaaacctggatggaaccatacttaaattccaacattggtgtatatatgatctcatacgttattccaatcgaggtggacggcgagtctattggtatcatcggaatggatattgatttcagcgaatttacggatacgatcgattctttaagtatatttgacagtggatatggattccttgtcaatgaatctggtaaggtcatgtatcacaaagatcttgagattggaagtaatcttgcggatgcagacagcggactgcagtcagtagtggatgcgcttggaaatgagcagacggaggagactgccgtgtcctatacttatcagggaaaagataaggtcatgtattataagacattggaaaatggcatgaaatttgtccttacggcaccaaaaactgaactgcaggaaaaatccagacagcttgcaaaacagatattcggaggagctgcttttgcaatgatacttaccataattatcggtacagtactcggatttacaatcacaaagccgatcacccagatcgacggtatcgtaaaacagacggctgaatttgagtttgcgagcaatccggcaaaccagcacctttataaaagaaaagatgaaaccggaagaatggcgatatcacttcacaacatgcgcaagaatctgcgtcaaatggtagcaaatatccgtcatgtatacacagatctgaaaaataccacagaacagctttctgacacgacgaagcgtgtgcgtgaaatgagcagcgtcaacacagacacgacgcaggagcttgcggctgctatggaagagacagcggcgacgatggagacggtcaacaccacggtcagtgatatcaaagagcgtgcaacggatattgagcggtattcaaaggagggacgggagtcctctgttgaggtaaaggaacgcgcaggtcagcttaagttaaagacgcaggctgcaagcgaaaaaacggttcagatgtacgaaaatgtacagcagaaaacagaagctgccatggagcaggcaaaagcagtagaaaagatcaaccagtttacacaggcaatccttgaaatttcaagtcagacgaatctgctggcattaaatgcctcaatcgaggcggcaagagccggagaggcaggaaagggattcgcagtcgttgccggagagatcggtacgctggcaacccagacatccacgacggtcggcagtatcaatgaaatcattgccgaggtaaatcaggctgtggcaaatatgacaggatgcttaaaggaaagtacggatttcttagagcagacagtactaaaagattatgaggactttatgggggttgcagaccagtatacgaaagatgcaaccgtatttgatgatgatatgtctgctatcagcggacagatcaatacactgttaagttccatcgttgagattgcagatgccatgcagggtgtcagcagaacggtttccgaggcggctgatggtgtgacggatattgcacagaaaacacttgaggtttccggaattgtccagggaaatgaaacacttgtggacaataaccgtgagaatattgtacggctgaacagtgttatcgaaatgttccacgatgaaaaataaatctttgccttatatatgatttttgtatataatgaaagacagggtgtcagagacggacagaccgtgatggcatcctgtttgtatatttatggcgataggtctgcccatggaatgcgcagtctgtttattgtatacaatattttatacgcagaaatggagaatagtgtgaaacataagaattttcacacgcaggaatgaagaatagaaatggagaataacatggataacgatattttttcacactttccggacagggaaacatttgacagatactggaatgagaattatgttcctgttacatacgaggatgtggcaacggtatttcgcgattttgtaaaatctgcagagggacatatttatctttctgattatgaggagaaaggctgtatttccaaggaagatttcaaggacaatctttcccaggaggcgcagtttgcttttcaggatggactgacggaagtattttatgataaaaatccggagctttatgaaacggcatttgcactttttgaggaggcacagatgacaggtcagggagatgcaagtgtggcacagacttttcatgagacatttaacgggttgtatacagagtttttagatacgctgtttgaggaaatgttaagtaaccggaaggattgagaggagttttatggctacattagggattccgcagaatacgattgcggttttgcagaaatatcattttaattttcagaaaaaattcgggcagaattttttgatcgatccacatgttcttgagaagattgtcgaggctgcgggagtgacaaaggatgattttgttcttgagatcggtccgggtatcggtacgatgacacagtatctgtgcgaaaatgccagggaagtgactgcggtagagatcgatacaaatctgatcccgatcttagaggatacactgagtgcctatgataatgtgactgtgatcaatcaggatattttaaaactggatatcgcaaaacttgcgatggaaagaaatggtggaaagccgatcaaggtcgttgcaaatcttccttattatattaccacaccgatcatcatgggactttttgagagccatgttccgatcgacagcattacggtcatggtgcagaaggaagttgcagaccgcatgcaggtagggccgggaacgaaagattacggtgcgttgtcgttagcggtgcagttttatgcaaaaccccagatcgttgccaatgttccgccaaactgctttatgccgcgcccgaatgtcggcagtgcagtgatccggctgaccagacacgaagaggtgccggtgcaggtggatgatgaaaaactgatgtttcacattatccgggcatcatttaaccagagaagaaaaacactggcgaacggattgtcgaatgcgccgcaggtacatctttccaaggaagagatacaggagtgtatcgcagaacttggagaaccgcttaccatccggggggaggcgctcacgttagagcagtttgcagctctttccaatattattggaaacagacagaaaaaataaagcaaaattaaggaggagattatggacgaaaatcagaacatgaacaatggacaacagacttacggggatcagcagtataacaacggacagcagacctatggcaatcagcagtataacaatggacagcagacttatggggatcagcagtataatggaggtcagcagacctatggcaatccgcagtacagccagaataactggacaccgcaggagcagcatggtccggtttcagatattttctgctatctgttactgatcgtaatgccgctgcgtgagatcatcagcatggttgcgacatcatctgtatttcaggcaatgacttatgacagcattatggatggcacttatatgaatgtgatgtacagtggaagttatgtgatattttctctgcttaattatgcattgcttgcagcattcattatttttgttgtcatcgacattgtaaagatcaacaagcagaattataaaatacttggactgatcctgtttgcaatctttttaaagcctggttattatgtatggcgggcacatcttttaaaacgcaaaatggcgtttccaatcgtgtataccgtactttatgcactgctgatcatggcagagatcggatttgtaatgatgcaggcatttagtctggtaatgaatgtgatgtaaaaaatctgaatgagaagtctctctgtttcatatattaaatggacagggagatttttttatgggaaaaagacgaagaaaacgtgcaggtttctggctgaaaggaatatgtctgatattactggtgccggtttttatcacaacactgatgcagcgaatgcgcctggaaaacctcatttatggaaaggaaggggcgcaggaagtactgaacacaatagacagtgtagagggtatggagagggaagtccgggagcatcaggaaaataaaaaagatatcttatcaggacaggcagagacacgaagtggagacagtaaggatgaggatgaagaaactgagatgaaggtcttgcagattgtggcgcaggagatcgggattgataaatcagcggaaacgatcaaagcacaatgtgtgatcgccagaacgaatctgtatgatgccatgcaggcggggacgaaggaaccggagagcatgccgccggatcagcagcaggagctttggggagaaaattttgataaaaattatcagaaactgaaatcctgtgtggaagcgacggcgggggagacactcttatataacagaacttacatatatgcggcatatcatgcgatcagcagtgggcggacacgcagcatgtcagagttatatgaagatgcagacatgccatatcttgttacggcagaatgtcatgcggacaccacggcggaaggttatctttccgtgttttattatgaaaaagaagaatatctggaaaaatgcaggactgcatatccagatgcagagctgacagaaccggcacagattgaaatcgtaagccgcgatgcggcagagtatgtgacaaaaatcaaagttgcgggggaaacatacgatggagagcagttccgccatgcattagagcttccatctgcctgttttacgattacggaaatggacgatcatgtgcgcatcgtggcaaggggcatggggcatggatttggattaagccagaatacagcagaggaacttgcaaaagagggatatggctatcgggagatccttgcttatttttataagggagcagtgatcgggcaggccggaaatttataggaaagaaataaaaaaacaatcgtataaaccatccgggatgtggcaacactatggttaaaaataaataatggatggtgagaaataatgaaaaagaaaggtttttttgggtacagacaatatgtgattgcagggctgctgattgctttagcggcagttggaacgactgcgatatacagcagcagacaggaaaaggaacgggagcagatggaagccgagcttgcagaagaaatgcagaaacaggcagatgatattgtagcagaggagagttcggagcagtctgccgaggcatctgcactggttcctccaaaacagtctttaaatgaaatggagaatgaactggatgatcctgccgtaacggcggaacttgcagaagaaaataatgcagcggaaacggaagaaacagaagcagcacagagcattcagacgacaggcaaagcacagacacttcatttttcggaggatctgctctggccgatggagggaaacgtgatcatcaattacagtatggattccacagtttatttcccgacgcttgaccagtataaatataatccggcagtgatcattgcaggtgaggtcaatgataaagtctatgcagttgccaaaggccagattaagagtattgaaaatgatgaggtgacaggctgtacagttacggtcgatctgggtgatggctatgaggcagtttacggacagttaaaggagctgaattttgcaaagggagattatgtggaggccggacatgtattaggatatgttggagaaccgacgaaatacttcacggtagagggaagcaatctgtattttgaacttgataaagatggcacacccgtggatccggtagcatatttcgaataaaagaaaaagcattcttccttgaataagacacagttctattttataataaaagacggtattctttttatggagaaaaccttagaagtgaatgtctggtgtggaatgagaggaggcagtgcacatggaatacgacggatatgatgaagttgtccgcgcatggatacagggagtgtacgacagccggggaaacgatgcaaaacggacattaaagttgtgttatgatattgaacagtatgcaatgaaaaaaaatgatccaaagctgcttggatttgcatactattacagtgcagagacttattatctgttaaatgaaagtgaaaagttttttttctgcatcagcaaaggcgtatcttatctgaacgaatcaaatcagtgggaacttgtggcgcgtgcatataatctgatggcaattacggcgatcaatcggggaaatgagccgatcgcacttgactattatctgaccggattgaatttctgtacgaaatatcagttaaaacaggaagaaaccatgatagatataaatcttggaaatttatatttatcctgtggacaatatttagaggcacagagatattttgaaaattgtggacagcatgtaaaggattttgtgaaagatgataaaaattaccgcctgatcacctgtgtttatataggaatgggaaccggttttttgtatcgcgatatgccggagcgtgcagcacattatgcagagcttgtctcggatgagtgcgcgggccgtattgatggcattgaactgctcagttttcgctgttttaaggcacaggtatgccatgcaaccggaaagacggcggcgcgtgatgaatgcatccggttgatctgtgaggagatcaatgcagatattccgatcatggatatttttagtgatctttatgaattcagccagcttttgcttgaaatcggaaatgatgatgcttttttgcgggtaatggaaattttagagccattgacatggcagtcaaagatcgtcaatcttcagaggcagattatttccttgaaaattaagttttaccgtatgcataaggataatgatgcatatttagaggctgcggggcagtattacgagttgtccgagatcatggaaaaagaaaaacaggcgatgatcgcaaatatgcttgatgtgcgggaatctttagagcgggcgaacaaaaaaagacgcgagatggaagaagcaaatatacggcttctggaaaagtcagagacggatgcactgacgcgcctggcaaaccggttccgccttaatgattatctggatcaggtatttgagaaggcattatcagagcagacgccgcttgccatggagatcctggatatcgattattttaagcagtataatgataactacggacatcaggcaggggatgagtgcattaagcggatcgcaaagcagcttgagctgatgcagaatgatatgatattctgtgcgagatatggaggggatgagtttatcattctctatcagaatatgacggaggaagcggtcagacatgcggcagagggattgcggcagcggatcattgatcttggaatccaacatgcatattctaaggcaatgcctatcgtgacaatctcacagggaatctgttatgatattccgaaagatgatacaaagagctgggattttctgcatgcggcagatgcgatgctttatcaggttaagaaaaaatccagaaatgatcttgcactgggacacttagcagatgtgagtgacaaataaaacaggaaacattttatgaatgcggcatagaatataacagatagaaacaaaaatccgcaatcgagtttttcacacggaaaaccggaagtaaaaagtgatgcagtagaatggataatatacatgattgtcgattgcttttaaataagaagtaacacccagaccaaaaatcggcgacgattttgtcgaaagatgaggtttggggtacataattcccgaaaatccgcagttgatgcgaactgttgcgcgggggaatttcttgacaaaagtacgggcaccgtgttatcattcagactgttgcgcttatgggggctgttgatcagccccttgttttacgcgcgccaatggcgcacgtttctatagaaaggaaatatatggaaacagttagattcgatcagttagatttatatccgcaggtattgcgtgcgatagcagaaatgggatttgaagaggcaacaccgatccagagtcaggcaattccggttgtgatgtccggtgtggatgtcattggacaggcacagacaggaaccggaaagacggcatcatttggaatcccggtactgcataaagtagatccgaataataaaaaaacacaggttatcatcttatcaccgacaagagagcttgccatccaggtggcggatgagatccgtaaacttgcaaaatatatgcacggtgtaaagatccttccggtgtacggcggacaggagatcagccgtcagatcaaggcattgaagggtggggcacagattattatcggtacaccgggacgtgttatggatcatctgcgcagaaagacgatccgctgtgaggcagtgaacacgatcgtacttgatgaggcagacgagatgttaaacatgggattccgtgaggatattgagacgatcttagagtatatcccggaggaaggacgtcagacggtgttattttctgcgaccatgccaaagccgatcttagatatcaccaggaaataccagcacgatgccgtgacgatcaaagtggtaaaaaaagagctgaccgttccgaatattgagcagtattactatgatgtaaagagaaaagacaagatagaagttttgaccagactccttgattattataatccaaaactctctctggtgttctgtaacacaaaacgcatggtggacgaactgaccgaggaactgcagggacgcggttattttgcagagggactgcacggagatatgaagcagacacagcgtgaccgtgtgatgcgcggtttccgtaccggaaaaacagagatcctgatcgcgaccgatgttgcagcgagaggtatcgatgtggatgatgtggaagcggtattcaattatgatattccacaggatgacgaatattatgttcatcgtatcggaagaaccggacgtgccggaagaaccggacgtgcgtttactttcgtcaaaggaaaagaagtatataaattgaaagatatcatgcgttactgcaagaccaagatcgttgcaatgccgatcccgtccacggatgatgtggcacagatcaaggctgagaaggtcatggaagaaatcggaagaattatcgacgaggaaaatttaaaagatacgatcgatatcatcgaaaagcagatcaatgaatctgattatactgcaatggacattgcagcagcattcttaaaacaggcgttgggacagatcaatcttgacaatgacagagaggactcttttgattttgacaataccggagctgaagagggcatggtgcgtctgtttatcaacatcggtaaaaaagaccgcgtgaaaccgggcgatatcttaggtgcggttgcaggcgaatccggcatgccgggtaaacttgtcggagccattgatatgtatgataaatacacattcgtggaagtgccgagagaatacggaaaagaagttttagaagccatgaaaaatgcaaagatcaaaggccgctccgtcaatatggaaccggcaaaccagaaataaaagagcagtaaaaaatcccgtgtgagtatgatttttaaaatcagtctcatacgggatttttttgtaatgttactgtccgatcttgctcacgatactccggttgatcttcattaagaaaaatgcagttgcacccacagataccagttcagcgatcgggaatgcccaccataccagattgacattgccggactgtgctaacaggtatgctgccgggagcaggatcactaactgtcttgcaatggatatgcacatactgtagactgcttttccaagtgcctggaaaatactactgcaggaaattccaaaaccggcaagcaggaagcttaaactgatgatacgcagcgcagggacaccgatggagagcattgtgtcggaagcctgaaacatggagagaagctgctttggaaagagctggaataaaagcaggccgactgccatgatgctgactgcataagcgacacagtgttttaaagtttttgtgacacgctctttgtttccggcaccgtagttgtatgccataaccgggatgacaccgttgtttaaaccaaaagccggcataaatacgaagctctgcagtttaaaataaacgccaaacaccgcggttgccgtggaggaaaacgcgatcaggatacggttcataccgtagttcatcacggaaccgatcgcctgcattacaatagagggaacaccgatcacataaatctgtccgataatatttttgtccgggcggaaatggtgcaggtcaatctgtacttccttattttttgtgtggtttaaaacaactgccagaataccggcaatcatctgtccgatgacggttgcagcagcagcaccggaaatgcccattttcgggagaccaaacagaccaaagatgagaactggatcgagagcgatattgatgatcgcaccgacaccctgtgtatacatggtataaatggtttttccggttgcctgcagcatacgctcaaacataagctgcgtaaaaataccgaaagaaagacagcagcagatcgtcagatactgttttccataaacgatgatctcttcaatatctgtctggctgcggaaaaacggttctgcaaaaaacagaccgatgatcagaaagagcagatagctgacaagaattaaaaatacagcattttctgcgaccttatttactttttcggtatccttttctcccagggagcgcgctaaaagcgcatttacgccgacggcagttccgacaccgacagcaatcataaggttctggatcgggaaagccatagacactgcggtcagggcattttcgctgatcatggcaacaaaaatactgtcgacaatattatagagcgcctgaacgagcatggagatcatgatcggcagggacattgagataatgagtttgtcaatcggcatgacgcccattttattttcttccataaatcctcctttgtttaacctttgtgtaaaaaattccataatttactcccggaaaataaaaacttccgggagcgctacctttctatattagcattccttttatctgaatacaaggtacaacttcatcaaatcttaatgttttgactgattggaaattcataattattccgttacaataaaagcatgatcataaagagacaggtttatgtaaaaatctatcgaaaacctgtggaaaaggggaaaacatgtacagtatactggtgtgcgatgatgagaaagacattgtttcagcattaaaaatctatctgatggcggacggttatcaggtatttgaagcatataacggaaaagaggcacttgaggtgttaaaggaacaggacatccatctggtactgatggatatcatgatgccggagatggatgggattgcagcgatggtgaaaattcgtgagacgagcaatgttccggttattttactgacagcaaaaagtgaggatacggataaagtgttagggctgaccgtcggggcggacgattatatcaccaaaccgtttaatccgattgaagtgcaggcgcgcgtcaaatcacagctcagacgctatatgcagctcggaggcggagccatcagaaaagatgttctctcgatcggcgggatcgaacttgacgaccgcagcaaagaggtgtcgcttgacggcgaaaagatttctctgacacgcacggaatacgatattttaaaacttctgatggagcatcccggagaggtgttttccccgaaccagatttacgaacaggtatggcaggataatccctacggaacggagaatacagtggcggtacatatcaggcatctgcgggaaaaagtggagtataaccctgcagaaccgcggtatttgaaagttgtgtggggacgtggttataaaatggaaggacaggtatgagaaaagtgaaaaatttgagaggatcgacagcggcaaagatcattgcctggatcgcgctcagtgccagtgcactgtgttttgtgttcagcgcgatgggtgtgatctttatgtttgatgaaggaatctatagaaattcaaaggatgaaacaagaaagcagtggtttgaaaatgtttcctatgaatatggtctgtccgcggtggatgatgtaaggcgggaacagccggcaggttctgtagaaagcaaatattttaaatatggtattatcaaagcagacagcctcgatgggattgacctgaataatgaaaaatcatatgcggaacgcaacttttcggataagatcagtctggaagacgtgtatacaaacagtgtggaattatcggacgaagatcagattgtatacacaaatggaaattttctgaccggtggcggtgtgcagctcatgtattccggggatgattcgtgggtgagcgtctatgcggaccggatctgctatgatgaggcaaaaggtgtttttgtttatctggcgggaaatgagtattatccggtgcagaaggttgagacggacatagacggatatggaagcgcagtttttacttatgataccgagagaaaaatgtatctgtttgaacacacagacgggacaggagatgctgcttctgcggaaggaacggttacagatgagacattgaccgatgctgcggacggggatacagtagcagaatcaacggaagagccactgacggatgtcacagacagcggcatggatgatattgcaaatggagaatacgtcacgcttgacatgtttgatggcacgcgcatggatgtaaatcactggggaaatgtgttattagacggagtccgggagatatccatggatgaggtcgaccgggtggactcatctgaaaaaaacaaagaagatgccagcgtttcgtatacaacatacgaggattattatcttgacagcaactatacactctgggtaaacatggggaacacatcaccgaaaaccacttatcagatggttgtgatcctgccgcagaatgttgggacagactggaacagtacggactggtacgtacaggcaaataccctgctggattttgtatacagcatgcgttacacggcgttagtcacaatgtttgtaagttttatcatcggagcagcagcctttgtatttctgatgtgtgcggcggggcaccggaatggaacggatgagatcgttacgactgtctgggatcatctgtggctggatgtttttgcagtgggggctgtgctggcagaggtatttgttttctatgtggcagcgatattcctgataaatgtcgatgttgcgtatctgccgtttatcttatttgttactgcagttgcaaccctttgcatgggatggctgttgttactgtttttattaagtttttccgtgcgggtaaaattgggaaaatggtggagacataccctgtgttaccagcttttccgtaaaatcggacagttcgcccggatgatctgggaaaatatcgggtttctctggaaagtgatcctggtcatgctggtacttgcattttttgagggcataggggtattgatgttttttaattcagacatagcccttttactctggctgttagaaaaactggttttatatccgctggtcctgtggtactgtgtgcagttaaaccagttaaagagcggaacggaaaaaattgcaggcggtgagccgggctatcagatcagtacaaagcgtatgaccggtatatttaaggaacagggagaacagatcaaccatatcagcgacggcatgacacatgcgatcgaagagcggatgaagagtgaacgtttcaagacagaactgatcacaaatgtttcccatgatatcaagactccgctgacatcgatcatcaactatgtggatctgctggaaaaagaagaactgcacaacgagacagcgcaggagtatttagaggtgttagagcgccagtcaagtcgattgaaaaagctgatcgaagacctgatcgaggcttccaaggcgtccaccggaaaccttccggtacatttagagcggttagaagccgggatatttatgacacagacggtcggggaatttgaggaaaagacaaaagaggcaggacttgatcttgtgatcgaaaagccggagacaccggtctatatcatggcggacagcagacatttctggcgtgtgatcgataacctgatgaataatatctgcaaatatgcccagagtgggacgcgtgtctacatcaatcttgaagtaaaagaggcacaggtgtctatcaccttccgcaatacgtcaaaatacccgctcaatatcagcagtgatgaactgatggaacgttttgtgcggggcgatgcatccagaaatacggaaggaagcggactcggactttctatcgcaaacagcctgatggatcttatgggtggtacattccgtctgtatgtggacggagatctgtttaaggtcgtgctcgggtttgccgagacagcagagaaagaaacaaaagaaaaaatcgaagaactgtaattgttggaagttgcactacaggtgtgaacaataacccaaaagcatggttgtccagagggatgccatgcttttttcattcataggaaattacgtcctatgaatgaaaaagccctccgggcgggatgcgcacttcgcagagaagaagtttgctgtaaacagcaccgcccgggcgcgaaagagtcgcaagcgactccttgttcctgtgcggcgaaaagcagattgtgaaaaggaaaattggagggtataatatgtagggaaaagggagagcagcttatgaaacagataaaacaaaagtggttgtaaaataatcagttgaatcaagtggcaatagtataaaaaataaaattttttacatatagaaatggagcttttatggataacaataaaatcgatgagggattacagggaaatgagaaaatagaaaccgcaatcgcggcactgcagcaggaggcaagcgaagagatgttagcgcataccctgacagtgatacgcagacgcatgaaagagggcggtcagtttatcgtagcggtggaaccgccgacgggcgggaaccagatgcagatacaggcagtgcagacgccggacggcaatagctggtgggcggcatttaccagttttgaggaagaattaaagggaagcgggagtgtaatgtctacatttttaacaggaattgagcaggcattccgcgcggtacttgccgcagaagagacaaagggaattatcgtgaacccgtggaaccggacgatcatgctggataaaaacctgatacggatcatacttggggaaccggcataaagtatatatattgattttcaaacgaaaaggatagacagctgacaactgtctatcctatgaaatgcttattgtctatgcggtttaaagattaaccgaagtatctgttcaacagtccttcaaatgcttttccgtgtctagcctcatcgcgtgccatctcatgaacggtatcatggattgcatcaaggtttgcagcttttgcacgttttgcaagatcagtttttcctgctgttgcaccgttctcagcgtcaactctcatctgaaggttctttttggtgctgtctgttacaacttcaccgagcagttctgcgaattttgcagcgtgttctgcctcttcccatgcagctttctcatagtaggaaccaacttccgggtaaccttcacggtaagcaacacgagccattgcaagatacataccaacctcagagcactcaccctcgaagtttgctcttaaatcggatacgatatcctcacttactccttttgcaacaccaactacgtgctcagcagcccatactttctcaccttcctgcaatttgaacttttcagccggagctttacataccgggcagatctccggagctgcatcgccttcataaacataaccacatactgtacatacatactttgccataattttaatctccttttctttgaaaaatgttatttgtctgctgtaatagatttccccgcttatttgaaatctattactgtgtgctttaaattgatatcagtaactattactgattttaaatgaaaaacttctttttgtcaacattattttatattattttagaagttttttggggaaaaatgatcaggaagtctgtcttttggctttacaggaagagcattttccgtaaaaataagtcacatgtccttcaatctcaccgtcaaagtcctgtgcggcaagaacattgatatgatccagtcccgttacatttaaatccagaacgctcccgcattccttgcagataaaatggtaatgcggctttggattaccgtcaaaacgatcaggtccaattccggtggacagtttctggatctcaccgatatctgccagtaatgacagattgcggtataccgtaccgagactgatattcggaaattcttccttgatattcatatagacggtctctgcggtagggtggtcataacgcgagatgagaaacttcttgatggattcccgctgcttacttcgtttcagcatattaccatcctttcttgataatagtaattgttactaaaattattatataatcacagagaaaaaatgtcaagatgaagatggtttggtttttcattttaatctttgataaacgaatgctttgtggtatattggaatatagctttgacaataaatggcagtgtaagggagaagcagtttgaaagtaaagacaattctgggcaggatatattatatcatagtggcagtgtgtgtctttctgcatgttgttattttatcattgagtttttttgacaacaaacatcaggaaaaatattgccgcagcattattccggacagggaataccagacagatgaggataaccgcaggtttgtattttctgcacagaagataaaggatggaggggactgtctgcgtttttatacggcgcatatggaagtcagtgtgtacgctgatgacacgctgatctatcatgtcggacagcagcaggcaatgccaaaggtgtcacccggagttatgtggaattatgtcgggataccatccggggcagaacagatccaggttatgatccgtgcggactatccggaggtcagacaaaagcaaattgatttttcaatcggcgggtatacccagatgtatagcggaatgttgtacagatccatgccggtaacatttatctgtctgctagaaatattattgggtttcttcatggtactgtggtggctgatcgcacggaccagaatgaaaatgaagcagacgctgctgcattttggcactttttcctttctgaccggaacttgggcactgaacgagacagatgccgcacttctgatcctgtttccggtcagagttgagatcgtattcgtatcagcggtagccctgatactcatggtgccttcctttgtgtggtttaccaagggattctttgatattgaggacaagtggggatcagatattatctgcacgctggcatatctgaatctggcggtacagcttatattgcagcttgccgggatccgaggcttccggcagatgtacacggtcacacatgtcctgttggggataacgctgctttatacgatagtcatgctgatttctgagtacagaaaaacgaaggtacaccgccatctgcggtttgttgtggttggtgggtttattcttctgggaacgcttgcggcagatctgctgcacttttattacggatcatttcagacaagtatatatggtatgtatggtgtttttatctatatcattatttttgcggtcgaagtatgcagacaagtggcagagcaggtggatgcagggcggaagctgcagatctatgaagaacttgcaaccaaagatatgctgacgaagctctataaccggaatgcatatgatgaatggatcaaggtaaacaggcggccgaagaaggcgaagattgttgtttttgaccttaacaatttaaaacagtgcaatgatacgatggggcacgcagccggagatgcatatatccaaaatgctgcggggatcatattgcatgtgtttggaaattgtggaaattgttaccggatcggtggagatgaattctgcgttgtgatctatgggaatgatccttcagatatggaagagttattccggcagatgaagcaggaacaggatgagtttaattcgaaaaacgcaattccacagatacagattgcctatggctatgcggagtttgacccggaaacagaccgggatatcgaggataccagatcccgtgcagatgacaaaatgtatcaaaagaagagagaaataaaagcgggataccaatgaaaatgaaaggacagagtaagtagttatatttagaccgtcaggcaatggatgttatcgtttatgttctaatttataaaaaaacggaatacaaatagaagaaaacaaaaacagagatgagagattgcctatggcaggaatgaaacggtttattgcatatatatatgggtatgaaaatgcaaaaaaggcaggcaatacgggatttgccaggatcgagctgcggggagaagagtgcaggcttgaaatccatctgcgtagtgtctatgctgcgcagacgcactgcagggtttatctgtttcgcaaacagggtaatcagatggagggaagcctgatcggagaaatggatgtccgcaatggtgctggagattttgccacagcaatgaaaacaatgcatataccgacatcatcactcagttttttcgagatggacgggatttttttgtgcagcgaagatggacgtattttcatgagccgctggacggagggggagccgcttaccgtggatatggagcactttggggagtggagagaaagacagccagaggaaccgccggtggaagaagagttatatacaaaagaagacctgcataaaagagaagatatgcatgcaagagaagatatgcatgcaagagaagatatgcatgtaagagaagatgtgcataaaacggaaaatatcatatcagaaacagaaaacaagcctgtgtcaggtaaaacacctgtgccggacagtatgaaaaagcaacagaaaaacagaaaacagaccacccagccggcacagaaatatgaaagtgaactcgccgcgacagaacttcccgcgcgcaattttttcccacagtaccagtggaaggatatctgggaacagtttttaaaaagccatccggcaaacacgccgttctcagaaaaaaatattacctgtatcaaaatcgaactaaaagatattcgtgaactcccgaaaaaatactggtatctcggaaataacagttttctgttacatggattttttaattaccggtatctggtgattggaaaaatagaagaagatacacaaaacagatggtttttaggggtgcctggcatttatcagaatcaggagcgtgtcatggcgatcatctttggattcccggaatttatgccggagcaggttgaaaaccggtttggctgctggtatcgtttttttgaggaataactgtctgacaaaatggagacgtttttgacaggggctgtgcataaaaaatgcagctgttaattgtcggtggaagggttgagatacgcgtagcgcagatgatctgcccatcggttctggataaaaaaacagccgcgttctacaccttcatactgaaaaccgagcgattccaaaaggtagatggagggcttgttttccggcataacacgtgcgaatacacgatgaagatgaaggtcgtaaaaggcaagtgacatgacttttttaatcgcttctgaggcatagcccatgcgccggaatgctgcgtcaaatttatagccgatctctgtgcaggaatatgctgcaaagcggatgtcgtgcaggcatacggttccgatgatcatttgcggatcatccttccggaaaacatagaaacggatacactgttgttttaatgcgagatcccattcacactttaaaactgcctgctggtaggatgcggtataaaagttggcaggtcttgtcggttcgtaggcttcaaaactttcacgattgcggttctgaaaatttaaaaccgcatttgcataattcggtgttaagacttttaagatcagccggtctgtctgagattcatattttaaagaagcgtttttccactgcatcaggcaagatgcctccttctcgacaaaaatgaaaaaatgcggtacaatactgcatactatatagtataacatttcggggaaactgtccatgaatcaggatgaaaaatacatgaaagcggcgatacggcaggcaaaaaaagcgtatgcattggatgaggtgccgatcggctgtgtgatcgtgcagaacgataagatcattgcgcgtggatataatagaagaaatacagaaggcaacacattagcgcatgcggaactgaccgcaatccgcaaagcgagtaagaaaaccggtgactggcggttagaggactgcacgatgtatgtgacgttagagccatgtcagatgtgtgcaggtgcgatcgttcagagccggatgaaaaaagtggtgatcggaagcatgaatcccaaagccggatgcgccggctcggtattaaatctgctccagatgcagcagtttaaccaccaggtcgagatagaaaagggtgtgcttggggaagagtgttcggcaatgctttccacattttttaaagaacttcgccagaaaaagaagtcttaagcgcgcagagatttcgctttaaaaaataaaaacccctgttctgcctgtgaattccaggcaaagcaggggatatcaatttggggtattaaattactgtttttttctgtataatcactcaaaaaggacaccttttattgtataattatgttatggaacaaaacatacgaaagaaggtgtcctgaatgaaaaattagcattgaagaaactgctaacttatatgaagagtgtatataaaatcccgcaaaaaatcaagtgtttaacggacgaaagaaaaagaaaatctattccattgtttaacattgtcatgccggtactgctttttctgatgctgcagtatgaaagtttccataccattttttcaaccccggaaagcatgtcgaaaagactgaaaaactgtatcagtggaaggattccaaaagttgatgcagtccgcgaccttctctccagaataaacccggatgaaatacgcagcatacatgaagaaatgattgatatcataaaacgtaaccgggtattccgggaaggaacgataggcggatatgttgtggcaggtctcgatggtgtggaattattctgcagtacaaaaaaatcctgtccgaactgtctgagccgaaaaaaacacacaggggaaaccgaatacttttaccggagtgtggtgtgcatgattataggtaaatcgccacacgtaattctggggcaggaaatgttaaaaccaagggatggttctgggaaagacgaaggagaactgacaggcggaaaaaggttgattgagcagctgaagaaacggcatggacattttgcggatgtgattgtggcggatgcgttatatctgaatgctccatttatcaacactctgaaggaaaatggtctggaaggggtgatacgcctgaaagacgaaagaagaatgatttttcaggatgcagagcgtctgttcaaacaggatgagggaaaaaaggcatctttctggaaagggaaaaagaagattgaagtatgggatctttctggttttaagatggaagggtgtccatataaactgcgtgtggtgcggtatcatgagcagtgggaagaaaatggaaaagaaacagagcgtttcatgtggcttgtaacgactctggaagcggcagactaccgggtcttatgggaaatgatgcaccgcaggtgggacattgaggagaatggtttccatcaattgaaaacgtattatcacgcaaagcactgt

SEQ ID NO: 5126 - DNA, 80986 bp, Unknown
  gut microbiota DNA sequence
caaattaggaatgacatcagaacctgttgacgaagaacgtttaaaaaaatatttagaacaacagagagaaaagagtcttccgacttcggtatatattgagataatgacacactttagaaataatccaaaagtgttacaaaatttacttgagtttaggtatgcgaaggggttgccactttttaataatattccagactatgttgtgagtgaagatgaaattaccagtgttgcatatatggatcaagcagctctcaaaaattatgcggatagattattaaagagcaaaattcaaattgagagtaaattcacacttttattttttgaaattacaaaagatttatatgctcattacaaattagagatgacagatggactgtcacaaaaaaacaaagatgctatattggggtatattggaagagttgcatataaggaatatcaaaatttattagaggaaagaattaaagtagaactgcagtcagggtatgatgaaaacaaagagaaaaaagtactcaaggatttttatatccaagaattgaatgaagcatgtgtgcttactaatattattattcaaggatgtgttgcttgcaaacaggacaaggaggatattataagtattgtacagcagacatatcaaaaaagtattgaaagtggtttggatggaaatacgggaacaatgccgtgtatagtagataccttggcaacagaccaacatttcctagatatagcgaaagtaaaagtgtcagagatgtttaaaaaaggaaaatattctgctacacagagaagatatcttcgggatgtaatgtttacatcatagtttgaaagaggaaaaaagttagacaagaatgatatttttgatatgctttgtgttggatgcctagatcatatagataaaaccaagaatgcgtgtgttttaatagatgcatcgtcatgtgttctctcatttgacacaagaatgaagaattttataggaactgttaaaccggagaatttgagattaattgaaaaaatccaaaatgaacagtaaatggtcggaatcaagcctccaagtccccaacagatttggaggttttcttctgcccatttttatcgggaagtaatttcccaaataaacaatctatggtacaatatcttagaagttatcatcaagggatgagtagtggaccatagagaaagagcagagtaatcgtaagctggtctggcttacatctaaaatacaatgcaatcttttgctatgcagggacataagagagtgcatcatgtcaattttttgtagtctcatcagagagtgcaacatttttcgctcccagagtacagtgaaaactctggaaagtgcatctcaattaccctatcgacacatgtggagacagtcgtcttgctttccaagtgaatggtcgatacaagaaaagtgaaggtggacttctccctggaggatatggatttatctgaatttaaggggcgctaaaggtccggggaacctttgtctggcacggatcgaagcggagcggagacaagtagcttaagagcagataaaggcatatgtactgcaacagacaggacttaaggtttcgtcattgtatatagcacaggagaggaaaacagggtagctgatgtggaacatattccgtgggtggagcgggagctgatggttatgagagaagtgagggagctgcagtaataaagatgatttatataattttaactttagtttcaggaattttgctgtcaggagtatggtttgggcttaattttctgatacagatatgtgtggaaaagtcaaaagtaaaatttttggaacgctatagtgtaatagctgcatctgtgataccattagttttcatcttaaaatacaacagactggaattatcatagtcttgctgattggaaaaactggatgattctggctgttacagtattattgtcagccattgtcatttccataaatcaggttgcggaaatcccacgcggaaaagaattattgctatatgcgttagatggtgtctgtatggaaatcccgcagcgtatgatgatgcagacatttagcggtgttcttttcatgcactggggattagatttgtatttgtccataccggttacagcgtttgtctggtgtatcagcatctgtatacaatgtctgatctgcaaattaaaatttgaccggaaaatagtaatagagatagcggcatcttttctgttttctatgggagccggattactattattaaaaagcggatttattggactacctatggcaggacattttttagaacgtattttgagtacaattatccgtaaaatccgaagataaaagaaaggaagaaagtccatgacaaccagacaggaagcattatcttttggcatgacatttaaagatgtctatcaggacacaccgttccacgatccaaactggattctggtgcggtataaaaagaacaaaaaggcatttctctggacttatgagtacgaaggacagatgcgcataaatataaaagttgatccgcagtggcgcgatttctggcgggaggcatatgcagcggtgattccgggatatcatcagaacaaggaacactggaataccgttattctggatggaagtataccggatgaggaaatcagacggatgatcgcagagagttatgatctgatctgcggaaaaaaataaattcatttgtaaagaacaatcaagaagtgaggcaatagtgtgaaaaataagatttttcacacgcaagatttgtgcttgcgcacaaacttgagatgcgcagaaagctgcgcaagaatggagatttttatgtcagcaaaagatacaatggaaaataaaatcacagagggagtcatctggaaacagcttttattattctttttcccgatactggtgggaacatttttccagcagctttataatacggtggacgcggtgatcgtcgggcggtttgtcggaaaagaggcactatcctgcgtcagcggttcgtccggtcagatcatcaatctggtggtcggattttttaccggattatctgccggcgcaacagttatgatctcccagcattttggggcaaaaaatgaggaacagctgcataaggcactgcacacggcatatgcatttgcaatcacaggcggtatcattgccggagtgatcggtgttgttatgacacgtatggttttaaaatggatgaatacgccggaaaatctgctgcctgactcgacactttatgtgcggatttattttgcgggactcttatttatttttgtttacaatatgggagcggcaatcttacgggcaatcggcgattcgaaacgtccgctttattttctgatcgtctgctgcatcgtcaatattattctggatctggtgctggtgcttggatttaaaatgggagtccttggcgtggcagtggcaacactgatcgcgcaggggatcagcgctgtgctcgtcagtgtggcattaatgtatcatactgccggcttaaagttaattccacgcgaaatcaggatccataaaagtgtgctgaaaaatatgctcgccatcggactgccgaccggtatcgagtcgagcatgtacagtatttcaaacgtgatcgtgcaggctgcgttaaacggatttggcgttgacacaatggcggcatgggctgcatttggcaaaatagacagccttttctggatgatcaacagtgcgtttggaatcgctgcgaccacgttcgttggtcagaattttggtgccggaaaaatggaccgcgtccgcaaaggaacaagggaatgtcttggcatggcacttgtaactgcgattcttctgagtgtgatcttaatgtcggcgggaagatttttatttggcatatttaccacagatgcgaatgtagtggaaattggtcttagcatgatgcagatcatatcgccgacctattttctgtttgtgtttatcgaagtatattccggcgcactgcgcgcgcaggggcatgtgatcgtgacgacggcaatgacgatgatcggtatctgtgtgctgcgtgtcgtatgggtcacctggatcgtaccggatggcacactctcacagatcgtggcatgttacccaattacatggctggtcagcgcggtggggatgatcatttattatcattataagcagaaaaagattctggaaaaatttgctgcaacacatgatttataaacagagaaactggaagcagttttttatagctacatggttaaaaataagttcaggaaaagaggatataaatgaaacagtcaaaaaatgaaattaatctcggcgagggaagcgtcggcagacttttgctgaccttggcggtaccatctgtgatcgcacagctcgtcaatcttctttacaatctggtggatcgtatttatatcggtcatatcccggaaaacgggggcgtggcactgaccggtcttggactctgcttcccgattctgatgattgtcacggcattttccggtctgatcgggtatggcggggcgccgcgtgttgctattttcatgggaaaaggcaaaaatgatgaggcggaggagatactcggcaactgtaccatggcattgatcgtgatcgcattgattttagttgtggtactgcagtttgcagcggagccgcttctgatgctgtttggtgcaagtgacaatacgctgccgtatgcactttcttatctgaacatttacggaaaagggactttgtttgtcatgcttacgatgggattaaattcctttatcaatacacagggattttccaaagtcggtatgaaaacggttctgatcggggcagtctgcaatattattttagatccggtctttattttcgcatttgacatgggtgtgcagggagccgcgcttgcaacggtgatctcacaggcaatttcagcggtatgggtcatcctttttctgacgggcaaacagacaaagctgaaaataaagacaaagtattttaagccgaaagcctccgtacttttgccggtatgtgcacttggtgtatcgccttttatcatgaatgcgacggagagcgcaatcaatattgcatttaacgcatctttatcacgctacggcggtgatgtggcggtcggagccatgacgatcttaagcagtattatgcagcttcagtttatgccggtgcagggaattgcacagggagcgcagccgatcatgagttttaattatggagcaaaaaagatggatcgtgtgaaaaaggcatatcgtctgcttatgatctgcagttttacatacacgatgatcttctgtctggcggtggaaatcgcacctggattttttgtgcatctgttcaacagcagttcacaggaattatttgaaatgacaaaatgggcactgcgcatctatatggcagcgaccggagtattcggaatccagcttgcggtgcagcaggtattcatggcactcggacaggcgaaaatctcattgtttattgcgtgtctgcgaaagattatcctgctgattccgttgatttatatcctgccgcatttctttgcggataaagtatttgccgttttttttgcagagccggtttcggattttatttcggtgacagttgcagcgacattatttttcctcaacattaaaaagatattgaaagagggagaagtgtgagcgtataaaaaaatctgaaactgaaaaagggcacgaaatactgtctgatggattcaaaaaattatctgacagagaaagatacgtgggtaacaaggtcaaaggtatacaagtttacgtcaaaataaaataacgcataggaaaagagaactgtgggaaaataatctcacggttcttttttacttgacaagtgatggtatcttcctgtaagataaaaaacgtaaagattgcacacaattaaatttaaaacaattattttgaaatggagagaaaaatggagagagcagacatagcgattatcggaaccggacctggcggcgtttctgctgcgttgacggcaaaggtaagaaataaaaatattttgctgatcgggaaaaagcagatgagcgacaaggtcagcaaggcgcatcagatcatgaactatccgggactcccggcggtgaccggagcggatatggcgaaggcgtttgaaaagcagcttgccatgatggagatcgatattacggacagccggatcggcacagtctatgcgatgggcgactattttgcaatccaggcaggcgaggaagtgcttgaggcaaagagtgtgatcttagcgtgcggcgttgtctcaggcaaaacacttccgggcgaggaagagatgttaggacggggtgtcagctactgtgcgacctgtgatgcatgcttttataaaggaaagaaggttgccgtcatcggttacggaaaagacgcggaacacgaagcggactttcttgcggaagtggcagcagaggtactttattttccaatgtatcaggatgtacctggcgtatcagagcaggtaacggtcataaaagaacgtccgaaggagatctttggtgaaaagaaagccgggggacttcgcacagagcagggggagtaccttgtggctggcgtttttgtactgcgggatgccgtatccccgaaacagcttgtgccgggtctggaattagacggaaatcatgtaaaggtcaatctgtcgatggagacaaatattccgggacttttcgcctgtggagatattacgggaacaccgtatcagtatatcaaagcagccggacagggcaatgttgcggcattatccgcagtggcttatctggatgcgaaaaaacacgaagccgggaagcagtaaagaggcagcccgcatgaacagaaatgtgtgggactaaaaccggaacgtattttacagcaaatatatcacaaaaaacagtgtgtcatgcgcaaagaactgcgcaggaaaggaaaatattatggtaaagaaaattacaaataacgatttaaatgaggcaaaaaaaggagtagcagttgttgatttttccgcagtatggtgcggaccgtgccagatgttagcaccggtgatggaagaattatccgaggaactctccggcaaggcagagttttacaacgcagattccgatgaaaacatgggacttgcacaggagtaccgcattgtcagcatcccggcagtcatcgtgttaaaagatggcgtggaagtggcaagaacggttggattccagccgaaagacgcaatgcgcagctttatcgaggaacatctgaattagaaagagctgactgtgaactggtacatcgtctgggaataatctggattgcagaatggtgtaccggtagaaatgaggattatcatgccagataaatatgatgcattaaaactggaaaaccagttgtgttttccactttacgcctgttccaaagagatcgtgcgcaagtacaagccttttttagatgagcttgacctgacatacacgcagtatatcgcgatgatggtgctctgggaacgcagacagatcagcgtgaaagatatgggagcacttttatatctggattctggcacactcacgcctgtcctaaaaaagcttgagcagaaaggctatcttgtacgcgcaagggacagtgaggatgagcgtgtgttaaatgtgacgatcacagaactcggcgaaaagctgaaagaggatgccgttctggtgccaaaaaaaatgggctgctgcgtgtgtctggagaaagaagatgctgatgagttgtaccggctgctgcacaaagtgctgggagtgcttggaaaagaatgaaaataaatcatatttcaaacatttgacaagtgtatctgcaacagaaagttaaagtgatttctccacctaatccagttgcaccccaccaaacccctatggtaaaattatccttataagattgccggaaaacaggcagtcatttatgaagagtagaaaccactgggggttttgttatggaacagacaatgttgatcgcagtactgatcgcggcacttgtgggattgtttttgtttgacacggtgcgtctgcggcgcatgcaggtgcagagggatgcagcgaaagaggaagttgcagaagtaaaaacagagtttttgtcgcgcatcagtcacgagatcaagacaccgatgaacgtgatcgtgggggcaacggcgttaggacttgaagagacggaacatccggagcggatggaagagtgcttaaaccggatacgcggcgcgagtgaatttctgatgggacttttgaatgatctggtggatatgtctaagatcgaaaacggaaagttccatcttcatcccaagccgtattcgtttacggaatttttaaatgaagtggaaaatatgatggagccgatgtgtgagcgcaaatggatccgatttcatatgccgcatgaggagatcaacattaatatgatggttgatccggtgcggtttttccagatattttttaatctgctctccaacgcggtgaagtttacaccggagggcggggaggtcacattccgcatctgtaattatgccacgcacaacaatcaattttgtgccgactatgtggtgtccgacaacggaatgggaatgagcgaagagtttcagcagattctcttccagccatttacgcaggagagcgtgaatcagggtgaaccgggaaacggagccggattgggacttgcgatcgtgagaagcatcgttgatctgatgggcggaacgatcacggtaaaaagcgagccgcagaaaggtacggagataaaagtccatcttgagattgagattgcggagatacagccggagatcgaagtggcacaccgttccgcggaggagatacagaacatcctgcggggaaagagggttctgcttgtggaggatcatccacttgatgttgagatcagcaggcgtatcttagagcatgtggcggtaaatgtgatcagtgcgcaggatggaaaagcggcattagagcagtttaaagcggaagaaccctatcattttgatgcgatactgatggatatccagatgccaaacatgaacggttttgttgcggcgagagcgataaggaaggttgcaaagccggatgcgcagatcattccgatcatagcattgagtgcagacgatacgctggaagatgtgagaaaatgcaaggaagcgggcatgaatgcacatattgcaaaaccggttgaaccgcaaaaattatatcagattttgtgtgagtacctgcttgcgccgatttaagaggcaattttataacagaaaaatccaatgggctttataaagacgatagatagttcacagagacaaaaatttggaaaataagcatgaatagaaaagaaaaaaatccggcagggatgattttgcgcgcggagcggatcagacagggaaaggggcagaaagaagtctgctatggcatctgtgtggtttcgtatttaagtaaaatcgagcgtggatcggcggagccggatatggcaattttaaagcagctttttgcaagacttggaatcaattatgagacagattctgcgtttcttactgagagcaggaaacagatagatgaatttttttacaatctgcaatatgggctggaaaatgaaacggtatggaaaaaacttgccggaaaatgggactggcttttgatgtcaccgcttacaatcgatatcagactggtgtccgcaatttattacagtgagagcacatggaaagaagtagatgagagctttatcgaaagtttgatgaaaaaagaagcggatggaaatgacatacagaattttttgaatgaaaatgtcagcactttagtgcggttagaagactgcatggatgaaaaacagtatgcctattacagtctggtctgttcaagactcacaaaagatccggcagagaaaatggagtggtatcagaaagtacagcacggactgcagaacacgcttggcatgtgctgtctgattgccggttattatgaacaggcagaatacgacgcgattcaccggatggagaaccgttttgtgacggcggcgttggaagagggaaatgtatatgcactggcggattattattttatgaatggaagcgcatatgcatgtgtcgatatggatgagatgatgaccgtctattatgagcgcaccagaaggctattgcagaataccggatggtggaaagaatacgagcagggattatattataatatgggggcgacctatcttgcagttggaagatatgaggaagcactcgactgtttaaaccgtgtccggtcagaagatttcctgctctgtcataaaaaggcatggttacatcttctccttggaaataccagggaggcggatcattatcttgcaataatgaagcagttactttcccggaaagatatgaagggtaagatggcagagcgtctgatgtatgaggaactttgcatggaacaaaagcaagactttacggcggatccggcatatttagatctgatcgaacgactgatcagggcactcataaaagaaaagtcgtttggtttcctctatcagtataaaaatgtgattttagaagcctatacgaggcagcgaaaatataaaaaggcactggagtttagtgaacaaatttccgcaaagaccagaaaaagtacgttttagcgtgctttttttgtgccgattttcccaaatcaattcgctttatctagtttaaagtggaatatataataactgtagcaatcgatatatgatgtctggaatccactatttgctccggacatcataaacattacgttatactacaaaacatgaaatgagggaaaaacatgtcacaccagcaaaaaacactctggacaaaagatttcaccagtatcgccatagcaaccattttaacagccgtaggtggcgaagccatgaacctgccgatcagccttttggtatttgatgagaccggatctacatttttatcagcattggtactgatctgtggcgttttgccggacattgtcctttctgttttagttgctccattaattgataaaggcggaaagaaaaaatggatcgtcggactggatattgtaacggcggtattgtatgcggtaatgggactctatatcagtggtcatgcattcaattacctgttgtatctgatatttgtccttgcagtgggaacaatctcagtgttttaccgtcttgcatatgatgcatggtatccaaatctgataccgaatgggatggagcagaagggttatgcggtcagcaatacgatctatccgcttgtcattattgcaatgtccccggcggcaacctttttgtatgaaaaaatatccatggcacacattttttatctggttgccggtatcacgatggtatctgtcatcgtggagagccggattcatgaggaaaaggaagaagcacaggacgattatacctggaagcagtattgtcaggatatcagggaaggatttcattatctgaaaaaagaaaagggcattcgtaacatctatacttatatgagtatcacaagcggtgtgtcagatggaaataccgtactgatacaggcgttttaccagacagtgccgtggcttacggttacgatgcttggatttttaaaaagtgcggaaatgatcgggcggggacttggcggcatttttcagtataaaaaagaaataccggtaaaaaaacgttatgcgtttaccaaatttgtctatacggtctatggactgatggatattttacttttatatctgccatatccgctgatgctgtgtaaccgtttcctttgtggggcacttggcatctcaagtgcgactatccgtgagacagcagtgcagagctatctgcccgaaaatatgcgggcgcgtatcaacgcattttttaatatggtatttgcgatcggaagtgtggcattccagatggcagcgggagcactgggacagatcatgtcttaccggtttgcaattctgctgctcgcgacgatagaacttaccgccatgtttctgctgatctgccttccggcaaaagaaaaccgccccgtatacgaggcggtccgaaacgcagagtagtgttgataaatctgttggcagttttaagccagcggtttgatctccggcgccgccggacagcgtgccgtcgactctctctcgatgagtctggcgcggatctgcgtccggcagaacgggatgtggtgcaccagagaatttaaaacgacgtaagcgcattttccaagctcattgcgctcctgacgaaccgtggtaagcggcggctctaaggaggcagagagcggcaggtcatcaaaaccgacaacgctgatatcctccggaacacggaaaccgcgcagcttacactcagcgatcacaccggaagcaatcagatcgttgccgcagatgatcgcagtcgcacctgcgccgagaaacgtcgggacgtgatactttgcgctgtctgccacataatagccgtaggcggtcagcttctcatcaacagtcagtccgtgagctttcatgctgttataaaatgcttcctggcgctgctcggataccatggagtgcagggaaccgtttaagaaagcaatttttttgtgaccgagcgtataaagatgatctacggctgcgtcgatgccctcatagttatcggtgccgacgtagcagacgttcggatttttttcgatatagttatcaaagagaacagtcggcattgtggtgtgggaaagctgttgcatccattcgtcatgcagggcgaatccgactaaaaaggcaccgcagaaaccgttctttaacatgtatgtatcatatttttctgtaagctgaaaagcaggtgtgaccggaataacggtgacatcccaattatggcggaaagcattctgtttgaaaccgagtacgatatcgtagccaaactgatcttccgtttcatattccatattttcgataaaaaccgccagtttgcggttttcttttttctttgatttttttgttgcgtatcccatttcaactgcagtgtcaagcaccatctgacgtaattcttcgctgatgtcactcgcgccatttaaaccttttgatacggtactgacggaaacaccgagtcttgttgcaatatctttgattgttgccatgggtaagatcctctccttagtaaaaacagttgatttttttatattatataaagaaaacaaaaagttgacaagcagacatactaaaattttcgaaacttttgagcgctttcgttgtaaaaataaacaaaaacgatatagcaaaaacggcaaatatggcaaaaacgctgttaaaagttgcaaattcgttgacaaaaaacgtttccagtaataaaattatcacagatacgaaaaaaagcgaaaaaaatgagaggaaggaccggggaagatcattggatgcaaaaagaatggcaaggggagcaggaatcctcttagcgatcacaagtttaccatcttcatacggaattggtacattaggagatgcggcattccagtttatagatctgctggtggatttaaaacagcgttactggcaggtgctgccgatcggtccaaccagttttggagacagtccatatcagtcatattccgcatttgccgggaatccatatctgatcgatctggatgatcttgtgcaggagaagctgcttagtgtggaagagatccgaagtttccattggggaaatgatgaagcggatattgattatgcgatgatttatgagaaccgctttaaagttttgaaaatggcgttcgcacgattcgatatcgaaaatgaagtttttgtaacgttctgtgaggaaaatgccagatggctttctgattatgcactttatactgcattaaagaaacattttggtgatgaggaatggcagaagtgggacgaaccgcttcgaagccgggatcctgaggcattaaaagagtatgaaacaacgttacatacagacatattgttctatgaattctgccagtttgaattttttaaacaatggaaaaaattaaaagaatatgcaaataacagaggtatccagctgattggtgatcttccgttttatgtggcattagacagtgtggatgtatgggcaaaccgggaacttttcttattggaagaggatgggacgccaaaaggagttgcaggttctccgccggatgcattttcagagaatggacaaaagtggggaagtccagtatacaactggagccggatggaagaagatggatttgcctggtggcaggcgcgtatgttagaacatgcaaagctgtttgatgtaatacggcttgatcattttgcagcgatcgtaaagtattatgtcgtaccgaacaaggcagaagatggaagaagtggaaagtggagtaggggacctggaaagaaacttacggatgcaatcgaaaaagtgatcggagatacacacatcatcgttgaggatatcgcaggaaagagtccgataccgggtgtgaagaagctgatggcaagaaccggatggccgggcatcaagattttgatgttcgcatttggggatgatacggcaaacgaacatcttccacataattacaccgactgcaatcttgtcgtttatgcgggaacgcatgacaatgaaacaattgttggttacttcagggacaaaacagattatgagcttgcttatctgtacgagtatctgaatatcaaatataaagaagaaataccggatgcgctgatccgggctgcctatgcaagcattgcagatgtggtgatcatacagatgcaggatctgatgaagcttggaaatgaagcgcggatgaatgcaccatccaccgtcgggagaaactggagatggaggattggaaccgatgaactgagtgaggagcgaagggcatggatccggacgcttgcgtcggtttatcacagataattatgttataaagtgcagattgcattttatataaaaacaaagttcatgaaaactttttgggaaaaagaaaaggagaggaaaaaaatgaaaaagaaagcagtgtcattattaatggtagcagctatgatgacaaccatggcagcaggatgcggaaacaaagccgcaaacaatgctggaagcgatgcagcagcagacaacagcacaacaagtgatgcagcagcagaggagacagcaggtactgaggcagcagccgtagataccgcaggtactgaggcagcagccgcagattctgaagatgagccatggtccggtacaattacagtatggagcccacaggaagatcaggatacaggctggcttgcaaaagagtgtgacgcattcaacgcagctcatccaaactgggatatcactttcaattatggtgtatgtgcagagggtgatgcaaaagcaacggttacacaggatgttgaaaactccgcagatgtatatatgttagcaaacgataacatcccggatctggtatctgcaaatgcattagcagagcttggaggaagctatcttgactatgtaactacaacaaactctgattctattacagcatctgttacttacaatgatgcagtagtggcattcccgtttacatcaaatacatggttcatgtactatgataagagtgtattttcagatgatgatattaagagctttgataccatgttagaaaaaggaaaagtttctttcccattatctaactcctggtatattcaggctttctatgtagcaaacggatgtacattatttggtgatggtactgatgcagcagcaggtgtcgattttagtggtgacaaggcagcagcagttactgagtatcttgtagacctttgcaagaatccaaacttcattaatgatgcagacggagcaggtattgccggtttacgtgatggcagcgttaatgccattttctcaggtacatgggatgcagaatctgtaaaagaagctcttggcgataacatgggtgttgcagctcttcctactgtaaatatcggaggaacagagggtcagatgaaatccttcataggatctaaagcaatcggcgttaatccaaatacagagaatatgcaggtttccatggctttagcggcttaccttgcaggtgaagatgcccagaaagatcattatgatatgagaaatatccttcctacaaatacaaacattgcaatctcagatgatgaaattgctacggcagttacaaaagttatgacagatacatctatcatgcagccattagtaagcgaaatgagcaactactggtcaccggctgagaacatgggtaaagcactggtcgctggtgagatcacagctgataacgcagcagagaaaacagaagatatgaatacaacaatgaacacagacattgcacagtaaaaagatttcttctgatagaaatcccagggtgcccggacgggcatcctggatgtttctacattgagatttaaaggaggcccataacgtgaaaaaggctggaatgaaaaaaggaaaaaataaagaattttcaacaccgtacacggttacaaatgcggtggcaaaaggaaatataatcacaaaactttccctgttaattatgggcttaggaaatattgcacataaacaaattggaaagggaatcatgtttctggcagtagaagctgcatatatctggtacatgattcagtcaggaatttataatttatctatgctgccatctcttggatggagagagcaggaaaaagtatggaacgaaaaaaagagtatttatgaatatacagcaggtgaccagtcatcactgattctgttgtatggagtggcaacagtttatattacagcaatgtttatcattgtctggagagagtccgtaaagagctcttataaatcggaagtgctggaaaaatcaggaaagcacttaaacaactttaaagaagactgcaagagtttgttagatcaaaatttatataaattactgttggcagcgccggttatgggaattttaatttttacgatcttaccactgatctataacattaccatggcgttcacgaactacagtaaggtcaacgatcatctggtattatttgactgggtgggactggcaaatttcaagaagattttaaacttcggtgacagcatcggcaagcagttctattccgtattaggatggacactgatctgggccattgtagcaaccgcattaaactatatcctcggtatgatcttagcaattatcatcaaccgtaaggagacaaaaggaaaggcattttggagattctgttttgtactttccatcgcagtaccgcagttcgtatcactgctgatcatgcgtaccatgttacaaccgaccggtatcgtcaatacgctgttattaaaatatggtctgatcgataccgcattaccgttcttttcaaatgcaacatgggcaagagtaacggttattgttattaacctctgggtaggtattccgtatacgttacttcaggtaactggtattttacagaatattccgggtgaactttatgaggcagcaaagatcgacggagcgaatgctgtacagactttctttaagatcacattgccttacatgttattcgttatgacgccgtacctgatcacacagtttacgggaaatatcaataacttcaatgtcatcttccttctgtcaggtggaaatcctactccggtggatgccacggcaggaaagacagaccttcttgttacctggctgtataagctgacggttgataagaactattataacttaggtgctgttattggtattatgacatttattgtacttgcgatcgtagcattggtaacatatcgcaataccgcatcctataaagatgaggagggattcatgtaatgaactggacacatacgagtacagcagcagtggctgcgaaaaaaagtggtgcacccaatacggcaaaaatccgtaaaacagtgataaatgtgattgttcacattttcctggcaatactggcatttatctgggttctcccgattttctgggtaatccttacaagtttccgtggagagaaaggttcttatgtaagtacatttttcccgaaaacctatacatttaataattacatcaaattatttacagacaccagtattttaaactttccgaagatgtttatgaatacctttgtgatcgcaatttttacctgcatcatttctaccatctttgtactttcagtggcatacagtatgtcaagaatgcgatttaagatgagaaaaccgtttatgaatattgcgatgatcattggtctgtttccatctttcatgtccatgatcgctgtgtactatattttaagagcacttaatttagcagatggtgcaatgatccgtgtagcacttatcatcgtgttctccgccggttccggtgcaggattttatgttgcgaagggattttttgatacaatctcaaaatcgctggatgaggcagcgattatcgatggagcgacaagatggaatgtatttacaaagattactgtaccgctcagtaagccgatcatcgtatatacgattttaacatcctttatgggaccatgggttgactttatttttggtaaagttatctgccgtgcagatgcacagtattatacggtgtctattggtctttggaagatgcttgagaaagagtatatcgacagctggtatacctgtttcgctgcaggtgcagttgtcgtatcgatcccgattgcaattctgttcttaatgacacagaagttctatgtggaaggtatgaccggagctgtcaagggctgatccacaggatacaaatggaatatgagggcacattttggtgtgtcattgggcagatggggagtctgccgggagagcagggacggtttgtttctgctctctttttaaagtcataggaaattgcgtcctatgaatttaaaagccctccgggcaggatgcgcatctcgcggagcagaagttagctgtaaacagcaccgctcgagcgcgaaagagtcgcaagcgacttctttattctaatagagtagttgaaggatgctgaggtcaaatagtgcaatcaggaagcttgggtgcactattgtgactttaacataattgaaaaagcgcaggcatatatgcgcagaaatgaggactgagatgaaaaagagaatcattgcggctgttttagccggtatgttgatagtttccgcagggggatgtggaaattggacagcttcatcagggaatgctgtggataattcgaatggaatggcgacggaaagttctgcgggtcaagccatagcttctgccaggcaggatgaaaatgcagatgctgacacgaaggaggggggagtgaccgccctttctctgatgcaggaagtcaataccggggatgaacagatcattgatgataattaccgtacctggtatgaggtgtttgtgtacagcttttttgacagcgacggggacggcatcggggatctgaatggtctgacagaaaagttagattatatcaatgacggtgatccggcgacagatacggatcttggatgtaacggaatctggctgatgccggtcatgccatcgacaacctaccataaatatgatgtgacggattactgtgatattgacccggaatacggtacgatggacgattttaaaaatctgatcgcggcatgccatgagaggggaatcaatgtcattatcgatcttgtcatgaaccatacttcctcccagcatgaatggtttaaaacggcagcagattacctgaaaaacctgccggagggagcagagccggatgcgtcggagtgtccttatgtggattactataatttttctaaggaaatgcagggcggttacagtaagctcgatggtacagactggtattatgaggcgcagttctggagcgagatgccggatttaaaccttggcagtcaggcagtccgtgatgaatttgacaagatcgtagacttctggcttgatctgggggtggacggattccgcctggatgcggcaaaagagtattacagcggaagtgtggataaaaatgtggaagtgttatcatggtttcattccatggtaaaagagaaaaaagaggatgcctatatcgtggcggaggtctggacggatcagaatacctacgcaaaatactatgagagtggtattgacagctgttttgatttttcttttgcggacagcaccggaacgatcacttccgtgcttaaaaatggttcggcatcttcctatggaaaggcgttggtaaatctacaggataatctttcccagtacagtgacagctatatcgatgcaccattttacacaaatcatgatatggcacgaggcgcaggttattattctggggatgacagtgaaaaacagacaaagatcgcgcaggcaatgaatctgttgatgtctggaagtgcttttctgtattatggagaggaactgggcatgaagggttccggtaaggatgaaaataagcgtgcaccgatgtattggagcgaagatagcgcagacgatggaatgtgcaagggacctgctgatatggatgccataaaaatgaaatacggtgcgctcgaaacacaggagaaagatggaaactctatttaccagtttgtaaaacagacgataaaactccgcaatgagtacccggaaatagcccgtggaaccgtgacttttgaggagagcgtttcggatgataaagtctgcgtgataaagaaaacgtatagcgattccgaactgcttttggtttataaccttgcgccggagagtgtggaagtggatttatccggtgtcacagccggggaaaagagtggaagtgatcttgaagttggcggtgtactgctgacgggcacagaagaggcagtgctccaggatggaacactgacaatgccgggatattcggtggtgatagtgaaataatatgtcaggctgtgccgggcagatttaagagattacggacagagcaggcagtaatgtgcctgccaatccaattagtagttcagcaggaaatccgcaaatttcgtatagtaatctttctgctcggagcggctgaaaacaccaaagtagcagctgtcataaatgccatatttctggatccactgattatcggtcagttcgatcgcacatggataggactctgactcgccatcatcggtggagtagatcagatgatctttatatttttctaacacatcatccgaaacataggtgcgcagatccatcagcgcaccttcttcggcataatcggtgtaaacatttcctgtaccgaaaaacagatcctcgccgccggcaccgatcatcgtggaaagtaccatgtagtcgttgtagtccgttgttgcatttggatcatcggaaaactgtaaatttgcggagacatcgattggctgctgttttgggtcataaccggcagcatcagaaaattcgtcaaacgcagcctcggcattttcactggttgtctggacattgatcatgatgacgctgagtaccggcttgcggtaagtgataaaatgatatcccagaccaatcacgatcgcagcaatgacacctccaaataaaatatgcagtttgtaatagtcccagatatactgaacttttgccttgttcgaaagtgctttaaaatctgtctttttttccatggtatttctccaattctaaatatttgtcatatttccactagcataacatatataaaaaaatgaaaaaagtgccaatttgtgaagtttttctaaaaaatgttactgtttacactatatgcgggagcagtaactaaaaattttctgtactctggtccgtcagtgtttctaaacaggtcagcacttttgacatattttccatgatcgtaccggtattaaataattgcggctgcaagacggagttatggatcgtggaaaaaatgccgccggaaagaaatgaggcgagaagttccggggatacggaaaaggtgcagccgcgttgttggtgttctttcagattacttaagatgttagagtgtatttcttcattaaaaatatcaagcggtgaggcggacatgtcgctttttaaaatattctggatcagtgattcgtgctccttaaaatagagtatggacctttgggtaaggtagagcgtgtaagcataaattccgttggggggagtttcctcttttgcctgtgagatgaactgatcctgcttttggcggataaaaaaagaaaagaaatcatactggtctgcaaaatgtttatagaacgtggcgcgccagatcattgcctcatcacaaagctcattcacagtcagatcgtcaaatctttttttctccaaaatagttacaaaggcatcacacagtgccttgtagggttttcggattcttaaatctgttttttcttccataattattccgtcctttcgaaaaataaaagacaattattctgtttttgtcaaataactatcatatacattgcaattgtacgttgaaaaaaacgatttgttattatgatacagaaaacgaatagttgtcaattataaaacaaccgtcagaaataaaacaaatgaaaatctactgaaaaagcagggatcagaaaaaaggatacagggagagcagtagaaaacgtttgaaaggttttttgaaaaaggagaaagcatgtagaaaagttttatgaattggtgatccgtcatcgtaaaatcatttttgcagtattcattggaatagcagtcatttgtgcgatggcgcagaagttcgtatcagtcaactatgatatgaactcttatctgccggaggattccccgtcgacggtggcactcgatgtcatggaagacgaatttgacggaggcatcccaaatgcaagggtcctgatctacaatgtcacggtgccggaggcgctttcttataaggaaaagttaggagaaatcgacggtgtgacagatgtgacctggttagatgatgcggtaacggaaaagcaggtgcaaatattaaaaaaaacgagctccattaggaactcgtttttttaatcatcgcaacaaaaaagcgggtgcaatcccccacctcataacagatactaaaaaaactgagttccatcggaactcagttttaatacctgtaacagagagcgggtgatgggaatcgaacccacgtatccagcttggaaggctggtgttctaccattgaactacacccgcataagatgtatgaaattgaatactgccgagcagaaactgttgtttctgctctaatgcccagttccggaatcgaaccagagacacgaggattttcagtcctctgctctaccaactgagctaactgggcgtctcacaacaaaacttattttaaaggaaaatggctttgctgtcaagcagaaaatgcaaatttttttaataatatgaattttcgcaataattaggaaaacatagacgggtcattttagagcaagcatatgccacattgccagcgcagcgcacaaaaataaaagtaacgtaaacccaattcgtttagtttgaaacagaatgggcgaaaactgcacattacaaagggatttcgtccggtttttacgggaatatacttcaatatggggtagaatgggtgaaatagaggtgaaatcaatcagaataacccacagaatcggaaaaaccagggcgaaatgagtagaaaaaggaagatttcgcccaaaatcaatagaaagtcattaaatagttagaaaaaatgggtgaaaccagatttaaataccgaggtttcacccattgtgtgcatcagttaaattgtaaagtgatatgttttttgaccttgctgtcgagagattatattatacggtaacgcatgtcagtacatttgtatatcatgcgtatagcaggatagcaggacggaagttacatatacggcagcacatcctgcatataagcacgcagtgtctcgccgacgctccatgcctgcgcatagcatcctcttggattgtgaggtgcatccccgtcgaagatttcggagatcgagccgatgcagccgttgtcggtcagatgatgacgcaccggcccgagcagggaaagcagctctttggtacattccggcgagtgatcgtggacttttgcgtaagcggacagaaaaccgccgagcagaaatccccatgccgtaccctggtggtaagctgcatcacgctttggcagggaaccacagtaaatgccgtgatagtccgcatggtcactggtgagagagcgaagtccgcagccgatgtaaagacgttctttgataaatgcgacgatttttgcttcctgctccttcgataacatggtaaaaggcagtgacaccgcatagatctggtttgggcgaagatggtcatccggctcatccccgtccacgacatcgtaaagacagcccttttcttcccaccagaacttcctgcagaacgatgcttttacaagttccgcaagtgcggcgtagtcgtgagaggtcataacatgactgtccaaccccgtggcagcaccagcaacagaaacctcactgccggaacttgtggcataaccgccagtaaccaaaacatcatccccaccttcataccgccgggcaagttcctccatgaccttcagcgcattataccagagcgcattgatctccaccggttttccgtggcgcggggtggcaacccagtcaccgacacgcacgtccatccaggtgatctggtcaagaccgcttccggcatggatgagaccgtcctcctccatataaatactgaaatctgtgccgtttttgtaagcggaaatgatttccttcaaatgaggataaatattttcctgtacaaacgcattggcagcggtatccggataatactgcagatactgccatactgcataaaaataccacagggaagcgtccgctgtattataaagcggagcggcattgtcatccgggaacatgtttggcacgatcccgtgacggatgtatttggaaaaagttaaaaggatttcctctgcatcttttctgcgcccggtgcagagcgtcagtccggtaaatgcgatcatcgtgtcacggccccaatccgtaaaccatggaagcccggcaagcacggttttatagccggtagaagcacggtcacagagaaactgatccgcggcgagaaccaggcgatctgcaaaatcatcgtggatacctgccgtttcgtagagtgattttgtatacttttcccgttcttttaaaatgtcaaaagcggtatctgccgtgatatctgtaaatgtttcatcggcagcgatcacggaacagagcacggaaatctgtttgtggcttttcgccggaagaaaaaaagtgacttcatgtggacaataatgacagtcgagtccgtccgtctcaagatcgacttcggtctgaagctgcatgtcaatatcgaacataggcgtatggtcggaaaaaataccttcactggtctggaacaaaatggcagtatcaggatggctttccgggatcaggcagagtgaattgtcgatcagggaagtacgaaaatgaaaatcttccgggcggctggatgcactgtgttcacggaaattaaaaagcggaaccagcgtgagagaagcatccggaccattattttcgatttcataggcaatggcacacacattggcaccatgttttaagcagatatgttttttcagcatgatatcgcccgcctggtatgtgtagtgaacacttccgtcataagaaaaagagacgagatattcctgcccctgtgtgtaacaggttccgccattttttctgtgctgtgaggtctcaaggttatacactgcagatacagctggcgcagctcctttttttaacgtgtccgtaagtgaatggaatttttcatcagaactgccggtgttttctgctgcaaatacggacagggattcgttgatctttgaaaaaacaagataacgctcgatcggcgggtgcagacttgcgatcagataaccctgatgcgtccggttgtgagcaccgatgagggaacttccggcataaccgccgatgccgttggtcagcgcccattcacggcggattccttcctgaaatgtggaaaatgcatctttttcatagtgataattgatcatttttttattctccatgataaaaagttattgtgtgtaaaaaatgtgttgcaaaactgcgaaaaattacgaaaaaaccatttgcttttattttacacgataacaggtgcgatgtacagaaaaataaaaaatgtataaaatttcctgcatttatacagggaatagggggacagcccttgcctgaaaagttgttacatgatagaatgggaagtatgacctgtatgtcaaaaaacaggtaaatataagaaaacaggagaagattatatgcatgagaaattagtgatcgttccgaaaaagaaaacaggttccaaaaaaatgttaactacagcatggtttatccttgcctgcctgatgtttttactggctacatttgtgaatccggttatttttctgatcccgggaattgcatttgcactggtatggtattttcaggcatttcgttcggatatagagtacgaatatacctattatgatggagagttccgctttgcacagatcaaggcaaaaagcagacgtaaagccatcggcagcgtgcagatggatgatgtacttggatttgctccaagaggtgacagaagcgtatacaaatacgaaaatgacaagaatctggcatataaaaatctgacttccggtgacccggaagcaaaggtgtatgagctgatcgcaaagggcgaaaaaggacttgtgcgttatgagtttgagccggatgatgagatgctcaatgaagttatggtaaaatatccgcgttccgtggtaagataagcggcgaaacgcagacggaggaagaaatgttagagttaagaaatatcacttatgaggtagaggacaatcaggacaacaaagagatcttaaaagatgtcagccttacgatcgatgagcattttgtggcgatcacaggaccgaacggtggaggaaagtccacacttgcaaagatcattgccggaatcatcaagccgacatccggtcagatcattttagatggagaggatattacagaacttgatattaccgagcgtgcaaaacatggcatcagctatgcatttcagcagccggtacattttaaaggactgacagtcaaagatctgatcacaatcgcagcaggaagaacgatgacggtgaatgagatctgtgagatcttatcggaggttggtctgtgtgcgagagagtatattgaccgtgagatcaatggcagtctttccggcggtgagttaaagcgtattgagatcgcgatgatcacggcacgcggaacaaagctttccatttttgatgagcctgaggcgggaatcgatctctggagttttaacagtctgatcaaggtatttgaaaaaatgcgtgatgagattcagggaacgattcttatcatttcacatcaggagcgtattttagacattgcagataagatcgtggtgatcgcaaacggacaggttaagacaatcggaaccaaggaagaagtacttccggaactgcttcatacagcaggggcctgtgagacactgaccagcaagctgtaatgtatgagtatgaggaagtgaggataaaaatggatttaatacagaaaaatttattagagcaggtggcaggactgcacgagatcccggagggtgcctataacattcgtgccaacggaaccaaactcggaagaaatacaactgcaaatattgatattgtaacaaagactgataaggatggaatcgacattatcatcaaaccgggaacggtcaacgagagtgtacacattccggttcttttgagtgagagtggaatgcaggaatgcgtttacaatgatttttatatcggtgagggtgcagatgtcacgattgtggcaggatgcggaatccataactgtggtgtagatacctccaaacatgacggtgtgcatacgttttatctggaaaaaaatgcaaaggtccgctacattgagcgccattacggcgagggtgacggcaacggagagaatatcatgaatccgcagaccattgtgcacttaaaagagggggcacatatggagatggagacgacccagatcaaagggattgattccacagtccgtgtgacaaaaggtgatcttgcagaaaatgcatctttagaaattcatgagaagatcatgacacacggaaaacagtacgcgaagacagattttcatgtggatattaacggggataattccagtgtgaatctggtgtcacgttctgttgcaaaaggggaatcaaaacaggaatttttctccgttatgaatggtaatgcagcctgtgcaggacacagtgaatgtgatgccatcattatggataacgcctgtgtgactgcaagtccgcagctgactgccaacaatattgacgcaaatctgattcatgaagctgctatcggaaaaatagccggagagcagctgaccaagctgatgacacttggacttacagaaaaagaagcggaagaacagattatcaatggttttttgaaatagtcaatttaaagtttgtgaccgggaatgtctttgtattcgatcatcccgtcatcaatccattctttaatacggctgagcggaagatgaaagtgtgttgcaacatcataagcggtggcgttgtttgactgaatatattcttttacctgatgaaaaagttcctgctctaaacagcgggggcacaaagttccctcgtaggatgtgggaagaagacagtgacattcttcacagtatctccggttttcaaatataggtgtttcggtcatataaagtcctcctgtctgttacattaggattttattataacataaattatcatgtggaaagaattgtatttataaataaaatataaaaacaaaaataaggatttttataaatcttttcgaaaatcgtcacacttaagacatattttttccgtatactgtaaccatcgaaagaagttaacaacgcttacccaggcgggttgttaaacaaggttgtatagaataaaggctgtacatcccgacaattctttcgacgcaatttcctttatatagattaacattttcataactaaactcctcggaggaaccccggaacagcgatgttaccggggtttcttcatttatgggattagattatcaaaaggtggatttcatttttggataatcgaatcatatgatgttggggtcagatagtgcatttaagcatcttgattgacaaattgcacaaagccgtgtctgttttgttccgttgtacgaaaataagaaaatctaagcctgcctgagtcaggttttctcagagtgacgtgaacggcaacaacgagtcctccatgactcgatgctgccttgttctgccatccgtggcagaacatcactgtgtattaccaggcagtctaagatttactaattttctcccaaagtcacaaaagcagtctcgactttgtgcaatttgccagtcgttatgttgtgaatgcactatttgcccccaacatcatcatattaaaattcagaaaattatcagaaaggccggatatgagagaaaaaacatacagtttcacgatagaagaaatcccgatcattgtgacgaaaaaacgcatgaaaaatatgtatctgcgtatcagtaaagaggatggcagtgtgcgcatttcggcgccgcatcagatgagcgacgagcggatttaccgttttgcaaaggagcggatcgactggatccgggtttacagggaaaaatatctgcgtgcgaaagagggacgcagggaagtaagacaattaagcgaagcggaattaaaacagcagaaactgcttttgaaaaaagacgtggaaaaattgattgcaaaatgggaacccgtcatgggcgtaaaggcatccggtgttacgatacgccagatgaaaacacgctggggttcctgcaatgtgagaacacaccacatcaatatcaatctcgcactggcgaaaaagccgccggagtgtctggagtatgtggtcgtgcatgagctgacacatattttagaaccgagtcataatgccgtgttctggggctatatgacacagttttatccgaattggaagcgtgtcagaaaatatctgaatgatgaagtaccggaataaatgttatacaaactgattttgggtttcgtcatattcgtaatcgatcatttttaatttttcagtgatcgcatcggcatctgcatgaaatgtggcaacaaactcagaaaaagacggataattgtcgcggagctgtgtattgacgaaacttaaaagcatagcaggatcgtttggaagattttgatattcagtcataataaacctcgtttcttctatattatggtaaacggtttgcccgtgtagtgggttgcccatgattaccgcagatatgcggtcttttctgtgaacggtttctatgctaaaataacatgggaacgcaaaaaatgcaaggagacgataacagcatggaacaaaagattgacaaagaagtgtttgataaattttttacggagagttactgcccggttgactatacaacggtaaaggaagagttcgaacagatcgcatcggtgggaaatgatatttttaccggaagttatgaggcaagaaatttaaaccgcgggaatttcatcctatacctgaccagtgaggcgtattgtgattttgaggctgccgtgcaggaggcgatggatgatctgaacccggagatcttagatgcagttatggatgtgacggaaaacacaccggacggagacgagatcactgagaaatactgggatacccagcgcacacttttgaaagaatttttagaacagctttatgacgaagtgatctcaacatggagataatgttctgcggaagagtcggaagtgaaagataagcagcagacaggatatggaaaatacggcaataagaattggaggatgttatggcgagctgtgacagttgtgtatacaatgtatacgatgaagatgatgaggaatattactgcgaagtggatatggacgaggatgatgctgcgcgcctgatgcagggacattataaagagtgtccgtactaccagctggatgatgagtatgcggtggtaaggcatcagatgtaatattgaagacagataataagcaaaaagaatggagaaatatatgagttttggcaatataaaaaagaagaaaagattactggtgttattgttatgtacgatactggcgggggcgtcttttatgacgggatgtggcagcaaagcggatgaaaacggatctgcccaggtgtctgctgaagagaaaaatgtcacagaaacacaagaacagacagaggcagagtcggagcagatcatgacagaagcgacagaaactgcacagacaaaaacacaggaaacagagcagacggaagaaacagagccggcagaactggcaccaacggagacccgggaaacagaagaaatcattacaacagaggtgattaagggagaagcagattcggagcaggagagtgcatcatcacagactgcggacacagagcagtctgctgaggctggaaatccccagactggcacagagcagtctgctgagatggaaaatacgcagacagatacagtccagacaaacatttccggtaatctggttgtgatcgacgccggacatcaggcaaaaggaaataacgaaaaagagccgatcgggccaggcgcatctgagacaaaagcgaaagttgcttccggtacaacaggtgtggcgagcgggcttgcggaatacgaactgacacttcaggtatctttaaagctgcagcaggaacttacggcgcgcggctatcaggtgttgatgatccggacgaccaatgatgtcaatatcagcaattccgagcgtgcggcagttgccaataataatcatgcggcagcatttatccgcattcatgcaaatggaagtaccaactctgcggcaaacggagcgatgacgatctgtccgaccgcagcaaacccgtactgctccaatatttatcagaactcaagaaaactttccgactgcatcataggttccctgtgtgcggcaaccggtgcaaaaagtgagggtgtctgggagacagatacgatgagcggtatcaactggtgtcaggttccggtcacgatcgttgagatggggtacatgaccaatgcggatgaggatcttaaaatggcgactgacgattatcagcagaagatcgcatcgggaatcgccgatggagtggatgcttactttggaaaataaataacagaatgcacgttgcacgaacattttattattattaaaaaagctgactgccgggcaaaccggcaagtcagctttttgcgtttaaaatttatttcatgctgttctttacagcagcttccacaaaacctttgaataacggatgtggacggttcggtctggatttgaattccggatgagcctgtgttgcaaggaaccacgggtgatccggaatttcaatcatctcaacgattcttccatccggggaggtaccgcagagtttcatgccgccctcggtaagtgctgcacggaaatcattgttgacttcgtaacggtgacggtgtctctcatggatctcttcagaaccgtaaagctcgcgggctttagaggttggatctaacacacatgggtaagagccaagtcttaaggtaccgccgatatcctccacaccattctgatccggcatcagtgcgatgacaggatgtgtggtgttcgggtcaagctccacactgtgtgcatcatggaatccgcagacatgtcttgcaaattcaatgatggctacctgcataccaaggcagagaccaaggtatggaacgttgttttctcttgcgtattttgctgcggagatcataccctcgacaccgcgggaaccaaatcctcccggaacaatgatacctgccatatcgccgagcagttcttttgcattgtcatcatttaatgtctcagaatcgatccagtggagatcgacggtagcacgctcagcaattccgccgtgttttaatgcctccacaacagagatgtatgcatcatgcagtgcaatatattttccgaccaaagcaatttttacttctttgttcgggtggcggagagaatctaccattgcttcccagtcttttaaattcggttccgggcaatctaaatgcagggccttacatgcaaccttggcaagattttccttttccatggcaagaggtgcctcgtaaagatactcaacgtcaaggttctggagtacgttgccgtttggtacgttacagaacagggcaattttgtcttttaagctctgatcaagttcgtgctcggagcggcagacgatgatatccggctggatacccattccctgaagttctttgacgcttgcctgtgtcggttttgtcttaagctcaccggaagccttgatataagggatcagtgtgacatggatcagaatcgcgttttcgtgtccgacctcatgctggaactggcggatcgcctctaagaacggctggctctcgatatctccgacagtaccgccgacctcaatgatcgcgatatgtgtctcatcggaagtgaaattgcggtaaaaacggctcttgatctcattggtgatatgcgggatcacctggacagtacctccgccgaaatcgccgcggcgctctttctggagcacagaccagtaaaccttaccggtggtcacattggaattttttgttaggctttcatcgataaaacgttcataatgtcctaagtccaggtctgtttctgcaccgtcatcggtaacgaagacttcaccatgctggatcgggttcatggttccgggatcgatattgatatacggatcgaatttctgcatggtcactttgtatccacgggcttttaataatcttccaagagaagcagccgtgatacctttaccaagaccggaaacgacaccgccggtgacaaagacatattttacaggcatagggttttcctcctcataattatagtaaattaaaaaaatttcacgtatttaataacccatatagtatacaactaagtttacgcaaaatccagaaaaacttaaaaaagataaaagtgaatttagaaataatttagaaaacacatcaaaagttcatgaactgtgtattgcttttgcgtgttgttttcaatataataaagaagatattgacgaatatcagataaaatccagatgcagcagatactgcagatgtttggaaaggatagattatggataaccagggaccaaataattacaataatggaaataataattataataataacggcggtaatggcggcggtggcaatggaaataacggcggcaacggcggcagggataatcacaatggacagcttatcatggcatttgttctggtttctctcatcgtgttatttatcatgagcatggtgtcgaaccgcttttcacagatgagcacccaggagatttcctattcgcaatttctggaaaaagtggaagcaggtgaagtcaaatccgtagagatcggatcgtatgagatcgacatcacaccagtgacaaaggacaagagtccgtaccagccgacctattactgcggacgcgtggcggatgaggatctgattccgcttttaaaagaaaaaggcgtagaaatttacggagtaatcccggacaacacttccacctggatttacagtattttaagttatctgatcccgttagtactgatctgggtactgctcggatttttgatgaagcgtatgggcggcggtgccatgggtgttggcaagagcaatgcgaaagtttacgtggaaaaacagacgggtgttacatttaaggatgtagccggacaggacgaggcaaaagaatccttacaggaggttgttgatttcctgcataacccgaagaaatattccgagatcggtgcaaaactgccgaagggtgcacttttagtcggacctcctggtaccggtaagacactgcttgcaaaagcagttgcaggtgaggcgaaggttccgttcttctcactggcaggttctgattttgtggagatgtttgtcggtgtcggagcatcccgtgtgcgtgacctgtttaaagaagcacagaaacaggcaccatgtatcatctttatcgatgagatcgatgcgatcggtaagagccgtgatacacgttacggcggtaatgacgagcgtgagcagacgttaaaccagttactggcagagatggatggatttgatacatccaagggacttctgatcttagcagcgaccaaccgtccggaggtacttgataaagcgttactccgtccgggacgttttgaccgtcgtatcattgtcgataaaccggacttaaagggacgtttagagacattaaaggttcattccaaagatgtcatgatggatgagaccgtagaccttgatgcacttgcgcttgcaacggcaggacttgtaggttccgatcttgccaatatgatcaatgaggctgccatcaacgcagtaaaaaatggcagaaagtttgtaaaccagtccgatctgtttgatgcatttgagcttgttgcggtcggtggaaaagagaagaaagaccgcatcatgagcgataaggagcgcaagatcgtatcttatcacgaagtcggtcatgcaatggtaactgcactgcagaaaaataccgagccggtacagaagatcacaatcgtaccgcgtaccatgggcgcacttggatatacattacagacaccggaagaagaaaaatatttacagaccaaagatgaactgcttgcaaagatcacaacctacatggcaggccgtgcggcagagatgctggtatttggttctgcgacgagcggtgcagccaacgatatcgagagtgcgacttcgatcgcgagagcgatggtcacacagtacggtatgtccgataaatttggtatgatgtgtctggcaacggttgagaaccagtacttagataaccgtgcaggactgatctgtggtgaggagacggctgcacagatcgatcaggaagtactgtccatcatcaacagcagttatgatgaagcataccgcatgcttgaagaaaacagggtggttctcgacaagatttcaggatatctctacgagcatgagacgatcaccggaaaagaatttatgaagattttccgtgaattaaaaggaatcccggagccggaagaagaggagaaaaaaacattcttcgagcaggcagaggatgctaaaaatgcgttagagcaggcgaaaacagaagaacatgcaaaaacggaaggacagacagaaataaaaaatcaggcagaagcagaaacttcacgtgcagcggaagatcagaatactgtatccttggaaaagggcagttttattgatcaggtcgtagacgatcagacagcagcacatgaggaacaccagaaataacgcagcagaggcttcgctgcagaagtatcagaaataaaagctgaaaaataagataaatatcagcaggataagtataaacagaacgatcagagcaggaatgaggtttcatgtttcatatcgcagaagaattaaaaaaactcccggatcagccgggagtttatattatgcatgacagccacgatgcgatcatctatatcggtaaggctgtcagtttacgaaagagagtacaccagtatttccagccgagtcatgatgagggcatcaaaaaggcacagatggtaaaacagatcgcacgtttcgagtatattattacggactcggaattagaggcgcttgtgttggagtgcaacctgatcaaggaacattgtccaaaatacaataccatgctgcgcgatgacaagacttatccctatatccgtgtgacggtcggtgaggatttcccacgggtactcttttcacgtcagcagaaaaaagacaaatcgagatattttgggccatacaccagtgcgggggcagtaaaagatacgatcgagctgatcaataagctttaccagcttcgtacctgtaaccgtgtactgccgagagataccggcaaagagcgcccatgtttaaattaccatatccatcagtgccaggcaccctgtcagggttatatcagcagggaagaataccgggaaagaatcgatgctgccgtcgaatttttaaatggaaactatgcaccgatcttaaaatccttagaagaaaaaatgaacgaggcatccgaaaatctggaatttgaaaaggcaatcgaataccgggagcttttaggcagtgtgcgccagatcgcgcagaaacagaagatcacgcataccgacggtgaggataaagacatcatcgcgcttgcatcggatgacagggatgccgtggtgcaggtatttttcatccgtgacggaaagctgatcggcagggatcatttttatgtcagggtcgggacagaggataccaaaagccagattttaacaacttttttaaaacagttttattcgggaacgccgtttattccaagggagatcatgctgccggaggagatcgaggatcacgaggtcttagccgagtggttaaccgaaaaaagaggagccagggtttatatccgtgttccgcaaaaaggtatgaaggaaaaattggtagagctggcgcagaaaaatgcagagcttgtactttcccaggatcgcgagaagatcaaacgcgaggagggaagaaccatcggcgcgatgaaagagatcgagcatcttctggggatggagggactttcccgcgtggaggcatttgatatttccaacatcaacggttttgagacggtaggatccatgatcgtctacgaaaagggaaaaccaaaacgcagtgattatcgtaaattcaaattaaaaaccatcacagggccggacgattacgcatccatgcatgaggttttgaccagacgttttacgcacggtatgcaggagaaaaaagaacttgcagaacgggaaatgtcagaggaatatggaagtttcacaagatttccggatctgatcatgatggatggcggccgcggacaggtaaacattgcattaaaagtgcttgatgaactgaaaataaatattccggtctgcggtatggtaaaggatgataatcaccgcaccagagggttatactatcagaataaagagataccgatcgaccggacaagcgagggctttaaactgatcacgaggatccaggatgaagcgcaccgttttgccatcgagtatcacagatctttaagaagcaaagaacaggtacattccgtacttgacgatattccgggcatcggtccggcacgaagaaaagccttaatgcgccggttccagtcacttgaggcgatccgtgaggcttcggaggaagaacttgcaaagacagagtcgatgaatgagcaggcggcacgggcagtttattcttttttccgggaagataaacacgggtattcaagttgaagaattccggtatctatggtaaaatgtcgtcagaatcgttacgaaaaatatgtttaggagaggacaaaggatatggaaggtgttggagtagcaaagatcgcgcagatcatggatttatgtaattttctgccggatatggaattaaagggacatcgcattatgatcagtgatgtaaacagaccggcgttacagctcagtggttattttaaacactttgaacagtcgagggttcagatcatcggtacggtagagtacacatatctgcagcagttagacgaggaaaaacgtgaaaagatttacagtgaatttatgggatatgatattccgtgtgttattttctgcagggatctgcggccggatgattctttcctgaaaattgcagaggagaaaaatattccggtgcttggcacaaaacgcagtacttccgaattcatggcagagcttatttattgtctgaatgaacagcttgcaccgtgtattacgatccatggcgttttagtagatgtctacggcgaaggacttctgatcatgggtgagagtggtatcggaaaaagtgaggctgcactcgaactgatcaaacgaggacatcgtcttgtaacggatgatgtggtggaaatccgcaagatcaatgagcatacactcatcggaacgtcaccggatatcacacgttactttatcgaacttcgcggtatcggaatcatcgatgtgaaaacactgtttggtgtagagtgtgtcaaggaaaaacagcagatcgaccttgtgatcaagttagaggactggaagaaagaaaatgagtacgaccgtcttggattagaggaagaatatacagagtttcttggcaacaaggtagtatgtcactcactcccgatccgtccgggacgtaaccttgccgtcatctgtgaggcggcggctgtcaaccacagacagaaaaagatgggatacaatgcagcacaggagctttaccgccgtgtgcaggaaaatctcacaaaaaaatcttcggacgatgatgagtaaaagcccggagtcaaaagaatagcataaatggaggcaatatcagtcatggaaagaaaaaacgcatgggagaaatacccggaaggcaaaaaaagagaagaggtatttcagtttgcagaggattacagaaaatttatttctgagtgcaaaacagagcgtgaatgtaccacagaatttgcaaaaagagccgagaaagcaggttttgtaaatctggatgaagtattagaaaaaggaacaaaattaaaagcaggcgaccgtgtgtatgcgaataacatgggaaaaggaattgccatgttcgtgatcggaaagaaaggcttagaggctggaatgaacatccttggcgcacatatcgattccccgcgtatggatttaaaacaggatccgttatatgaggataccgatttcgcaatgttagacacccattattatggtggaatcaagaaataccagtgggtgacacttccacttgcactgcacggtgtgatcgccaaaaaagacggtaccgttgtaaaagtcaatgtcggagacaaaccgggcgatccggtatttggcgtcagcgatcttttgatccatttatccggagagcagcttgagaaaaaggcagcgaaggtgatcgagggagagaaccttgatctgatcatcggaagtattccggcagaggaagcgggcgatgacaaagaggctgcaaaagaaaaagtaaaagcaaatatcatgaagatccttgcaaaagaatatgatatagaggaagaagatttcttatctgcagagatcgaggtcgttccggcaggagaggcaagagattacggttttgaccgcagcatcatcatgggatatggacatgatgacagagtatgtgcatacccttcctttatggcaatgcttgcaatggaaaaaccggagatcacgagtgtctgcctgcttgtagacaaagaggaaatcggcagtgtcggggcaagcggcatgcagtcacgtttcttcgaaaataccgttgcagaggtcatgaatgcagcagaagattattcggaattaaaattaagacgtgccctgaaaaactccaaagtactttcatcggatgtatccgctgcatttgatccgaattatccgtctgttatgacaaaacgcaatgcagcatattttggaagaggacttgtatttaacaaatacaccggagcgagagggaaatccggctctaacgatgccaatgcagagtatgtcggatatttaagaaatatcatggataacaacaatgtgtcattccagacggcagagctcggaaaagtagatcagggtggcggtggaactatcgcatacattctggcaaactatggaatgagtgttatcgacagcggtgttgcagtgttaaacatgcatgctccgtgggaactcatcagcaaagtagacttatatgaagcatataacggttatgtcgcattcttaaaagaagcgtaagaccacagaattgaggaaagcatgaatcagcagtttttgacagaacttaaagcagtcacagcagaaaacagaatttttacggacgaaccgatgaaaaaacatacgacattccgtgtgggcggcccggcagatattttagtgcagccaaagggaacagagcttgcggcggtcatccgtctgtgcaggaagtatgatgtcccgtatcaggtcatcggaaacgggagcaatcttttagtgggcgaccgcgggatccggggacttgtgatcgagatgctgtcaaaagaagatgagatttgtgtggaggacgactgtatcaccgtgggtgcgggaatgctgctgtcaaagacagcaaaccgtgctgcggagcacggactgaccggtatggaattcgctgccggtatcccgggcagaatcggtggtgcagttgtcatgaatgcgggcgcttacggtggtgagatgaaagatattttaaccgccgtgaccgtcttagatcaggaaggaaatgagaagattctttctgcagaagagcttgaactgggttaccggacaagctgtattttaaaaaaaggctacattgtaacgggagctaagatcaaactgaaacacggggaagagacagcaatccgtgcccgcatggaggagttaaagaagcagagagtggaaaaacagccgcttgaatatccgagtgcgggaagtacatttaaaagaccggaaggatattttgcaggaaaactgatcatggatgcgggattaagaggttatctggtgggagaagcgcaggtgtcggaaaaacactgtggatttgtcatcaaccgcggaaatgcaacagcggcagatgtaagaaccctgatgcagaatgtagcggatattgtagaagaaaagtttggtgtcagattagagccggaagttaagatgatcggtgaattttaaacaggatttggatgcgcgcaaagcgttttgaaatggagaaaaaagatgaagttcgtaattttaacaggaatgtcaggagcaggaaaaagtacagcgataaaaatgatggaagatattgggttttattgcgtggataatctaccgatcccattgctggaaaagtttgtggaacttacaacattacagagcgcagaactgcagaaagttgcagtcggcatcgatatcagaagcggacagtcatttgatgagctgcatggtgtattagaccacatgaaggataatggggttgaatacgagatcctgtttttggatgccgaagattctgttctggtaaaacgatataaggaaacgagaagaaatcatcctttagcgggcggcgaacgcgtggacaagggaattgaagaggaaagaaagcgtctggcgtttttaaaggaacgcgcagattatattatagatacaagccagcttttgacgagagagttaaaagcggagttggacaaaatatttatacagaatcaggactataagaatctgtttatcacaattttgtcatttggatttaaatatggaataccggttgattcggatctggtatttgatgtccgttttttaccaaacccgtattatgtggagggcttgcgggcaaagaccggaaatgataaagaaattcaggattatgtcatgcagtttcaggaagcaaatgtttttttggacaaacttgaagatatgttagaatttctgatcccgaattatatcacggagggcaagaatcagcttgtgatctccataggatgtacgggaggaaaacacaggtctgtaacactggcaaatgaattatacaaacgtctgtcaggaaaaaagggttatggactgaaaatcgagcatcgtgatattggcaaagatgctttaaggggaaaataaaagatgtctttttcaagtgaagtgaaacaggagttagcaaagcagagtggaaagagcagacattgccagatcgctgaacttgcggcgttagttgcttttgacggaaagcgtcagcagctgatcggggatgcgggagatgtgctggattcggaaaatccgcttctgcaggaaaaatatggactgttactggcacagctgttccatgttaatatagaagagatagatacattgccaccggaacgcattcttgagacaatcaagatgtggaatcagtctttaaggtgtgcagacatcacagagacggtaaatggtattttactgcagcagacatgttgcaggcgggcatatatccggggagcatttttagcaggtggatcgatcagtgatccgaataagtcttatcattttgagattgtctgccgggaaattgcgcaggcgaaacagcttcaggatgcaatcaacagttttgagatggaagcaaagatcgtagaacgaaagaaacaccaggtcgtatatttaaaggaaggtgcccagatcgtggatatgttaaatatcatggaagcacatgtggcactgatgaatcttgaaaatgtgcgtatcttaaaagaaatgagaaattctgtcaaccgaaaggtaaattgtgagacggcaaatatcagcaagactgtggcggcagccgtaaaacagcttggcgatattgaatatattaaacagaatgcaggcttagacagtctgcctgaaaacctaaaagaaatggcgttgctgcggttagagtatccggatacaccgcttaaggaactgggaacatatctcgatcctccggtcggaaaatcgggagtgaaccacaggctgcgcaggatcagtgagattgcagatgagctgcgtgaaaaagaataatgtggaaatatattattgatacgtagctgctgtattggagcataaacataaagtgtgtaaaaagcagcacaggaatggagggtagtgtgaaaaataagatttttcacacgtaagatttgtgctaacgcacaaacttgagatgcgcaaaaaacagcgcaagaatggagattatcatgaaaaagggtgtagtggtaaacatgcaaaacgacttagaggcaagaccaattgcgcttttagtgcagaaggcaaatcagttttccagccagatctatatggaatccggggataataagagagtcaatgtcaaaagcattatgggcatgatgagtatggctcttttaaatggagaagaggttgtgatcgatgctgagggtgaggacgaagaggctgcagctgcggcaatcgaggaattcctgacaaaataacagaacaggtgtagggagcgtatggaagaaaagaaaacattactatttattttcaatccgttttccggaaaagcacagatcaaaaatcagctgatggatattgtggataccatggtaaaagctggatatgaggtaacgatttacccgacacaggcaccggaagatgcgatacataaggtggaagtggacgcagagaaatatgatcttgttgtatgcagcggaggggacggtacacttgatgaagtggtaagcggtattatgcacaaagggtttactgtgcctttgggatatattccggcgggcagcacgaatgactttgcaacatcactgggaatcccgaaagatatggtcaaagcagccgatgcagcggtgaatggaagagcatttccttgtgatatcggtgcatttaacaatgattattttgtctatgtggcagcgtttggtctttttacggaagtgtcttataagacaagccaggagtggaaaaatgtacttggacatgcggcatatatccttgagggaatgcgcagtctgcatgatatcccgtctttcactatgcaggtagagtacaataatgtgcggatccaggatgaatttatctatggaatgatcagcaattccacatcggtgggtggatttaagggaatgaccggaaaagatgtgcttttagacgatggcgtgtttgaggttaccctgatcaaaaaaccacgcaatccgattgaactcaacgagattattgcatcactcatcaatctggtggatgatacggatatgatctattcgtttaagtcagatgaagtagagttcatggcaagagaggaagtcccttggacattggacggggaatttggcggagcgcatgaggaagttatcgtaaaaaatatctgccgtgctgtcgatattatggttccggcaaacaaatgagaaagattgttataaatttaactttattttttgaaagaagtaatatataatacccatagggtaaaatattaattttatggaggaataacacatgttagtatctgcaaaagaaatgttagacaaagcaaaagctggtcactatgcagttggtcagttcaacattaacaacctggagtggacaaaatctgttctgcttacagcagaggagttaagatccccggttatcttaggtgtttctgaaggcgctggaaaatatatgacaggtttcggtactgtagcagctatggtaaaagctatgcatgatgagttaggcatcacagttccggttgcattacacttagatcatggtacctacgaaggatgctataaatgtatcaaagcaggattcacatccatcatgttcgacggatctcattacccaatcgatgagaacgttgagaaaaccaaagagctcgtatccgttgcccatgcaatgggaatgtccatcgaggcagaagttggttctatcggtggtgaggaagacggagttgtaggtatgggcgagtgcgctgatccggaagagtgcaagagagttgcagatcttggcgtggacatgcttgcagcaggcatcggtaacatccatggtaaatatccggcaaactggaaaggattaagcttcgagactcttgattctatccagaaattaacaggccagatgccgttagtacttcacggaggtacaggtattccggaagacatgatcaagaaagcaatctcccttggagtagctaagatcaacgttaacacagagtgccagttatctttcgcagatgctacacgtaaatatatcgaagctggtaaagatttagagggtaaaggatttgatcctcgtaaattattagctccgggtgcagaagctatcaaagctactgtaaaagagaaaatggaactgttcggttctgttggcaaagctgaataatattgtcgcacagacggaagtccactttccataatgttatatttaacaaagatttcagactttacatgaatttattgttcaatatagcaaaatgataaaaaagtgaaattttctcttgcattttggagagaaaagtattatcttaagttcaacaaaacaaatgtgagagatgaacaagggcgttccaagtagcttggaatgctctttttttgtaagaagttgtcacacaatttctcataaaagccatataggagaaatttcttactgacattcatccactttcaaggtacaataagaaatgagaatttaagatctcttacatttgttcaaaaaagcagggaatagtctcaggggattagaccggtgaagaagaaaggatgtagaacatgagcgaaacaggatacttaaatgtagcagagatttttggcgagaacgtattcaatgatgcagtgatgcaggagcgtctgccaaagaaggtttacaagaagttaaaggaagtaattcaggaaggtcgcgagttagaccttgaaacagcagatgttgttgcgcatgagatgaaagaatgggcaatcgaaaaaggtgcaacacattatactcactggttccagccgctgaccggagtaacagcagagaaacatgattcattcattacagcaccgatggagaatggcaaggtactaatgagcttttccggtaaagaactgatcaaaggtgagccggatgcatcttctttcccatccggtggtttaagagctacattcgaggcaagaggatatacagcctgggattgtacctcaccggcatttgtaagacaggatgcagcaggcgcaactctttgtatcccaacagctttctgttcttacacaggagaagcactcgatcagaaaacaccgcttcttcgttccatggaagctatcaatgagcaggcattacgtcttgtaagattattcggtaatacgacatcaaagagagttactccttctgttggaccggagcaggagtacttcatcgtagacagacagaaatatttacagagaaaagaccttatctttaccggtcgtactttattcggtgcaatgcctccaaaaggtcaggagatggacgatcattacttcggtgcgattcgtgagagaatcgcagcattcatgaaggatgtaaacgaagaactctggaaattaggcgtcagcgcaaagacacagcacaacgaagttgcacctgcacagcatgagttagctccgatctacgcacaggctaacattgcagtagaccacaaccagttggtaatggagacattaaagaaagtagccggacgtcatggcttacagtgcctgcttcatgaaaaaccatttgcaggtgtcaatggttccggtaaacataacaactggtcaattacaacggatgatggaatcaacctgttagagccaggcaagacacctcatgagaatgtacagttcttattagtacttacctgtatcttaaaagcagttgacaaacatgcagatcttttaagagagtccgcagcagatgtcggaaacgaccacagattaggagcaaacgaggcaccgccagcaatcgtttccgtatacttaggagagcagcttcaggatgtattatcacagctgatcagcacaggcgaagctacacacagtcttgctggacagaaattagagacaggtgttaagacacttcctgattttatgaaagatgcgacagaccgtaacagaacatcaccgtttgcatttaccggtaataaatttgaattccgtatggtaggttcccaggattctatcgctcagccgaacgttgtattaaatacaatcgttgcagaggcatttgcagaggcatgtgatgttcttgaaaaagcagatgactttgatatggcagtacatgatctgatcaaagaatatgcaacagagcatcagagaatcgtattcaacggaaacggttattcggatgagtgggtagcagaagctgagagacgcggacttccaaatatccgttccatggtagatgcaatccctgcattaaatacagagaaatctgtgaaattatttgaaaaattcaaagtatttacaaaggcagagttagactcccgtgttgagatcgagtatgagacatactcaaaagagatcaacatcgaggcaagagctgcaatcgatatcgcaaccaagcagattattccggctgttatcaaatacacaaccgtacttgctgagtctatcacttccgtaaaagcagcatgtggtgcagatgtcagcgcacagacagagatcctgacacaggtttcctctttactggctgattccaagaaagcacttgcaaaattacaggaagtaacggaaaaagctgcagagatggaagaaggcagagatcaggctgtatactacagagatgaagttaagacggcaatggatgagttaagagcaccgattgataaacttgaaatgttagttgacaaatctatgtggccaatgccatcttatggtgatctgttatttgaggtataaagattttccgacaataacggcagatatgtaaaaattagattttgtgtggaagtggcagtaaaaaatcgctgccactaccgcagaaatctgcaaaacaaggagaaaaatcctctgctcctgcaaaggcagtcgcatttttctccgaaaaacaaggaggaaaatcctctgctcctgcaaaggcagtcgcattttccttcggaaaacaaggaggattagtatgaagaaattagagattattattaaacctgaaaaattagaagatcttaaggcgttgcttgacagtgaagaagtaaatggtcttaacattgtaaatagcatgggttatggtaatcagaagggtattatcaaaaattaccgtggtgcagagtatgcagtcaatctattgccgaaaattaaagtagaaacagttgtgacagatgaagttgctccaaagctgatcgacaagatcgtagagcagattaataccggtcacatcggtgatggtaaaattttcatgtatgaggtggaagacgcgatccgtatccgaacaggcgagcatggtgtagatgcactgtaagttttttggatgaaatgaggagtcatctgaaaaataagaaaaggatcatgaatataacattatgagaaaaattgaatcaggaagaaatcattatcaaaggagataattgtgacacagggagaacctggggtcgtgattatctttttttatttcttcgcaaaacaacgaggaaaacaaggaggatttgattatggatatgagtgtatggtaccttatgggtgcagcgttagtattttttatgcaatgtggatttgctatggttgaggctggttttaccagatcaaagaatgtaggtaatattacaatgaagaacctgatggatttttgtattggtacagtcgcattttatctgttaggatacaatctcttatgtggagatggcggattcatcggctggggtttaaacccatttgctcattttggagagacagactggtccggatttgtatttaacctggtattctgcgcaacagcagcaacgatcgtttccggcgcaatggcagagcgtaccaaatttattacatattgtatttacagttttatcatcagcttatgtgtttacccgatcgaagctcactgggtatggggcggaacgccatggcttactgatcttggatttacagattttgcaggttctgcatgtatccatatggtaggtggtattactgctttcatcggtgcagcaatgttaggacctcgtatcggaaaatatgacaaaaacggaaaaccaagaccaattcttggacataatattttgatcggtgcacttggcgtattcattctctggtttggatggtatggattcaacggtgcagctgcaaccgatacgatgcagttatcacagatttttgcaacaacgactgttgctcctgcagtagcaacctgtacagcaatgatctatacatggatcagaaatggtaaaccggatgtttcaatgtcgttaaatggttctcttgccggtctggtagccgttaccgctggctgtgcaaatgtagatgtgatcggttcttttattatcggtgcgatcgcaggtgtgcttgtctgcgtagcagtatattttgttgaggataaattaaaagtagatgacccggttggtgcagttgcagtacatggctgtaacggtatctggggaacgatcgcagtaggacttttcgattacaaagatggactgttctatggcggcggtgttcatcatctgctgatccagttacttggaatcctctgcatcgcgggctggacgatcattacaatgggaatcgtatttaccgtcttaaagaaaacgatcggtctccgtgtaactgcacaggaagaaattgagggacttgattccactgagcatggattagagtcaggttatccggatttcgtatccagagagttacattaatatgcactaatctaatttgattagattggtgaaatctaatccccttagttagtatatacatcaacagtaaaaaccccgaaggtgacttcggggtttttgctgtctatataggaaaatcaatggctgagagatttttttgcgtgtgaaaaattcgcttgtatgaaactaaaaaaaatgaagtgtctgggaattttctgggagttttttataattcttatttccagtaacgggaattttgaacaaaatcaattaaatctgctttttcaattcggaaacttcctgcgatgatatgtgcgggaattaaatctttgtgaatcaaatctaacatttttgatttgctgatgtgtaacagatcttggcactgcttacgtgttagtaaatcgggttcatttttaaacattttctgttgtctccttttttcaaatagtggtctatattggatgaaattgtattaaataggtgttttgcggacaaaacgtaaagtatgtaagtgcgtttatatattatccagatggaaggaggcagagaatgtgtgataaaaagaaaaaggctttaaaaattataaatatcgttattatcacgtcatacaatttatggctaatgtttcggcgcgaatttgaagatgagtaagagcagtaacaggtaaacgggcatagtgtgaaagctatgccttatttttgttggaaaaagggagatgataagtaattactttgaaaatgattttgatgaagctgaaaagatgggcgtggaataaatgctttttgattatgtatattagatttttatggaggaaaagacatgagttatcaggaatttcagaaacgaataaaaaagattttggaagaaaaatttgcaggaaatgcagcagtcataataagtccggtattgaaaaataatgggatagagcgcattggtttgtcgatacagggaaatgaaagcaatgtatgtccggtcatatacttggaatattattacgagtcataccagagtggaatttgatgatattgtaaaggaaatagaagcagtgtatcagaaaaattgtatttcaggtatggtggatatgtcattttttaaagattggagtgtggcacaagggaaaatcacgttaaaactcataaattacgaagaaaataagaaactgttagagcggttgccgcataggaagtttttagatatggcgattgtatatcagtatgtaatggaaaccggacaaaaagaaagtgcgacagtgttgattaattattttcatatgaaaatctgggaagtacaggagcgggatttatatgagtgtgcctgtcggaattatcgaaaattaacaccagtgatggtagaaaacataaaatgtgtgatagcagagcttttagaagaaagtatgttagatataccactggatgaaggggaagatatggcaccattgtatgttgttaccaatcgggcaaaacttaatggagcgacatctatggtttttatttcagaactaagagatagttcggacgtatttgagcaggatttatacatattaccaagttctattcatgaagttctggttcttccggtgcaatatgcagatataaaggaattaagatggatggtaaaagaggtaaatggtacattgcttccagaagaaaagttgtcagatcaggtatatcggtattgttgtaaaagcggaaaaattgagattgtgtgaaataaataatgaaaatttcaaagtgatatttcaaggaaaaacatgtaaatttatagtaacttctcaagaaatatatcgagaaatggcggtgatatgttgcagtcagaaaattttgtacccatttatgaagaaattgcaagtgtaataggggaggaggaaacggtaaaactatataagaaatttcgcgggcagcagataacatttccacagcggttgtataacacagattatgttgctgcttatgtgaaagaaaactacaacggagagaatatccgtgaattagcgcgtgagtttgagtattcggaacggcgcgtgagagagtttttgaaaatttagtaaagtaatatggcggaggtaaaagagatgagtgcatcagttaaatatgtagaatggcgttgttcgcattgtggtaataccgtgagtagagcgaagaacttaggaaagccagcaggtggtttttgcagtaaaaataatcaaaaaccgcatacatacaaaaagcaacgggagtattaatagatgaaagcgaaagccagagcaaataatatcacttcaaagaagtgtgcattctgcaagaactggtacgacccggcaaattctgcaattaaaccctgtgggacaattacatgggaatatgacatggaaatgaagtgcatgtgcagggtaaagaaagttctaaaaaagggatttcaatcgtgttcccaatttgaatcaaaaatttagaggtaaaaaagatgggaaaactggatgatttaaggcaactgacagaaggactaatagtaatgcacatggatgataaatatggtgtgaataaattggaaaatgcaaaagaggaatttaaagtaaatttgcgtgatgcaattataaccaatttgatcttggcagcagtatgtgtcggcattatgtacttacgatttagagtttttggaaagcaggatggttactatggcttctaaaaaggtaaagatatcagcaaatcaggtgttgaatgcgacgaataaagttcttaatagtatgaccgagataagtgatcattatgtaaatggcgaaaaatattataattcaaagcaggcgaaagcggatttggtggaagtacaaaagttaagaaaaagaacagattttgtcgcaggacttacggttgttttatggttggtgcttataatcggaaccatcgtgttatgtgttactggaaatgatattgttttggagttgctgcatttataaggaagcaatggcatgaaaaggttaagcagaaaagcaagaaaacaaaagaaacaagaggaacagtgccgggaaaaaaagttatcgaaagcaggaattccatactctaagcacaagaaaagaatatgctatcattttggatggagtggagatatggcacttggagtgcggatatatgtcatgactgaaaaggataacgataacagatatgtttgccggggatgtggtaaggtatttacacaagcagaaatgaaacaaatggaaaaattgtgtttctatctacaggcaacgccagtaaaaagtaaaagtaaggtgcaggatttattgaaaggcatagagccggttgagtattattataaggatagaaacgaaattgttcgatgtagcagattagatgtgctacctagaatagcaggcgtttggaatgaataacaagagatgtcctgattgtgaatatcataaggatagaacttagcaatacgggtttataaaagtatacatttgcagacaccaaaaaagagtacaaagagcgttcgaaattctatacaaataggatttttggacgttctttttgtatgcagaaatttatggacagtgaatcgctaccattgtaacagtaaattttttaacgctaattcagttcaagcgcacagcaaggactgcgcttgaactatggaagaaagagaaactgaatcatcgtaaaaaattaactgccacaatgcaaggtcaggaggaaaaattatggcaacatatggatatcataggacatcaacaaaggaacagcatttagatagaggaattaatgagataacggagttttgcaaagataaccattataaactgggaaaaatatatacagaccaacagacaggaaagaattttagcagaccccggtacacggtactaagggatgatattttacgtgaaggagatacgttgataatcaccgaggtagaccggttggggagaaataaaaaggatacagtagaagaactgcggatgttggcaaatcgaggtatacgggtaatgatcttggagatacctacaacgttgcaggatttgtctaaaatggacaatgctatggcgaaaatgatattggaaacggtcaatcatatgctgattgaactatatgcggctatggcacaggcagaggttgaaaaaaaagaaaagagacagcgtgaagggattgaacagatgaaggcaagaggtggatgggataaatatggcagaccgcgtataaaacagccggataactggaaagaggttattcagagctggaaggcaggggagataacagcagtggaggctatgagattaaccgggatgaggaagagcagtttttataagctggttaaggcagagtaaaaaagtgttccagtgttccagatatattgcattttttaatataggaaaaagagtatttcccttataaaaatatagtaaaaaaagatatctaatataaccggaacactggaacaggggatttagacgttcttatgagtgattttttgtttataatttcgattagcaactttgtgtgcacattcacgacaacagtattttcggttcgtatgtgcaccagaatgtgcaaagagcatattgcattttttatttgcacaacgtgtaatgacttttgaatttgagtagtccagataaaaatagaagaatatagcacttaccagcgttggaaattcccagtctgaaattatttctgaatcttttaaagtaatcttaggatagatttctcttatttcaaaagaaagaacatcagagaaaatacattgagccagagatatgatgacttcctgatggctaataaaaaaagaatgacaaaaatcattatctgttaatggattagaaattgttctggatagaaagttaattacgtctgcattaggtgcgggagtaccattattttctataaggtctgaatagaaatctgttttaatgtctgtgatggagtttgaattattatctgtcttactttccgcattgttatctgtcgtagtattgatattgtcatcttttttgatgcctgaattgtcgtcaacatttgtagcagatttggcttctgtaatatcatcaatttgggacgttatgtgttttgatttgctgatattcaatctatatatgtaatcaatgaatgggtattttgaaaagtatgttcgatacttttcgtgatcggtggtatcggcatattctaattcatacatcacggagaaaaaaggattttgaataagggcaaggcagtttaatagtaaatcttttaacgtgttgtcgatatctttggagttggtatatgatttatcctttaaggtgttgtatttgagcatcaaacggtgaatttctattaaatatttcatttgtaattggtaatatttgaaatgtttatatgaaatgcaatcgtaaagatcattataacattcaaatatttgaagagtttgataattgtggtattcattatcatttttggggacaagtttaaaatttatgattgcaccatatttattacagaaggttattatctgatcaagcgtttcagccttggcgaaatcaatgtaaataggggacttatcttcagaaggatctgaatcgtaaagtgtgatgggggttaaatctgttgtgggtaatgttggtgaaccgatagttgtatcgttttcatcactgtctgtatggtactggtatttgggttcaataatgttgttgtatacaagcctcataggcacctccgtataaaaagtggacactaagtagatatatctatatccaccatgatatcgtacaattgaattgttggcaatggcagaatacagccgacggaaggagataaaatgtatgaaagaaacaatgacaacccaaagtaatatgacagaggtcgaaacaagcagattggagaagtatgtagagaggctaagagagcagccgcagtggagaaatcagcttttgattaagaatggacaggctacttttgtaaaaaatggaaaagttcatacatgcaataaaatagaaggctacgttaagttaccagatatgaaatgcgtggaaccgatccagcagatagagatgtcgattggttttgcaccaaagatgcggatgatcctctggaaagacaagaaagcatattttcgtggttatcgaaaagcaaatacagatgggtgtattttatttatacatgcaataagtgaatcgtacgatttattgattgtagatattaaagatgacataccagctttaattgctatagatgatagcgaaatagagaatgtaaattcgataacatatccgatactggaatatcttataaaaaattcgatagaggtgtcagagaatgtcatagaggaagagccttacgggaaaggggattttgatgatgagtgggaataatttgtttatgaaacgacaggcgcggacaatcgacttgctgaatgaattagaaaatacagcgacaccgtttataatccatcagacagaggttgatatggagacagaatttgattattcatgtaataaaataaatggaaataagcttgaggatgaattggaagatatcgtcgtaaaagtaatttctacaaatgacacgaaaaagaatttgcatacgttgctaagagaaaaagaattacggatgcaggaaatagaggaactcattcttgaaaacgcaatagttaaaaaaatagaggaaaagctttatatttggaacggcaaatattatcgacagcttaatgaagaatcctttgtcagggaagcgcgaagtgtgctgccaaaagagatgcaaaaaagaattccatattataaccgatttcaggatacgtataaatatatgcaggcaaatggtagtctgacaggtgaatttaagaaaaaggatgttgcgactgcaaaacatatgattgtttttcaaaatggcatatataatgcagagaaagatgcacttataaatagcacctcaaaatatcctgtgttattcgagataaatgccgaatacttagggaatgaagaagtacagacgccatatatggataaaatcataatgcaggctacaggaggagatgtagatacattagaaagattttatcaatgtctgggatatatttattcacaaggaacggaggctaaaaaattctttgtatttggaacagctcccgatagtggaaaaagcattattggcgaatttatagcaaagacaataggagagggcaatatttcaactatttcgcttaatgaatttggaagccgtttcaaacttgggagtataagtcaaaggatccttaattacaacatggatttgccagcaggcatgttagacaaaaaatcagtgcagttgttaaagctgcttaccggtgatgcaaaaatagattgcgaagaaaaatatgtgcagaacagaacggtgacgcatcattgtaaatttttatttgcaacaaatcatccaattcagctaaaggaggatgatgaggcattttatcatagaatgctgttaataccgtttgttaaatctatagctgatgaaaatcgagattatagtatgccagaaaaattatggaaagagcgtcatgcaattgctaccagagcggcacatgcataccgtgatttgtatagaaataattttgtttttcatgaatcagaacttgctgataggatgttaaatgaatggagagagaactgccgccaaaagtgtttgaaagaattcttttatcaatgctgtgaagtggtaaaagaacgtgaagatgcgtttgtacccacagatgcgttgtttaaggcatatcggaaattctgtgcggaaaaggacatacatatacgagatagcgataaaccgcagttttcacgactatttaaaaatacatttggcatagccagtaccaaaagaagagttgatggttataattcaccagtaaatggttatctgggaattcaattaattgaatgaacccacagtcagctttttgcggaatacaattatactcaaaataacaggaggacaaaagaatgaatacagatacaagcataacagagacaaaaggattaccagtagttgtgaacgtagagggtttatgtgaactgctgcaattaggcagaccaagtgctttaaaagtggctgttgcagcaggggcacgcattgatattgaaggcagcaggattttaagatttaatgtgaaaaaaatccttgagtatattgaggaaaacagctactaaaggttaagaaagaggcggaggaaactctgcctcttttcatgggaggatttgaatatggcttttgataaggatggaaaaactgtattaccggcaaatatttattatgacaggaaaaaggaaatttactatgccgataaagtgtataaaggtgaaagaatttattttgcagggaaaacgaaagcagaagcagaaaaaagattgcggaaaaggctatatgagatagatatgcacatttccccacaaaagaaaagtaatgttacggtagaagaactttttgaattatatgtaggagagtatcacccggaattaaagccgacaaccgtgcagcagtacagatttttgtatgattattatttgaaggattttattggaaaggtaaaattgaaaaatcttttgccgtatcatattcaaaaagtatataatcatcttgtagaaaaaaagatgaaacagggtacagtgaataacgttagaaaaatgctgcgtactctgctgaatgaagctgtaaggcgtggtatgctttcggcagatgacaatccatacccgaaggtaaaggcaccaagtaacttgccggtaaagcagcaaagaagttttacggaagagcagagagaccagtttttacagtatgcaggaaaaagtttatatgcaaatttatataaactgctgctctatacaggaatgagggttggagaggcattagctttaatgatctgtgatgttaattgggataaccatgttttgcatgttaccaagaatttgcagaaaacaacgcagggggtgttttatatagaaacacctaagacgcgcgaaagtatccgggacatctatttagtaccagaggcagaggaagcgataaaaagccagttggagttacgaaaaattattgtcgaaccgatacaagaagatataaagggcgagtttgaaaacttattatttgtaaatactaagggaaaacccgtaaatgtcggttcagtcagacagagcatcaatcggattgttgaaaagatacgtgccgatggaaataactgtccggacatatggatacatgctatgaggcatgggtatgtatctattgcggtggcaagaggtgtgccattagaggtagtgcaggcaaacgtcggacatacgagtattgagacgacaatgcgttatttggagttgcagccagactatattaggaagcagagtatgaagatatcagatctttatcagagcaaagaagcaggagacaagtctatgcaatagttatgatggatttttggctgatatcagagtataataaaagaaaccaatagtgatttttataaggaaggatagggtgattttatggcaccattagcacaggaaactgtaaaatatagcgagcaggaagaaaaactctttcgtgaattggataaaggaattgatgatatggaacaggggaataccattccacatgaagaagcaatgagacaaattcgcgaaaggttgttaaaggaatatgcaatataggttacgtgtgacaagggaagcgtcagaagatgtaacagggttggcaggatatattgcgcgaaaatttgctaatatagatgcggcactgaattttcttgataaatacgataaagaagtacagcgactgactaattttccatttggttatcgaggggtaagttttgaatatcgtggatatgaaatcagaataaaatcctttggtacatataatgtgttctttacagttgatattgctgaaaaacaggtatttgttttgcgggttttaaaggataggcaggattggaaaacaatacttggaagtcaggatgaatatcattttgaatagaacggatatggaaagacagccagaaaatagtctgggaatttgtctgggaatctgactgggaatttcagtttagagtaaaacgacagataatcagagaatgccgaaaataaaggcttttatcaaattagaaactaaggaaaatgcgaaaaaatgtatccccttagttagtatatacatcaacagtgaaaaccccgaaggtgacttcggggtttttgctgaaaaatctaaaaatcttcatcgtccgtccacatgtcaggtgacatgcaggcgcggaaatattcgataggcttttcactgtatgcagcacataggaaaagccagtcatagggattggcagcgaaaagttcttcataaccgcattttaccagacatgcattggcttcatcgatataagtttctgtcagttcagattttgtcagttcagtatatccgacacttagttttacattcagccagaaacggtaaaaatcaagcagcactatcattttccgaatcgaatcataggaagtcgagacagatgatttttcttccgacagaatatccgacattgtttttttgctcggaaagttatttcttacaatataaggaatatttggatttttgttcattccagagtgtgtatacaccaggcggtctaaaataaaactgttattgtaaagatttctgttgccgataaaatcgagaatatattcataatcacgatcagaagggttcgtgctgtaagactgtgcgtcatataaaatttcgcgcaccagcaggctgcaattctgatacttatgaatatcaatggaaattctgccggagatcatatttctgttacgggacattgcatagagtgtggttcgaagttcgttgacagcatcatcactttcttttgaaccgatgagctgggaaatcaggtcatgcagcgtatgaagagcacttttgttccagtgacagaaatctgctttatttgcaattaaaaaatctattagttcatcggcagattccattgcagcaatcgtattctgtacataactggtataataagtatcgatgtcatccgaaactggtaaagtaacgggtgctgcgtcaattttctgaattatttcctgagctttttgataagaaagttgatgtaaaaaagaataataatagactgcttcacggatgttgtggcagttaaaagcacggtcataatagacatgctgaaaaaaccagacagtttcctcataggttagctgcatggcaaaacacagttcatatattttagggcggcttcctgcctctacttttgggcggtgatttccggtaaaccaggacatcactgttgcacggctgattgtagaaccgatatctttcagtttagagaaaagataatcagccatttcagcattgtctgaaaagtctacaggagcgttctttttttgcagaagttcggtcagaccttgtccgaaagagcggaaatgagtcggatcttttaaatattcaactgcctgatcgacattgtctatcgaagaataattctggatactgctctgattataaagtgtatagtctgatttcattttcattctcgtttctttttcatgataaaaatactctgttaaatgcagatatgttctgctaagattatagctgaaaccgataaatttttctacaaaaaatacaattacaaacttgcagagcaatatcgttataataaacgggaaacagttaatctgatagttacagagaaattattttttataatcaatgaggataaaaatgcgggatatgagaattgcattgtgcaatggatatgaaatgaaaatttcagaaaaccggaaaatccggattgcagacgaagcagggagaggcgccggatgtattgtatatgatgccatttactgggatcagatgcagataaaacacaaaataagagtccgggagtgttatccggcatacatccaactgaccagagctgctaccggagagctggggccttctggaaatccagaaaaatttgaaaaagcgaaaaaccgctttacagatgcgtataaaagaaatacggatatcagaaatacgttagggctgacgaactctaccgtcaatgcggtcgatgtgatttcctgtaatcacacagtttatatcctgctgccaatggatgaaggaattgattacaggtattatgaggatcagtcattgcaggaacttttccggcatatgaaaagtcttgcgcagattattctgaaatatcatcagaagggatatcttcatctggatataaagccggaaaatgtgctgattttaccggaaacaccggagcatgtgattctatttgattttgattccgtaactgcaatcggggaattacagaaaaatgcaggaatcccttattcggatggattttctgcgccggaacagatgcagggaaaaatcaaaaaaataggatttcattccgatgtatattccattggtgctatgctgttttttaaactttttgtaagaaaaccgtgtgaggctgactgcagaatcgcgagcagctattcatttgaaaaaatgcggtatggaagcgaaaaatatcagccgaagctttataaaatgttagatttatttttgaaaaagacattgtctattgcgacggcaccgagatggcatgagatgcagaaggtaatcgatgcgcttgacgaactgataaagttagcagacatcaatgatgtatatctgctggattcattccagtataattctgcctgttttgttggaaggcaggatgatttagaagaaatcaacgagcttcttgcaaagaatcagcttgtattcctttccggaattggaggaattggcaagacagaacttgcaaaacagtatgcataccggcaccgggcgcagtatgataccgttgttttcgcagtatatgagaaaaatatagagtcacttgtgcgggatgaaattggaatcaaccagatcagccgtgaagaagatgagacagagcgggattattttaaaagaaagatcgaagttttaaaacaggctgcaacgccaaaagatctgattattattgataattttgacgtagatgcagatgaagatttagaaaccctgttcgcctgtccctgtaaatttatcattacgacaagaaaagatttcagagattataattatgagcagatcaatgttgaccggatcaaagatattcaggaaatcttaaatctgttttatacttatacttccattccttatacggaaaaagaagtcgaagcagtccggcagttaatcgaatatgtggaacatcatacgatgaccgtggaactgattgcaaaatatctgagaaacacagagatttctccggaaatactctatcagaaatttttggaaaaagacggagttacgaacacacaagaagtccaaatcagacagagaaaagacaggaaactccgctctgagagtgtaaacagccatttaaagattctgtttgatatttccgggtttgatgtcatagaaagagaaattattgcaagcctttccctgtttgatggaatccgtattagccggtcacaatttgaaatattattatgtggaatcaaagaaaccgcagaaaaactcgacggttttattcaaaatggctgggttatatggaacaaagttaccggaaaaatatcgctgcaccaggtgatacaggatctgatttaccatgaattagtgcctgatgcggataattgcagacacattgttgccgggatgaatgaatatctgtcagtagagccggaagtttatgcacaacatgatatccgggagaaaatggctgcgatttttataaaacgccttaccggaaataacatgtcttatgcatggctttgctttagagcaggagatgaggaaaaacttcaagaggcagaaaaaatctgtctcgggcaaggagatacagaggcgtatgatctgttgcaaaggattgagaggaaacggatcaaaatggtgaatgacagtattgaaattgactggtctgccacagattatccggaaagtgcaatgcaaaagttagatgagatggccggacatctggatagtgcagcagcatattgcagaaaaagttcagaaaatccggattatctggtaagggaatattttgaaatggcaagtgagacttccgacatgttagatgaccgtgtggaatggtgtgcggcagatgtaccgattccacagatggaaaatctttatgaaaaaatcagtcaattatttgatctggtaatgaaacaaatgccattgacttcctatatgccaaaggaaaaagaaaaagcatatcaaaaaataagagattattattcgaaagatcctggtctgacttaccagggagaatttcgcctgaatctgaaaaaaggctaccagtatcaggaacttttaaaccagttaagagaagatacatctttccatgaaattgatgatggaaacaatatgtcttatgcagaactggcagaagaatatgaaaataacggaaaagagcaggaagcgatcgcgtgttatcagaaagtatacgaggaagattttgcgacgatggaaggaatatgtattccggaaagccgggaatatgcagcgaaaagtattgcagaaatttaccggaaaaaaggtgatatagattctgccattcagacattagaaggagctttttctgatacagaatcggaagatatctgcatagagctgattgaaatattaaaagaacaccagaaattgcaaaaagccagacagtatgccattcaattaaggcaaaggatggatcctgcaccggaaaatgcgtatgataccggatatatgcttgctgcctgctattttctgtattccattgaagagaataagacagaaaaaacgcagttgtggaaagaatgtctgaaatattataagatgcttggaacaaatgaaattgaggaacattgcggtgattttcttgtggaatatatacagaaagaaacctcttccatggaggaggttttatctgtaatagacagagtccgtgaatatggaaaaaataatatcagaaaaacaattctctggaatgtcataaaaaaatatgagggaaagaaccattttgaaaagaatcagatcatctgcctgataaggctggcggaactttcgaaggaatatcgttgcaaaaatataaaggaagggttagagctatgcaaccaggcacaggatatatacaataaatacgatctgaatgatgcgtttcttcaaagccttatttataaaacaagggaagagcttatgaatgaggggaattttgattatgagcagatcacgcagatcaggaaaatgtgtaactacagactgttagcagaaaaacagatcgcgcaaaaaaaatatacaccggaagaacagattgagatatggaaggaggctgcaaatcagtatagctatatagaagatggagaaaaggaagaagagtgtcttaaagaagcaatcaaaatagcagaaaaaacatgggaaaagatagaagccagcgagttctggacggactattcgagcatgcagcatgatcttgtcacattagagattgataatggaaaattagagacagcagaacagaatcttgcgctgttgtacgataagacagctgcgcatattttagaaaaaaatgtcaaagaggatacaacggatcactattgggatatagattatattgcatttaaatatgaggatatagcaaatataaatgaaacaatccggatatatttagcagccttgtatatcctgcttgaaaaaaaaccagattccaaaatcctgacagacaggcaagacgggatcggacagttgtgcgtggtactgcagcagttattggaaaaagaatacgattcagatgtaaccaattcgatcatagaagtgaaaaggcatttgcaggaatttttggaggacacggcttatgagcaggaagatgtttcgcgtttactgcaaaaaatagcggaaaagtatcagtataaggattttgaatttaaacatgaaatagggcaaaaataaaaactgccacatcggacaacccggtgtggcagttttttaatcactcttacaagtaaaaatagccggtttggtaaaatgagcctgtaaacaaaaacaagtctttaagaaaagagagggcatacgtcatggaaacagttcttttaatcatttatgcggcagcatcctactgggcaacaaacaaggtattgtatgagggaaaagttgtattttactcttccgcttatgtgcattacatgaaaaaatttttaataggaatgatgtttggctggatactgattccgattgcgattttaaaatgcatttttttcaaataggtctggaaagaaataagagcaatcaaacaatgaggaaaaaaggagtggacaggttatgaaacagacaatggaagacagactggtaagcaagataagcaaaggaaaattaaacacaatccacgtaagccgtgaagagatggtggaactggtagatcagcattttatacagaaagcagagacagaagaagagtacaaacagatctggaaagtcataaaaagaggaatcctttttgataaaatgatttatacaaaagatggaaactatcagatgcgctcctgctccagccagggcggacacagcctgagaagaaacatatggatctatgataagacggcagacaccttttatcagtatgattattggtatgggttttatggaaaattcaaaaaaatggtgcgcagtaagctgcaggaaaaacagaaataataaaaatagcgataccccaggttacagtagtggcagtttgaacccgttacggtttaaactgctttacctgaaattgtaatttgcaagtagaaattgcaatgcaatctataactgtaatttgcaatgcaaacccaatataatgaaagaaatattttacatgcgaggtgatatgcttggaaagtatgacggaagttacttcggaagatctggctggagtatataaggacctggctgaaacggttggcgttgaaaatgcttataaaatatatagtcattttaaaggattacagttaatgtttccgctaaagttttattcgaagacgtacataatgcagcaaatctgttccgagtataatgggaaaaatgtacatgccctggcaagaaaatacgggtattcagagagcagggtgaggcagatattgagggaagcaaaagatgagattgtataaaattttagattttatataaggcaaaacgagggaggaagaaatatgagcaaatcaaaagtgaacatgccaaaagaattgaaaaggaaatgcaatataatcattcattcagcgactggtgcatcggcagtggcaggacttataccgataccaatgtctgatgcaatacctatcacagtagcacagataggtatgattataaaaataggtgacttattcgatatctctttgtcagaagcagcggcaaaatcaattgctggagttgcattaacacaacaagcgggacgttccgttgcttcaggattgttaaaaatgattccgggagttggcacgttaataggtggaattataagtggatctacggctgcggcattaacggaatttttaggatgggtagtagctgatgactttttcagaatgtcacaaggtgaagatccggaaaatattgtagaagttgccagtgagttaaaaggttcatttcaagatgtaagatttaaaaaagaatgaagtaagggaaaggtgtaatatggctgataaaaaaacgagaaaaacaagaagtgactgtacggtaggtacatttgaaaagaaacatggacttccgccgggaacttttcgtaatagtaatggacgggataccagatccgataaaaggataggaacaatccgcaaagaacatagtgaaaataaaaagggataggtgtaataaaaatatactttatgggagatggaaaattatgtttggaaaaaagaaaaatagtatcaataaagttgtggtcagttcaaaagaagaattaaagacagcaattaaacgtaaggagccatatattgaagttcagggggatctggcaaagaagatgaaatggatggggaaactttcatcggtaaaaatcgctgcaatcatagcattactaacatcgttagcagcagtgccgggaggtggcgtattaactgttagtgcattaactgcaggaggagttgtagaggcagcagaagctaatgtcgcaatttatgtaataagtatattaggaatagctaccattattggaatatttagaggatataatgtagaagttgaaacaggtaaagtgtcgcttagacttaaggcaggagcctaatagaaaagggaaaaagatgaaacaaggtaaaataattcaggaacctgaatatttcagaaacagatgcccattttgttatgagaaattgggaatgaaagcgacctggaaacgaaaaataaaaaaggtttgttattgtcctaattgccacaaaaaaatagacgaaaggtttttagtttactaaacagaaaaataccggagttccatgaaaaggagccccggtatttttctgttttatgagtgatcatccgccatttccgtcggagttgttgtctccgctggaattatccgtaccaccggtatcggcaggagtattatcagaactgcctccgccggaattatctgtaccgccggtatcggcaggagtgctatcagaattatccccaccggaattatccgcaggcggctgtgtctgctgggtattatcggcaggagcctgtgttccgccggaattatcattatttacacctggaactgcagagaatgcggaagttccctggtaggtggaatttccttcgttgtgcattgtacaggtattattcttaaaatcatccgtcagaagatatggagtatcctctgttccaaccgttccgccaatgacgaatactctggaggaaatggaatctgccgggcagtaaccaccggcaagctgaccggaagcattgcagatatttgcaacgatatgatggtcacaatattcggtaggctgtgtaccttcagcaaaatattcggtatagacctgactgccgcgtggatccgcatcacagacaccggcgattgcaagttttccggattccttgcagacctgggctgtaacgatcccggatggctttgtgaaatcctgatattccagattttcgtggatgcggctcataaccgctttccagattttctttggataagtggtctgaccgccggattgtggcgagttatcatcaaatccaccccatacaacacaggtataatatggtgtgaagccggcaaacaatgcatcacggtttttggttgttgtaccggattttccggcctgggccatagagcttccaaagtaagccggggtaccggttccctgagtcataacgtctttcatggcatcggttaaaagccatgcggtagtgtcttttaagacggtgtgtgagacaggttcagtattgtcgatcagtacatttccatcatgatctaaaattttagtgtagaattttggcttgatgtaagtcccactgttggcgatcgttgcataagcagccgtaagctctaagttggtaacaccatgtgtcagaccgccaagtgctaaagtctcattggaactctcatccagaccgacggttgtgatgccgaaatcgcagatataatcatatccgagggatggaccaatctgtgctaacgtttttacggtaacgatattgatggagttagtgattgcctcacgcagtgttgtgaaaccgcgataacggttgtcatagttgttaacggcaccaccctgaccactgccgtaattgtatggtgcatcatcctgaacggaggcaagggtaagaccaccggcatcgagtgcaggtgcatatgcggcaatgatcttaaaagtagatcccggctgtcttgtggtatctgctgcacggtttaaagtcttgttggcggttttgtctccacgtccgccgactaatgctttgacatttccggtactctgatcaatgatcgtaagagctgcctgcggctgaagcgtgtaggtaacggtttcacttccatttacgatcgtatcaccgtctttcatgatgtccgttttgtactgttcaattgcagcagctgcctcttcttcggagttaaagttgatcgaaaaactcttgttggaagactgataataggaaagcatcgtctgttcactgtaattcgatatggaaccgtcggcagagcggacagataaacgataggaaaacgatactttcggcgcagtcggataattgtccagattattcacttcatcatcacagatcgcctgaatttccggatcctgtgtagagtagatcgtaagtccaccttgataaagtgctttgtaagcctgcgtctcagtgtagcctttctgctccaccagatcctggatgacctgatctgtcagttcatcaacaaaataagaattaatgctgttggtttcagattcaatgttgacgagctggatgcggtcgtaaacattgtctgcaacagcttcatcgtattcttcctgcgagatataaccctggtctttcatgttgttaagcactttcatgcggcgcttggaattttcctgcggattggtaatcgggttatatttggaaggattctgggtaatggcggctaagactgcacattctgataaagtaagatcagaaacgtctttgccaaaataacgttccgaggcgacaccgacacctaaagtattttgtccgaggttgatcgcattcagataattttccagaatccagtccttgtccactactttttctaactgcagggcgagatactgctcctggaactttcgttcaaacttgtcagccatggaagattcgcttgtccaactggtaaagacggtatttttcaaaagctgctgcgtgatggtactggcaccctccgagaaatgaaaaccggatgcgacaccttttacgccggcacgaatgatacctgttacatcgataccgttgtgctcgtaaaaacgttcgtcttcgatggcaacgaatgcatgctgcagattctttggtatctcatcgatcgtaacggcgcgccggttagaacccgatgcaaccaatgtggcagtctggttgccatttgcatctaaaaccgtggataagaaaccggtaggagtggcaacaatatcatcgatcgttggagctgaggcgatgattccgcgaatgactccaacaccggagcaggcgccgattaccatgacggcaaatacacatacaagcagcgacttacaaaaaatcacataaaactttttgcgaatcatggtacttttggaagttaattctttttcgcgcttttgcgtacttttctttccataattcatgttaggtctccttttttgtaataaaaataaggtatgaaattataatcctttttataatcaaaatgaaccatcttcatattatagcaaagaaatgtgtcggaataaaggaaaaactgaaaatacaggtgttcttcatttatttttaagaattgaatttcaaaaaaaaacatgataccataggaacacgcgaagaatcagagatgaaaatatacctatttatatgtagaaatatctgactgataaaatataaaaagttttgtgacgagaggaatgagtatgaaaacagtatattccggtggagaggcagaaattgtagaaaaaaaatcaagatttattgcaacggtgcgtccggtttcttcagaagaagaagcagttgcatttattgcagagatgaaaaagaaatactgggatgccagacataactgctctgcttttgtcattggagacagacaggagatgagccgctgctcggatgacggggaaccggcacagacagcgggaagaccgatgcttgatgtattgctgcgggaagatatccacaatgtggctgtggtcgtcacaagatattttggcggagtactccttggaacaggcggacttgtgcgtgcatatcagaaatcagtccaggaagggcttgcggcaagcgtcattattgataaaaaggaaggacgcagactgtcagtgggaaccgattataccggacttgggaaattacagtatctggttgcacaaaacgggctgacactcatcgacaccgtttataccgaaaaagtggagctgcttctcatggttccatctgagatgcaggagcagaccgaaaaagaaattatcgaggcaaccaatggaaaagctgatatttcctggggtgaaatggtattatatgcaatggttgaaggaaaattgcaaattttttaaaattttttcaaaaaacagttgacatttttatttcactcatatataatagctattgttgacggcgtgaaacgctgaaaacaaaataacacaaagggctatcgccaaacggtaaggcaacggactctgactccgtcatttcaaggttcgaatccttgtagccctgctaatgagacctcagcagtgagaactgctgaggttatttttttgaccggggaggcgcaacagccagtggtcacagacagaaaatttcgaatatccctaccataactcagaaaaatgtggtagcataacaaaagaacaaaaacagtaaagcagttatggacgtttcaaatacccggaatcgaggcatcgtatgtatagttttagcaaccgtgtgcgttacagtgaagtaaatagtgaaaaggaactgacgttaccgtcattattggattatctgcaggattgttgtacgtttgagtcagaggattttggagtaggtgtggattatcttgcaaaagaacaggtggcatggatcttatcttcctgggaaatcaaagtttaccgatatccgcagatgggacagcatattaaggtcagtacatggccgtatgcattccgtggattttatgggtaccggaacttttgcattgagggagaagatggagaaatatttgcagaggcaaactcggtgtgggtatttatggacactgagaaaatgcgcccggcacgggtatcggaacggatgcaagaagtttatataccggagatcagggatgaaataccgggagaatgggcagatcgtaagatcagtttaccggatgaggcagtgcaaaaaagtgtcgaaaaggaaccggtacgtgtttcccgtttttacattgatacaaaccatcatatgaataatggaaaatacattctggtggcggaggaatatctgccggaacaggtttttgtctgtggacttcgtgcggagtatcgtaaagctgcaatgttaggagatatgctgtatccggttgtcacgatggaagaaaaacagattacagttactttggcagatgaaaaaggggcgtcatatgccatcatctgctttcagattcagaaaaaagaaaggcaatcataaaaatgcgattaggtgaatatcagaaacttgttgtgataaaaaaagtagaatttggcgtttatctcgcagagcgcatggaggatgaaacccgcgtgttactgccggaaaaacaggtgccggaaggaacgaagatcggggatgaactccgggtgtttctctataaggattctaaggaccggctcattgcgacgacaaacacaccgaagctgacattgggaggtcttgcggtgctgactgtaaaagaggttggaaagatcggagctttccttgactggggactggaaaaagatctgtttcttccatataaagagatgacggttaaggttcagccggaggatgaagtcttagtgacattatatattgacaagagcagacgtctgtgtgcaagcatgaagcatttgtatgatcttctgtcattagaatcaccatatcatacaggtgatattgtcaatggccgtgtctatgagttcagtgataattttggaacatttgtagcagtggacgatcagtactctgcgatgctgccggctttcgaagatcacagtatgctgcgtatcggtgatgtcattgaggcgactgtgaccaatgtaaaaccggacggaaagttagatattactatgcgccagaaagcatatcttcagatggacgcagatgccgaaaaggtaatgcaggtcattgaggaatttgcgggcgtgcttccgtttacagacaaatcttccccggaagtcatcaaaagggagaccggactcagcaaaaatgcatttaagagagcggttggaagactttataaagagcgcaggattgagatcaatgaaaaatcgatccgtaaaattgattaattcaaaagcatatgctatgataggaaaaaattgacagaaagaaggagaatcttatgaaaaaagtcatcagcacagacaaggctccggcagcaatcggaccttattcacaggcaatcgaagtaaacggaatggtttatacatcaggtattattccggtcgtaccggaaaccggtgagatcccggaaggttctgtggcacaggcaaaacaggcactgactaacctttcaaacctgttagaagcagctggaaccagtatggcaaacgttgttaaaacaactgtatttatcaaagagatgaacgacttcggggcaatcaatgaagtatatgcaacattttttgacggagcatttccatccagaagctgtgtggaagttgcacgcctgccaaaagatgtcatgcttgagatcgaagctatcgctgtaaaataaaaagcaatggattacacgttgtgtaagcagatctgttaccataggttaacatgaaaaatcccggtacaaatggatatgtttccatctgtatcgggatttttcctattttgccggcacaacatataatccgtgaatatatattgtttaaatgtagacgtcaatatttccgccaagtcccggtgttacggaacgttccatcatctgaaccatagcggtgcccatctcctgtgtcatatcaagctgctgacttaataattcggttgaaacggcataggaaagactggtctggctgacggaagaacctgcgtcgtaggactgtaatgcactaagtgccggtgtcatacctgaaatatccatgctgcacctcctgaaaacttaattgtgaccttattatgacaataatcaacataaaaaacaagctttttatgagaaaagacaatgattttccggaaaaaaacactgtttttcctggaaatatgatgatttttcgctgttttatttgaaaaattgaataaaaaggaatgtaatattttagtaaaattcacgatgaatacaggttgacatggaaatatgcctttgttataataatcgtgtaataaatgtaataaattcgtaacaaacaataaaaacagtgttaagctgttttttgttgtggaaaacatgagaactcagttggaggcttttcgtaaatgaagaagagaatggtaagaattacaggctgtcttttagcaggagcgttatccattggcagttttggattaaatacatatgcagctccggtcgcaggcgtttcaagtgtgactgcagttgagatcgcagagggacagactccggcagcaggtgtttcacaggcactggcacagtgtcttgcggacagcaatgatgcagcagcccagaatgcagcagagcaggcagagcaggtcagtgagaatgatacaccggttgttgcttcggaatatacagatattgcaatcgcgcaggtagataattatgtaaatgttcgttcagaaccaaatacggacagcgaggtacttggaaagctgtataacaattccgcaggaacaatccttgaaacaactgacaatggttggtatcgtatcaagtccggtaatgttgacggatatgtaaaatgtgaatatgtagtaccaaatgatgaagaactggcaaaaaaagtcagcacaaaatatgctaaagttaataccacaacacttcatgtaagaacagagccgtctacagatgcaagcattctgacacaggtaccggttggtgatgatctggttgttattgatgatgaatctgtagaagactgggctaaggtaacaacagaagagggtgacggctgggtacataaagattatgtagatttcaacattgagtttgtacaggcagagtcgaaggaagaagaaaaagcaagacttgcaaaagaagaggcagagcgtgaggcagctgatgcagcagcaaatgcagcaagaaagaaagctgacaggaagtcatcttcttcaaagagctccggaagttcaaagagttatgcgtcagcaggaagctcaaatggacaggcagttgcaagttatgcatcacagtttatcggtaatccttatgtatacggtggaaccagtctgacaaacggggcagactgctccggtttcgttatgagtgtatatgcagcatttggcgtaggacttccacattcttccagcgcattaagaggtgttggatacgaggtaagtctttctaatgcacagccgggagatattgtatgctacagtggtcacgttgctatttatgtcggtggcggcacgatcgttcatgcaagtacaccgtctagcggtatcaagttctctaatgtaaattacagaagtccgatctgcgtaagaagaattttctaattcataaatatgaagaatagctattgtcttaggacgatagctattttttttcactcatagcctcaaaagcagtctctgtcctgtgaattaaaaaggtttttttgttctttgcagaatatacaacatgcacaaaatatcggggcacaaaaaagtaataaacaaagaagaaaagttatcccaaaagttgtccactgctaaaatgcacttaaaacgtggaaaaataaagttatacacgaagttatccacgttatccacattttttatccccaaaagagtggtttacatagtaaaaaaaccgaatgtttgttttgtgtagaaatcataaagtttgcaataaaatgaaaaactgtggaaaacatattgacatttcaaatatgaaaaaagatgaaaacattaaggaaaatgtctgacaattcagaaaagatatctaaaaaaaggaaaatgtaaaaatagaggttgacatttcaaaaaagagtgttaaactatgtggcatacagataaatagaacaaatgcagtgaacagaataccgttattggaaggcaatgcatcacagagagtcattggcaggtggaaaatgacatgcatcttttgataatatcctctgcgagcagtacgctgaaagccatgaggtcagtaagcggcaccggaactctcccgttacagagagacctgttagggatatttgtacaaagacaagtggacagatatatgacggggcagagaggtcatggaaacatggcaagaaaagtggtatcacggaagtacaggctttcgtcttttggatgtgtgaacatcagaaagacgaaagctttttttaattcataggaaattacatcctatgaattaaaaagtcctccgggcgggatgcgcatctcgcggagtagaagttagctgtaaacagcaccgctcgagcgcgaaagagtcgcaagcgactctttgttctttatgacaatagaatgtttgcagagcagcaatttattgtcatgagtaaaaaattgcactgaaaattgtttatctgaaaaaaagaaaggagttgtctgcaatctgcagacggtaaatggttatgaatggattagtaattgttttaatcggtattgtagcgctttcggcaggatatctgctgtatggaagatggcttgcaaaaaaatgggggatcgacccaaaggcaaagacacctgcctacacacatgaggatgggcaggattatgtaccgtcatcaaaatttaccgtattttcacatcagttttcatccatcgcaggagcaggacctgtcaccggaccgatcttggcatccgtgtttggctgggtaccggttctgttgtggctgatcatcggtggattattctttggtgctgtgcaggattttggcgcactgtatgcatctgtcaagaatgaaggaaaatcgatgggaatgatcatcgaaaaatacatcggtaagacagggcgtaaattgtttatgctgttctgctggctgtttacactgcttgttatcgcagcattcacggatatggtagccggaacatttaacggtgtcggacttgacagcgcagaaaccgcttatgcaaactcagcagcagcttccatttccatgctgtttatcgtggtagctgttatcttcggtgtgattcagaaacatgttggaaaaatgaacgagtgggtcaaagcggtcgttgcaatcgctcttttggttgcaatgtttgcagttggtatgaaacttccaatctatgcttcaaagacagcatggatctacatcatcatggcatacttattccttgcatccgtacttccgatgtggcttttaatgcagcctagagattacatgacaacatttatgctgctcggtatgatcatcggtgcagttgttggtgttgttgttgcacatccgcagatgcagttaaatgcatttaatggtttcaatgtaaatggaagtggattattcccgacattatttgtaacgatcgcatgtggtgcagtttccggtttccacagtcttgtatcttccggaacttcctcaaagacggtcagcaatgaaaaagatatgccgatgatcggttatggtgcaatggtagtggagtcattacttggtatcgtggcacttgtcgttgttggagcagtcgcagttggtggaacaaaaccggagggaacaccgtttgcaatcttctcttccggtgttgcagggttcttagagaaacttggtgtaccggttcaggttgcaaccgtatttatgaccatgtgtgtatcggcacttgcacttacctcacttgactccgtggcaagaatcggacgtatgtctttccaggaactgttttacggtgaaagcacagatccgaaacagatgacaccggcacagcgtgtactgacaaataaatattttgcaactgtgatcacattattctttggatatcttttgacacttggcggatacagcaatgtatggccgctgtttggatctgcaaaccagctgcttgctgctatggtactgatcgcgctggctgtattcttaaagacgacgggaagaaccggatggacactttacataccgatgtttgtgatgttagcagttacatttaccgcactggtacagaaaacaattgctctggcagcaaatattgcggcacacaacgcaacattcttagtagatggattacagctgatcgttgcacttcttcttatgatattaggtgttctggttgcgtacagctgcttaaagaaattgtttacaacaacgaaaaattcggaacagaaataaaagctaagatcagtatttcttgaaatattacaccatgtttgatatactgttcgcgtatattttttcaatatatggaaatgaatatgggtgtaaaatgattaagaaaatagatattcttggaatacaactggacaattacacagtgcgggaagcaatcatgcgcgtggaagcctggtatgataataacatgttaaatgtgattgagatggtttccatgcagatgctgactgagtcagaatcagatcctgtgttaaaagaggttatttcttctcttgatctggcagtgatcggagaaaaaggcattctgcaggcggctggagtcgatacgatgcagcggatccgcgagacagaagaaaatgatttttcagatgaatttttgaaacgtgtggagcgcaaccgcaaatctgtttttattattggagagacacagggagctgttgatgaatttacacaggaactcagagaggaatacccgaaactggtgttagcaggggcggcggcaacggaaaactgtgtcggagatctcgagggtgtgatcaatgaaatgaatgcggcgacgccggatgtgatcatttcaatcattccatctccgggacaggaacattttcttgtggaacaccgcgacaagatcaatgccaatttatggtatggaatcggcggatttgaggttcaccggaaaagatcgagaatcaaaggttttttctggaatctgatccaccgtgtcagattaaaaaacagtattgaaaaatatgaaagctgaggttcggtatgcagaagtttttttatgagagatctccggtctgggattatatcctcatgcttgtgggaaccgcacttattgcagtaagtattcagtgcgtgtatgatccggtcagcatggtaacaggaggttttaccggtcttgcgatcattatcaaagatgtgacagggtatctgattccgggtggaattcctctgtggctgacgaaccttgtactcaatgtgccgctttttttggcagctttaaagatcaaaggaaaacgttttatatggagaacgatcgttggaacattgttactttctctctggctctatatactgccgcttgtggatcttaccgatggtgattatgtacttgcagcaatttttggcggctgtatcggcggtgtcggaatgggccttgtactgcttgcaaaatcaacgaccggtggaacagagatggtcgcgacgctgatccagcattattataaacattattctgtggtgcagatcatacagtttttagatggtgcagtcgtagttgccggattatttgtatttggtgtacacgcagtattgtatgcgatcgttgcgatctttgtgacgagcaaggtatcagatgcactgatggaaggcttgaaattctcaaaagcagcatttatcattacggatcactatgaacaggtggcaaaacgtatcatgacggagttagaacgcggtgttacaggacttcgggcaaagggcatgtattccggtgcagaaaaatgtatgctttactgcgtagtatccaaaaaagagattgtgcaggtaaaagagatcgtaagggaagtagatccggatgcgtttgtgatcgtttccgatgcgcgggaagtgctcggtgaaggatttcaggaacagatgtcataaattttttctttgtgaactatgtacactgtaaaaaataggaaaaaagcagcatacattgaggaagtgcataaaaaatatgcatttcctctttctttttttgctgttttgcattaaaatagaatttaggtatttttaagtggggacaatgggtatatttttattgtgaaagttgcccatgcgtgcaatggaggttatgtactgtgacatacagaaattgacagctgatgtacacagc

SEQ ID NO: 5127 - DNA, 29274 bp, Unknown
  gut microbiota DNA sequence
atcagatacttcaaaatacgattgatgggttgaaaggaattacccgcattgatttatgcattattgatgtagaggggaaggtgctggctgctacatttccggaagcagacaaatatatggagccggcgcttgcgtttgtggaatctcctgcagacagccaggttgtaaacggctatcagttttttaaggtgtttgacgatcatcagttagaatacatcctgcttgccaacggcgacagcgatgacgtctatatggtggggaaaattgccagtttccagatccagaatcttctggtagcatataaagagagatttgataaagataactttatcaagaatctgcttttggataacctgcttttggttgatatttacaatcgtgccaaaaaactgcatattgatacggaagtcagacgtgttgtttttatcgtggagaccaaccgcgacaaagacggtaatgaacttgaacgtattcgtggcatttttggaggaaagaccaaagattttgtcaccgcggtggatgagaaaaatatcattgttgtaaaagaagtaggggagaatgaaggatacgaggagatgaataagaccgccgaggtcattgtaaatctgttccgttctgattcggacagtgatgtacatgtggcatacggtacgatcgtcggagagatcaaagaagtatctcgttcctataaagaagcaagaatggcacttgatgtaggcaagattttctttgaggaaaaagatgttattgcttactctacactaggaatcggacgtttgatctatcagctcccgatcccactctgcaagatgtttatcaaagagatctttgatggtaaatcaccggatgagttcgatgaggagacacttacaacgatcaataagttttttgagaacagcctgaatgtttccgaaacttccagacagctttatattcaccgtaacacattggtatatcgtctggacaagctgcagaaagcaaccggacttgatctgcgtgtgtttgaagatgccattacttttaagatcgcacttatggtagtaaaatatatgaagtacatggagtcgttagactactagaaatggagattgctatgattaagttagaacatgtcagcaagtcgtactctgcaggaatacctgcgcttaatgacgtgagtcttaacattgaagaaggagaatttgtattcatcgtcggggacagtggttccggaaaatctacgctgattaaacttttattgaaagaacttgaaccgacggagggtacgatcacaataaacggtcagaaattaaataagatcaggcgaagacaaatcccgaaattccgtcgtaagataggcgtggtatttcaggatttccgcttgttaaaggaccgcaatatttacgataatgtcgcatttgcccaaaaggtcatcggagagtccacacgttccatcaaaaagaatgtaccactgatgctttccatggtaggactggcagcaaagtatcgttcttatcccaaacagttatccggtggtgagcagcagagagttgcaatcgcaagggcactgatcaataagccaaagatcctgcttgcggatgagccgaccggtaatctcgataacaataatgcctgggagatcatgaaactgatggaggagatcaataacaatggcacaacggttgtcgttgttacacataaccttgaaatcgtaaaagccatgaacaaacgtgtcatcaccatgcaaaagggtgtgatcgtggatgacagtgatacagccagcagtattgtgacaggcgataatgccatcagccgcagcctgactgagcgtgatgtattaaaacgcgagggggactacgattatgaggattagtacttttttctatacaattaaacagggacttgtcaacatctggaaaaataaaatgttttcgcttgcatccatagcgacgatgacggcctgtatttttctgtttggtctgttctattcgatcgtgaccaacttccaggcgatggtaaaggatgcggaatccggtgttgcagtcacagtattttttgatgcgggcatctcagaacagcgcattgaggaaatcggtgatctgatcaagcagcgtgttgaggtatcacattgcgaatatacatctgcagatgaagcgtgggaaagttttaaagatgtttattttgatggaaatgaagatgctgcttcaagttttgcaggcgataatccgcttgccaattcagcaagctattccatttatatgaatgatatatcaatgcagagtacgctggtaacttatttagagtctatagatggaatccgttcagtaaagcagtcggagatggttgcgcacacactgaccgattttaacagtctgatcggttatatttccgcgggtatcattctgatcctgctcggtgttgcggtattcctgatcagcaatacgattacagtcggtatttccgtgcgccgtgaagagatcggtatcatgaaactgatcggtgcgacagattattttgtccgggcaccgtttgttgttgagggaattgtgatcggactgatcggagcggcgatcccgcttggcattttgtatgttttatatgagaagatcatattatatattggagataagtttaaatttatcagcaatatgatccagtttttaagtgtggaccaggtattccacacattggttcctgtggcactgttacttggtgttggtattggatttattggaagccggattacgatccgcaaacatttaaaggtatgataattaataaaaggcaatggatacacaggataacggcggtattgcttattgtgatgaccggcatggctgccacagtgcagatgacgtcagcagcagaaaacagcagcgcaaagaaaagtgaaaatacatccacttctttaaaagaggcacagcaggaaaaagcggctttggaaaaagctctggaaaaggcaaaacagacgataaacgagctaaaagagtccaagggagatgtgcaggcaaaagtaaatgatctgaatacgcagctcatgaatatttcgagccggatcacagctttagaaaaccagcttgcacagaaaaatcaggagctgacagagaagaaggatcagatcgaggacacaaaagaccagcttgaagatgcaaaaaagcaggaagagcagcagtatgcggacatgaaagtgcgcatacagtttatgtatgagaatgcacaggagtcttactttgaggcactttttgattcggaaagtttttcggattttttaaattctgctgagtatatcatacagatccaggaatatgaccggaaaaagctaaaggaatatcaggagacggttgcctatattgacggcgtggaacagcagttagaagaagactatgccacgttagaggaaatgaaaaaagaagtggagcaggagaaagcctctgtggagcaggaaaaggcttcagttgcagcgcttatgaagcagcgggagacggaacttgccggaattgagggaaacattgattctgcacagagcgacgcggattattatgctgcggagattcaggcgcaggaggagatcattgccgagatcaggcgcattgaggcagagaaggctgctgccggtaaacaggataaccattataccggaggtgtgtttacctggccgtgtccgagcagtacgcgtgtgaccagtgattatggaacgcgtgtgtcgccgatgggaggcgcttcttccaatcataaaggaattgacatcggtgcgtccggaggcgctgcgatcgtggctgcggcggatggaacggttacgactgcggcttacagcagtgctgccggtaactatgtgatgatcgatcatggcggcggattgtataccgtatatatgcatgcatctgcacttcttgtttcgcctggacagacggtttcagcaggacagacgatcgcacaggtcggaagtaccggtatttctactggaaatcatttacactttggtgtatcattaaacggaagctatgtcagcccgtggagttatctgggcagatgatgcggatgtttttgggactgccgcaatgcgcggtggtcctttttaaattggttggatttgggtgtcaaaaggtggcttttaattttgggattgtcaaattgtgaaccaccttttgacatccaaatccttataagagagtagggtttgtgtagtaggacagcgaatcttcacatatgaatgatatgataagtaatgtggagtgtagtataaaaggcaatatgaaataaaaatgcggctggtcacacaacaggtgtgaatggcagcgtaaaacggcagcataaaaatcaacataaaaacagcgcaggaatggagacagaatatggaaaataaaaatgagcagcaggttccggagattatgccagagcaaatcggagaaccgaagaaaagcaaaaaaggacagatggcaaaaggtgtggcctgcggtattgcagggacgatttttgttggctttgtcgcactgaacgtggtcactaaaataacgggaacgaaaatttacataacgaatgcaaccgctaagacagattcaatactggatacaaaaacagttcagaagatcaatgaactgaaggcatacacggatatgtattattatgataatgtggatgataccgaattaaaagatggactgtatgaagggatgatcagcgggcttggagataaatattccgtctattataatgaggaagattacaaacagatgcaggtgagcactaccggacagtattacggaattggtgcaggcctcagacaggatccggataccatggtggtatccatttcaaaaatatatgagggaacaccttccgatgaagccggactgcttgcagatgacgtgatcacttcggtcgacggaacagatgcgaccagcatggaagtgacagagctggtaaaactgatccgtggcgaggagggaacatcggtacatttggaggtatatcgtccttcaaccggggaaaatctgtcctttgacgtggagcgcaaaaatgtgacactgccgagcgtatcttcccagatgcttggtgataacatcggttatattcatatcgattcttttgaaacagaaacagcagaccagtttgaaaaagctgtggcagaattagatagcgagggaatgaaagcgcttgttctggatgtgcgctataacggcggcggacttgttactgctgttgtacagattttagatgatattcttcctgagggtacggttgtgtatacagaggataaaaatggtcaccgtgagacttatacatcaagcggggatacttacatggagtatccgctggcggttcttatcaatggggacagtgcaagtgcatccgagattttagccggagcaatcaaggactatgaatatggaacactgatcggaacgacaacattcggaaaaggaattgttcagaccatcttcccgcttgaggacggagatgcggtgaaacttaccacagcaaaatattttacaccgaatggaaattatatccatggagtcggaattgatccggatattgaacttgaatatgaatatctcaatccggatggaacagaatatgatgtgaaatatgacaaccagatccagaaagcagtggaagtactcacggaggaattaagcggaaaatgaataaaacagtaatgcggctgattctggggatcatgctggcaggctggatgatcatcatattttggttttccaatcagccggcgacggaatcttccgagatcagcggtacgatctcttaccgtctggtcgaagatacagatgaaatttttaactggggactgacgacagaccagattggaaatattgcaggaaacattgagtatcccatccggaaagctgcacatatgacagaatatgcgattttaggatggcttgcatttgcattttcaggaacatttgaaatgagacagaaagtgcattatatcgcggcacttggatttgccttttgctatgcatcgacagatgagtttcatcagctgtttatcccggggcgttccggacagtttacggatgtctgcattgatacggcaggagccgcgatcggtcttttacttcttgcgattctcttaaaaatagggagaaggcattgcgcaaaaagcgcgcatactttacaatagaaacaaatcttaaatatcagaaagaggtgatactgtggtagaacttgatcaatttaaagtgaccctgaacacatacagggaaccgctgcaggaagtgagggattcactttgacctggctaataaagagcagcggatccaggaattagaaagggaaatggaggccccaaatttttgggatgatccggtcgtttcccagaaaaaaatgaaagaattaaagagcatgaaggatgatgtcgcaacttatgcatccttaaagacagaatttgaggatattgagacattgatcgagatgggatatgaggaaaatgatgcttccctgatcccggagatccaggaaatgctcgatgaatttacgaagacctatgagggtatccgtatcaagactttgttatccggggaatatgattcggatggtgcgatcgtctcactgcatgcaggagccggaggcacggagtcctgtgactgggcggcaatgctttaccgcatgtatacaagatgggcatcggacaaaggattttctgtggaggttttagattcccttgacggggaggaagccggtattaaatccatcacattccagatcaatggagaaaatgcatacggttatatgaaatccgaaaagggtgtacaccgtctggtgcgaatttcaccgtttaacgcggcgggtaagcgtcagacttcgtttgtatcctgcgatgtcatgccggatatcgaggaagatcttgacgttgagatcaatgaggacgatctgcggatcgatacctaccgttcaagtggtgccggtggacagcatatcaataagacatcttccgcaatccgtattacgcatattccgaccggaatcgtggtacagtgccagaatgagcgttcccagttccagaacaaggataaggcaatgcagatgttgaaggcaaaactgtatttgttaaagcagcaggaaaatgcggaaaaagctgcagatatccgtggagaggtaacggagatcggttggggtaaccagatccgttcttatgttatgcagccatatacgatggtaaaagatcacagaaccggtgtagaaaccggaaatgtagacagcgtcatggatggaaagattgatatttttatcaatggttacctgaaatggctttcacttggatgcccgaagggacttggaggagacgatgagtaagggaacggtcacgctccttgtgattgtctttgttgtctgcatatcctgtggcgcgggatatgcggcataccggatcgtgcgggaaaaactgcgtagattgtcccgcatggcgtttggcacagattccatcacagagggattagaacaacaggcaaaagagcttgcggtaacaccgaaatccgtttctgcgatgacacggatttttctgccgcagatccagagagattttcctgattttcatatcgaacagtttaaggataaagtggaaaatgcactcatgctggcattgcaggcaatctctgccgcagatgccggcatttttgaaagacagataaaagatggcgtttcggaagaatttttagcgcagatcaaaaacagaatccgtgaaaatgagacggaggcagtcacagagcactacgaacagatacagattcatcagacagagattgccaattatgagaaaaagcagggtacctgtgtgattacattccagagtgcagtcgggtatctgcattactgtgaaaaagcgggaaaagtcttaagcggcagtaaagagctgacggaacagaccagatataatgtacagcttatgtatattcagaatgaaaaacttgcaggaatggacaatgcagtcggaactacctgcccgaactgcggtgcgccgatcacaaatctcggcgcagcttactgtgagtactgtggttcggcggtgacgcttttgaacctgaaagtatggacattacatagttttgatgagacggactaccatcattcataacaaatggtggaaaacattggaggaaaatcctctgcttctgcaaaggcagtcgcattttgctccgcaaaacaaggaggattaattatgggaattatcagggcaattacgcaggcgatcggcggaggtcttgccgatcagtggttagaagtttacgaagcagatgacatgggggacaacactgtctttacgagcggtgtgctgatccgaaaaggacagaaccggaagggaacgccggatacggtcagcaacggttcgatcattcatgtgtatgacaatcagttcatgatgctcgtagacggtggaaagatcgtagattacacggcagagccgggatattataaagtggataattcatccatgccatccatgttcaacggtgaatttggagaatctttaaaagaaacattcaatcgtttcaaattcggcggacagacgccgacgatgcagaaggtattttttatcaatctgcaggagatcaaaggaatcaaattcggtaccagaaatccgatcaattattttgataatttttataacgcagaattgtttttgcgtgcacatggaacttattccatcaaagtcaccaatccgctgcagttctatgcggaagccatcccgaaaaatcaggatcatgtggagatctcatccatcaatgaacagtatctgtccgagtttttagaggcactgcaggcatccatcaaccagatgtcagcggacggaaccagaatttcctatgtgacttcaaaagcaagagaacttggaaagtatatggcgaatacgctcgatgaagagtggaaccagatgcgcggtatggagatccagagtgtcggtattgcgagcgtatcttatgatgaggagtcccagaaactcatcaacatgagaaatgagggcgcaatgctcggtggtgacttcaatgtaatgcgcggtatggcagtcaaaaatctgaccgagggtgtgcgtgatgcaggaagcaatgcagcaggagccatgaacgggtttatgggagtcggcatgggcatgaatgcgatgaaccagacgttgtcaggacttggcgcacttcagacaccgcaggatcagcaggggcagatgtatggaaatgcagcacagagccagatggcaggaggcatgaatcaggggcagaatgcgggagccatgaaccagagccagccaaatccggcaggcagtgcagcgggcacatggacctgtgagtgcggccacaccaacacgggaaaattctgcagtgaatgtggaaaaccagcgcctgcaccaaagaatgagtggacatgtgaatgcggccatgtcaatacaggaaaattctgcagtgagtgtggaaaaccggcaccggcagcagagtggacgtgtgaatgtggtcaggtcaacaaaggaaaattctgcagtaactgtggaaaagcgaggaactaatgatggcagtgatcagttttaaatgtccaaattgtgatggagaactgatttttgatccttccacacaaaagtataaatgtgaatattgtttcagtctgttttcacaggaagagttagatgcaatgaagccgtcacagacgacagaacctcaaaatgcagatgctgcgggcgcaggaaaaacgtcaggtaaaccggagaataagaagcggggccagccgggagataaagcaggtagtggaacagaaaaagataacacggaaaataaagagtcagataaagaagcagggaaggaagctgatgcagtgacctatacctgtccgagctgtggtgcacagattgtgacggatgccactacagcggcgactttctgttattattgccataatccggtcgtgcttggcggacggctggaaggtaaattcctgccggatcaggtgattccgttttctgtgtcgagggaagatgcagaaaaaggattcaaagattatgtctgcaagaaaaaatttgtcccgcgtgccttttacaacaaaaagcaggtcgagagcatcacaggtgtatattttccatactggcattacaataccagcctggagggaaaaatgcagggcgaggcgagaaatgtccgcgtgtggcgaaccggaaacacggaatatacggagacaaagtattatcaggtatcaagagaaggtgatgtaaaacttgaaaacctgacggaaaatgcacttgggaaggcaaatcaggagctgatctgcggtgtaatgccttatgattttaaggatgtgaaaaagtttcagcttggatttctgtctggatttctggcagaaaagcgtgatattgagaaaaaacagatagaaaagaaagtgcagcaggaagcgcgtgagagtgcagaaaaactgatgcgggaacaaataaatggatacagttccgtgtcggtaaaaaatgcagatttccgggcattaaaagaaaagtggtcgtatacgcttctaccggtatggacaattacatacaaggcgaaaaacggaaaaatctattatttttccatgaacggacagactggaaaggtgtacggcgaactcccgatcgactataaaaaaatctcacttgtcagtggaatcgtcagtctgatatcactggtcattttattactgggagggctagcatgagacagaaaagatttttatgtttaaagggtattgtatttgcctggctgtttacgattttacttgcagcgggcggacagcatgtatgctttgcagcagaagaaaatgttccacaacagacggtatatgatgatgctgcgcttctgacaccggaagagatcgagacgcttgagagtgaactggacgctgcgggagagaagaccggatggaatatgctgatgttgacgacggatgacacaaatggaaaaaccacgcaggaatatgcggatgatttctttgatgcgattgcagaaaacggtgatggtgttgcactcctgatcgatatgcagaaccgtgaaatctgtatttctaccggtggtattgcaatcaggtatcttacggatgcgcgtattgaagatattttaaatgacggatatgaaccgatctcagatggagaatatgaacagtgtctgtctgtgatgttaaaagatgtgctggtttattatgatgaaggaatcccgtcaaatcagtatgagtatgaggagacggatattgagatcacgccggcagaatatgtcatcacatccgttgttttagctctgatcccgggcgctattgtattcctggtgcttgtactattttgtaaattaaggaatggcaaatataaatatgacgctcacgagtctggaacagtgaatataaagaaacacagcgatgtgcttgtgaacactgttgtgacacaccgtcatatagaagagaagaaagcagaagacagcggcaggagtacggtacatacgagcagcagcggcgtaaaacatggtggaggcagtaaaaaattttaacagcataataaaaaaatgtttctgacatgataaaaaagaggttgcgtatgcagcctctttatgttattatcttcctcatgaggacaagtgtcagcgtgcaacaaacacaacagatgaatttctaaagagagggatagagtcacatgaaagaaaaaggtcagtattatgtgctgaaagaaaaagcagttccggaagtcctcttaaaggtggtcgaggcaaagcggctgattgaatccggtaagattgcatccgtgcaggaggcaacagaaaaagttggcatcagcaggagttctttttataaatataaagatgatatttttccatttcatgacacggcaaagggaaggacaattacgcttgtcatccagttggatgatgaaccggggctgttatccgttgtattaaagacagtggcagagtttcatgctaatattcttacaatccatcagagtataccgatcaacggtatcgcttctcttacgctcagtgtggatgtcctgccgcagacgggggatgtggctgagatgttagatcacattgaggaacaggaaggcatccattatgtgaagattcttgcaagagaataagacatggcagatgcgtcatatattgtagttcataaaatatgcatgtaagatgtgtaaaatgatagaaagataataaagtctgtctgagaggatggaagcgatagtctggcagacgaacttggaggatgaaaaatgaaagcagcagtaatgggatatggaacaatcggttctggtgttgtggaagtacttgacatcaacggaagcagcatagcaaaacgtgtcggagagccggtagagatcaaatatgtattggatttaagagattttccgggagatccgatccaggataagatcgtacacgactataagacgattgcagaagatcctgaggtaaagattgtcgttgagaccatgggaggtgtggaaccggcttatacctttgtaaaagcaatgttagaggtcggaaaacatgttactacttcaaacaaagcgttagtagcagcaaaaggagcagagctgatcgcacttgcaaaagagaaaaatgttaactttatgttcgaagcaagcgtcggtggcggtatcccgatcatccgtccgttaaattcctgtctgactgctgatgagattgaggaaatcacaggaatcgtcaatggaacaacgaactatatgatgactgaaatgtcagaaaaaggtgctgattttgatgaggtattaaaagatgcacaggcaaaaggatatgcggagaaagatccgacagccgatattgaagggtatgatgcctgcagaaagattgcaattctgacatcacttgtctgtggacagcaggtagattttgaggatatccacacagagggtatcacacatatttctgcaaccgatatcaaatatgcgaaagccatgggaagagcaatcaaacttcttgctacgagcaaaaaaacagatggcggatatgtggcaatggtagcaccgttcttactgccgaaagagcatccgttatacaatgtaaacggcgtattcaatgcaatttttgttcatggaaatgtacttggggatgcaatgttttacggaagcggtgccggaaaacttccgacagccagtgcggttgtagcagatgttgtggagatggcaaagaatgttgacaagaatataccggttgagtggagctcaaagaaattagagctggtagattaccgcagcgcagagaaccgtttctttgtcagagtgtcaggtacagataaggcatctgtggaaaaagtatttggaaatgtagaatatattgatgcacagggtgttacaggagagcttggttttgtgaccgaagtgatgacagaagaagctttggagaacaaaaaagcagcatatggggaagtgttgaatgtcattcgtgtagcatagaaaaaagagcagatcgtggatcacatggaaggcggttcacgggtctgctctttttatgaaaacggaagagtgtgaaaagtaagattgtttgcacatagatttgtgcttacacacgaatttgagatacgcaaaagcagcgtggaaatggagaggaatatgacgttaagtgaatgttacgaagaaatgggcgcggatctgcacgaagtgctgcggcggctaaagacggaggagaggatcgggaaatttttaaaactgattctgaaggatacgaattatgagtcgctgtgtaaggcgctggaagaaaagaattatgagcaggcgtttacatatatacataatttaaaggggctggcaatgaatctgggactgacaccgcttttggttccggcacaggagttatgcgaagaacttagggatggcgaaccggaaagggagcttaaaccgcttttggatgaggtggcggcggcatatcagaaagtccttggtattgtcgaaagacttgactgagataacagtgtgaaaagctgggattttggctgattctttgtaatgagttattcggaaatggagaacagtatcaaaggtaaagatgcatttttgaatctctgacatatgataaaacagaaggttttatgtctgaggtagaaaaaagtgcaggtaattcttttgatcatagcagtcagtgtggatgtctttgtggcatgtgtggcgtgtgggagtgagcagataaagatcggatctgcggcagcgttatgcatcagcacggtctgcagtggaatattagggatatcactttatgcggggatggcgttacagggggtacttttaaaaaaatatgcattatacttaagttttttcggactgcttgcagtgggaatttttaagctgacagagtatgcgatcagaaaatatattgagcgtcataagttcctttgcaagaaagtcaaaatctctttttcacagctcagttttattctgagtatctacaacaatccggtaatggcagaccgcgatcactcggcgacgatgtcgtgtgtggaggctgtattttttgcacttgcaatgtcattggacgggatgtttggaggacttggtgcaggatttaccggaaagaatattttttttacagtgatgggaagttttgtcgtcagtttctgtgccgtactttgcggatgcaggattggcatgcaggcatctaagcggtggaagacagatgtatcatggcttggcggcgtgttgtttgtaatacttgcgtttcagaagattatttaaaaagtcagttccatgctgcccattgctgcaggaaaatcagaaaagtctgttactgtttatgccttgccgggcgtttgggtaataaagattttctgcgtatgggcggcacatactgccgctttctatggatttggaaataatgtataaatatacataaatatgcataaaatcttagtgctatttgttttgggaaaaaggttgaaaaatatcttatgatatgatacactttttacaatttaggaaaaagactataggtactaataacggaaagttcagtcaggggactgtctggatggaaaaagaagaaaaacggcgacgtttttttttttggaaaaaaagtgaaaggacagggaaacgaatgaaagctcatttaatactcgaagatgggaatgtatttaccggaacaagtataggttctactagggaagtcatcagtgaaatcgtatttaatacgtcgatgacaggttatctggaggttctgactgacccgtcgtatgcgggacaggcggttgttatgacttatccgctgattggaaattatggaatcacaccggatatggagtcaggcagaccgtggccggatggatatatcgtaagggagttatcaagaatgccgagtaacttccgtgaggagggaacgattcaggatttcctcacgaaatatgacattccgggtatagcagggattgacacccgtgcactgaccaagatccttcgtgagaagggaaccatgaatggtatgatcaccacgaataataactataatatagaagaaattattcccagattaaaagcatacacgacaggtaatgttgtggacaaagttacctgcagtgaaaaacgagtattaaaaggaaatggcaagcgagttgctttgcttgaccttggagcaaaaaataatattgcccagtctttaaataaacgtggctgtgaagtgacgatctatccggcacatacgactgcagaagagatccttgcaacaaatccggatggaatcatgttaagcaacggacctggagatccgaaggagtgcaaggagattattgctgagatcaaaaaattatatgactccgatacaccaatctttgcaatctgcttaggacatcagctgatggcacttgcaaccggcgctgacacacataagatgaaatacggacaccgtggcggcaaccatccggtaaaagatttagaaaccggaagagtatatatttcctcccagaatcacggttatgtggtagatacggatacacttgatccggtgatcgcgaaaccggcatttgtgaatgtaaacgatggaaccaatgagggactttcctatgtaggcaaaaacatttttaccgtacagttccatccggaagcgtgtccgggaccgcaggattctgcatacttgtttgatcgttttatttcgatgatgtagaaaaattcttacgttattgtttaacaaattttaggaggaagaattaatgccaagaaatcatgacataaaaaaagttttagtaattggttccggcccgatcgtaatcggacaggctgcagagtttgactatgcaggtacacaggcatgccgctcattaaaagaagaaggcgttgaggttgtgctggtaaactcaaacccggcgacgatcatgacagataaagatattgcagatcaggtttacattgagccgcttacggtatccgtcttagagaagattatcgcaaaagaaaaaccggacagcgtactgccgacattaggtggacaggctggattaaatctcggtatggaattagaggaaaaaggcatccttgaaaaatataatgtcagactgatcggtacaacagcagaaacgatttttaaggcagaggaccgtcaggcattcaaagataccatggaaaagatcggtgagccttgtgcagcatcccaggtcgtacacaacgtagaggatggtatcaagtttaccaataccattggttatccggtcgtacttcgtccggcatatacgcttggcggaagcggcggtggtatcgcacataacgagaccgagctggttgagatcttaacaaacggtctgcgtctttcccgtgtcggagaggtattggtagagcgttgtatcgcaggatggaaagagatcgagtatgaggtaatgcgtgatgcgaacggcaactgtatcaccgtgtgtaacatggaaaatatcgatccggtcggtgtacataccggtgattccatcgttgttgcaccttcccagacacttggcgataaggaataccagatgctccgtacatctgcattaaatattatttccgagttaaatatcaccggaggatgtaacgtacagtatgcattgaatccggacagctttgagtactgcgtcatcgaggttaacccgcgtgtatcccgttcttctgcacttgcatccaaggcaaccggatatccgattgcaaaagttgccgcaaagatcgcattgggctataccttagacgaaattaaaaatgcaattaccggaaaaacttacgcaagtttcgagccgatgcttgactattgtgttgtaaagattccgagacttccatttgataaattcatcacggcaaagagaaccctgaccacacagatgaaggcaaccggagaggttatgagtatctgcaataactttgagggtgcattgatgaaagcaatccgttccttagagcagcatgtggacagtttaatgtcttacgactttaccggactttccgataaagagttagatgagcagctgcatgtagtggatgaccgccgtatctgggtgatcgcagaggcactgcgcagaggcgtaagctatgacaagatccatgagatcacgaagatcgaccgctggtttattgacaaacttgccatcctggttgagatggaaaaccagttaaagaatgagcctttgactgtagaattattaaaagaagcaaaacgcatcgagttcccggacagcgttattgcaaaactgaccggaaagaccgaaaaagagatccatgacatgcgttatgaaaatggtatcgtggcagcattcaagatggtagatacctgtgccgcagagtttgaggcatccacaccgtactactattccgtattcggaagcgagaacgaagccattgagacaaatccgaagaaaaaagtacttgtacttggttccggacctatccgtatcggacagggtatcgagtttgattactgttccgtacactgtacctgggcatttgcaaaagagggatgggagacggttatcattaacaataacccggagacagtttctaccgactttgatattgctgacaaactttattttgagcctctgacaccggaagatgtagagagcatcgtaaaactggaaaaaccggatggtgctgtcgtacagtttggtggacagaccgcgatcaagttaaccgagagcctgatgaagatgggtgttaagatccttggaacaaaagcagaggatgtcgatgcggcagaggaccgtgagcttttcgatgagattctggaaaaaacacagattccgagagctgcaggtggaactgtatttaccgcagaggaggcaaaagaagttgcaaaccgtctcggctatccggtactggtaagaccttcctatgtactcggtggacagggtatgaagatcgcattcaacgatgatgagatcgaggaatttatcggtatcatcaatcgtatcgcacaggatcacccgattctcgtagataaatatttacagggaaaagaaatcgaggtcgatgctgtatgtgacggaaccgatatcttaattcctggtatcatggagcatatcgaacgtaccggtgtacactccggagacagtatttccgtatacccggcaccgacgatcagtgaccatgtaaaagagacaatcgttgagtatacgaaacgtctggcgcaggcactgcatgtcatcggactgatcaatatccagttcatcgctatggacgagcaggtatatgtcattgaggtaaacccgcgttcttcgagaaccgtgccatacatcagcaaagtaaccggtattccgatcgttgaccttgcaacgaaagtaattatcggtgatactatccgcggacttggatatgagccgggacttgcaccgaccgcagattacattgcaatcaagatgccggtattctccttcgagaaactgcgtggcgctgagatctccttaggaccggagatgaaatcaaccggtgagtgccttggtattgcaaagaccttcaacgaggctctctacaaagcattcctcggcgcaggtgtgactttaccgaaatacaaacagatgatcatgaccgtcaaagatgcagataagccggaagcagtcggcgttgcaaaacgttttgaggcacttggctacaagatttacgcaaccagaagtaccgcaaaatatttacaggagcacggcgtcaatgcacttcgtgtcaacaagatctcccaggagtcaccgaacgttatggacttaatcttaggacataagatcgaccttgtcatcgacacaccgacacagggaaatggtgataagaccagagacggattcctgatccggagaaatgcaatcgagacaggtgtttactgtatcacagcaatggatacggcaaatgcgttggcacgcagcttagagactgcgaccgatgatctgacaccggtggatattgcgaccgtaaagaacttgtagttctttgaatttataattctttgaacttgtagttctttggatttataattctttaaacttgtagttctttgaatcttataatatagaaaagacagcacaaatccaaaaggaggcgtgctgtttttgcttttgcggaatatggatattggcgacaacatgaaaaaacgacatgaaagcagttaagaaattgctttcatgtcgttttttatatcgccggaatatccactccaacatatagaaaaaagtcgcgcggattaacggagtttcatttttttgcgcggtttcttttgggccagtggtttttctgtgcccaaagcatcctgcgggatcacagatgcactactcattaaggcgcttgccgctttttgttccagtttactttgattgtgctgtgcaatctgaagcttgaccttgcggaaacggtctgccgtttctttgatgtaggcatcggaaacaaaatgctttacagaatctttatccaatgcgatacggttgtccatggttttcatgatatctgtgatctttaaagatttgttgatcaccgggtcacttaaatcgtatatcatgtttgtggaaaacttcagtaccatcggatgaagaaaatcagccggattctctgcaagcacaagagctttttcgccatcggaaagatctacacatgcaccggtcggaagaatatggatacattctgctaaagcggaaagtacgagcggattgtaggtggctttatcctttttcagacgtcccatggcagcaatttctgaaattggcggtttgttaatgttcattgcggtcagatggtcaaattcgtccgctactgctaaaatatcgacgagaagacggatattgtctgccggttctttgacttttaaagtacggctgtttttaaaaatgatctgctggatgatatcaagcgtatgtaccgggaatttataatcaccacggtccgggcggagtgtttcataaccgcgctctaagttgagctggataaaatccttatctgctgttgtaaggtcatcccctttgtctaacactgtctgtggtacatacagataaccaaaatcgtagagaagcgcagctgtgataagggctgtctgttctgcagcaggcagatgcatctgatttgtgatcatcgcacagagaatgccgacactgatggaatgtttgtaaacaaaatctgcagaacttcgcaggttttgtgcaaaatttaatttgtgatcaagactgccgtaatgtgtctggatgtctctgacgagatcgctcagcgaaacaggtgcctgattggcctgcagacgatccatattttcttttaatttaaaaacatatatagtctggaactgttcgaattcaagatcctctctggaaagaggcggtaccggctctgccggctcaagaataaaaataccgatcagaccaaagttttcgatactgttaataccctgcatggttaaaagtgtgtctctttcataaagaagaacccccatcttattgtagattggttttgcaagtctcatgccgggttttaaatctgctgtttttacaaattgcataggtaaatcctccccctgtgatgattatcaggctctttttataccatatccagacatcagatgcctgaatattcccccaataatggtatgtgaaaaaattaatattcatattgtgctttacatgctataataccatattaatagaagaaatacaatgaacgaaaaatacaacagtagcagaaagcttactgttcagccgaaaggaacagcatgagacacaattttttgagaagaatcctgggaggaatactgaccggctgcatacttgttacggcaactgtccatgcaggaacgacacagaaagatattgataaggcaaaagaccagatcacagaccttaagaaacagaaagaagatgcgaaagatcaggtggacagcctgaccaatgaaaaacagggattggagagcgaccttagcggactgaacggacagttaaatacgatcacttctgatatgaaccagttagagcagcaggcagcgcagaaagaagacgagatcaatacggcggcggaagatctgaaacgttccgaggaacgatctgcagaacagtatgaagatatgaaagtgcgcattcagtatatttatgaaaatggcaatcagtctgtatgggacatgcttattcatgtgtcctccatcgcagaatttttaaatcaggcggaatatacaagtgcaatcaatcagtatgacagaaatatgcttacggcatatcaggagctcacggagcagatcaaaaaacagaaaaaggaactcgaggagcagaaggaagaactgactgtattacagcaggaaaaacagaaagagcaggaaaaagtcaacagcctgatcgaggatacgcagaagaagatacaggaatccagcgagaaaattgaagatgcacagtccgatgtggaatcgatcgatgcaaagatcgagaaaatgatcgaatacgaaaagcagcttgagatacagaaggcaaaagaggatgctgcacgccttgcagccatcaaaaagcaggaacaggaaaacaggtcgaatgtgacatacgcaccggcacagagcgatgcgtatctgttagctgccatcatccagtgtgaggcatggggcgagccatatgatggaaaacttgcggtgggcagcgtgatcatgaaccgtgtcagaagctcctattttccgaatacggtttccggtgtgatttatcagggagggcagttctctccggttgccagcggtcgtcttgcataccgtctggagcagggagtcgcttccgattgtatgagtgcggcacaggcggttctgggtggaacgagcacaacaaattgtctgtattttcgtgtgaataatggcattatagaaggaacagttataggaaatcatgtgttttattaaacaaaatgataaaatgataaaaatttaacaaaaaaccccgcaaaatggagcaaaaaggatgtaaaaaattgtttacaaagatgaaaaataaagaaagctattgcaattaattgtgaaatatgttagcataagaaagtacaagaaatgcagaaaaatagctgattacatagcaaataagctttttaaaatgaaagaaaaaaagataaatttcaaccgaaagtttgaatttatttttttaaaaaagattgttaaaaaattaacagcatttttcggcaactttaaagagaaagaaacaaattctctgcaaaagcagagctttgtgttaaattgaaaggagaattcaaaatggcaaagaaagtagttttagcaggtgcctgccgtaccgcaatcggtaaaatgggtggagcattaagcaatactccagcagcagacttaggtgcaatcgttatcaaagaggctttaagaagagcaaacgttaaaccggagatggttgacgaggtaaaaatgggttgtgtaatccaggcagctcagggacagaacgttgcacgtcaggcagcaatcaaagcaggactgccaatcgaagttccggcaatcacaatcaacgttgtttgtggttctggtttaaaatgtgtcaatgatgcagctaccatgatcatggcaggtgaagctgatatcgttgttgcaggtggtatggaaaacatgtctatggcaccatatgctatgacaaaagctcgttttggatatcgtatgaacaatgcaacgatcatcgatacaatggtaaatgatgcattaacagatgcattcaaccactatcatatgatgatcactgcagagaacgtatgtgataaatatggcattacaagagaagaacttgacgagttctcagcaaacagccagcagaaatgtgaaaaagcaatcgctgaaggcaaatttgatgatgagatcgttccggttcctgttaaagtgaaaaaagagatcgttgatttcgtgaaagatgagggaccacgtgccggtacaactgctgagtctttagcaaaattaaaatgctgctccggtaaagagggcggacttgttacagcaggtaacgcttccggtatcaacgatggtgcagcagcaatcgttgttatgagtgaagaaaaagcaaaagagcttggtgttacaccaatggctacatgggtagcaggtgctcttggcggagttgagcctgaaatcatgggtgttgggcctgttgcttctacaagaaaagtattagcaaaaactggtttatctattgatgatatggacttaatcgaagcaaacgaagcattcgcagctcagtctattgcagtagcaagagatctgaaattcgatatgtctaaagtaaatgtaaacggtggcgcaatcgcattaggacacccggtaggtgcttccggatgccgtatccttgttacattactgcatgagatgcagaagagagacgctaagagaggtcttgctacactttgcatcggcggtggtatgggatgctccacaatcgttgagagataatagttttttatagtaattcccggggaatgacttcccggggattgcatttttcaaacatacagttaacataattattttcaggaggtaaccgaaatgaaggttggcgttattggtgcaggaactatgggacagggcattgcaaaagcatttgctcaggtagaaggatatgaagtagctctttgcgatatcaagcaggagtgggctgaaggcggaaaagagaaaatcaaaaaaggttatgcaagattagtagaaaaaggaaaaatgacacaggaagctgttgatggcatccttgcaaaaatcactccaggtttaaaagaagacctttgcaaagactgtgatctgatcgtagaggcagctttcgagaatatggaagtaaagaaaactactttcaaagaattagacgagatcgcaaaaccagattgtatcttcgcttccaacacatccagtctttctattacagagattggaaacggattaaaccgtccaatggttggtatgcatttcttcaacccggcagaccgtatgaaactgatcgaggttatcgctggtgtgaatactccggatgaaactgtttccgctattaagaaaatttctgaagagatcggaaaaactccggtacaggttaatgaggctgctggtttcgttgtaaaccgtatcttaatcccaatgatcaacgaagctgcattcatcaaaatggaaggtgtttccgatatcgctggtatcgatgcagctatgaaacttggtgctaaccacccaatgggaccgttagagttaggtgatttcatcggtcttgatatctgccttgctatcatggatgtactttacaaagagacaggcgacagcaaatatcgtgcatgcccactgatccgtaagatggttcgtggtggtaaccttggagcaaagagcggcaagggattctatgtatacaatgctgatcgtacaaagactccggtcgatgctcagtaaaataaatatttatggaggaaaattagatcatggatttcactttagacaagaaacatgaaatggcgcgttccttattcaaggaatttgctgaaacagaagtaaaaccgcttgcacaggaaacagatgagacagaagctttcccggcagaaacggttaagaaaatgcagaaatacggattcatgggaatcccggttccgaaagaatatggtggacagggttgtgatcctcttacatacgttatgtgcgtagaagagttatctaaagtttgcgcaaccacaggtgttgttgtatctgcacatacatctctctgcatcgatccgatcatgacatatggtacagaagagcagaaacagaaatatgtaaaaccacttgcaacaggcgagaagttaggtgcattcgcattaactgagccgggggctggtactgatgcacagggtgcacagacaaaagctgttttagatggtgacgagtgggtattaaatggatcaaaatgcttcattaccaatggtaaagttgcagatgtttatattgtaatcgctatcacaagcatcacagaggataagagaggcagaaagaagaaaaacttctctgcattcatcgttgataagggagctccaggcttctcattcggaacaaaagagaagaagatgggtatccgtggatcatctacttatgagctgatcttcgaagactgcagaatcccgaaagagaatctgttaggaccggaaggaaaaggtttcccgatcgcaatgcacacacttgatggtggacgtatcggtattgctgctcaggcacttggtatcgctgagggcgcattagacagagctatcgcttatacaaaagagagaaaacagtttggacgttcaatcgcacagcagcagaatacacagttcaaacttgctgatatggctgcaagaatcgaagctgcacagcttttagtttacaaagctgcaatggcaaaagctactcagaaagtatattctgtagaagctgcaaaagcgaaattattcgcagcagagactgcaatggctgttacaactgaggttgttcagttattcggtggatacggatatatcagagagtacgatgtagagcgtatgatgcgtgatgctaagatcactgagatctacgagggtacaagcgaagtccagcgtatggtaatctccggtgcactgttaaagtaatttcgaatcaatccgcgtaaaatttaaacatataaaacataaggagtgaaaaatacatgaatatcgtagtatgtattaaacaggttcctgatacaaagggcggcgttaagttcaacccggatggaacgcttgacagagcagcaatgcttgctatcatgaacccagatgataaagctggtcttgaagcagcacttagaatcaaagatgagacaggagcaaaagttacagttcttaccatgggacttccaaaggctgatgcagttcttcgtgaagcattagcaatgggtgctgatgaagcagttcttgtaacagaccgcgtattaggtggagctgatacatgggcaacatctaccacaatcgctggtgcacttcgtaacttagactatgacctgatcatcacaggacgtcaggctatcgatggtgatactgcacaggttggtcctcagatcgctgagcatcttggacttccggttatctcttacgcagcagacatcaaagtagagggtgattctgttgttgtaaaacgtcagtacgaagacagatatcatgagttaagagcaaaaatgccttgtctggtaactgctctttctgaattaaatgagccgcgttacatgacaccgggcggaatcttcgatgcatttgacaaagaagtaaccgtttggggcagagcagacttaaaggatgttgacgattctgatcttggtttaaagggatctcctactaagattgcaaaagcatctgataaagttgcaaagggtgctggtgagaaagtaaaccttgatccggcagaatccgtagcatatttgatcggtaaattcaaagagaaacacattatctaataaaaaaaggaaaagtggtgaataacatggcattagaagaatataaaggagtatttgtctttgcacagcaggtagataacgtattagatggcgttgcatttgagttacttggaaaaggcaaagacttagcaaaagatttaggtacagacgtaactgctgtattaattggttctggtgtaaaaggattagcagatcagttagctgagtatggtgctgacaaagttatcgtagtagatgatcctgaattaaaagactacagaacagagccgtatgctcatgcattagcatctgtaattaacgagttcaaacctgaaatcatgttagttggtgcaactgctatcggccgtgacttaggacctactgtttctgcaagagtaaaaacaggtctgacagcagattgtacatctcttgagatcggtgatttcccactggttgctgcacctggtaaagaatcagagcagaaacacaaccagttattaatgacacgtcctgcatttggtggtaacaccatcgcaacaattgcctgcccggacaaccgtcctcagatggcaactgtacgtccaggtgttatgcagaagatcgctccgatcagcggtgcaaaagcaaacgttgtagagtacaacccgggatttacaccaaacaacagatatgttgagatcttaaacatcgtaaaagctgttaagagcacagcaaacattatggaagcaaagatccttgtttccggtggtcgtggagttggttccaaagagaacttcaaacttcttgaagatcttgcagaggtacttggcggtactgtaagctgctcccgtgcagttgtagagaatggctggttaccagttgatttacaggtaggtcagactggtaaaactgttcgtcctcagatctactttgcaatcggtatttccggagcaatccagcacgtagctggtatggaagattctgacctgatcatcgcaatcaacaaagatgaagatgctccaatcttcgacgtagctgattacggtctggttggtgatctgaataagatcgttcctgctttaacaacagcattaaaagctgagttaggcaaataaataatacaggaagattagcctgtaagatatgagaaagcccgtcctttgtgcaggggttccatgaggaatccggcatgagggacgggctttttgtgtatgtttagctggaaaatcagattgtgatagaatgggattttgtattatttatccggtaaaatagtcaccgtgcagttcttctgatctgcagatacagagtcaatagtgatcatatatccggtattaaccgtcacctgtccgttttcatcgtaccagccaaaacctgtaatagtgtcatcaatcacatctttgtcacagaaaaaaccgtttccatcattgaccagccgtaagacacgtttgccattattggtggaatcatagactggactgtagttatcagatgccagatagaaagatccatattcatcacttgcaagagtggtgtcgacatgataaatgcgaagtccgccagaagaaaacagcgtgtcataattaccgttcggggtaatatagtcaatgatcatatattcggaaaaataaccggaatgatccgtacgcggtatgatcagacagcttccctcctgtgtatcatctgtcagggtaaaagtctgagcagatgtattgcggtctgaagaagagagtgatgaaaaaagtctgtcggattttttatcgctgggttgataaatctgtacagatgcaggagtataccatccgagcagcagttttgataacggacaaaaatcaccttctgattcatccatacgttcaagaccggcgtcacccattgtagccttaaaattttcccttaatccatatttataataatccgggagtcccatgcagtgtccgtattcgtgggcgagtgttccaagataataatccatggtatcagcgtaggactgttcatcgtctcatagccgtcgtctgttgtttcgtaggatgcaattgtgcctttggcagtgtaatgaaatacatttccggtcatatgccgtgccccataggaagcgcgggaaaaataatttgtcaggctctcacatggataaaatgaggtgttgtctgtaagctgagcaaaaaagcaggacaccgagaaaaataacagggatagttttaaataacttttttttctgtagcatagtaaaaactcttttcttaaaatatacggttagctttgcatgtaagaagcagaaattcaatgacgtttataaataattaagaaaacattaactcaatcttgtgattgcggaaaatacttccagatgttatacttaatagcgttgcatagatacaggataatcgttaaggaaagaatcgaaggtggtgcaaacgaaaaagcagtattgagacttttcattaactgccttttcgtttgcatcaatttcgattttttctggttgaacaaagcgcgtcaactctatatggacttttaattctgacactctatttataataggatagc

SEQ ID NO: 5128 - DNA, 38582 bp, Unknown
  gut microbiota DNA sequence
aaacgagcgatcggcacacggaatggtgaacaggatacataatccagaccaatcttgtggcagaactcaacagatgaaggatctccaccgtgctcaccacagataccaacatggagtttcggattaaccggttttccaagtttaatagctgtctccattaacttaccaacacctgtctggtcaagttttgcaaatggatcgttctcgaaaattttcttatcatagtaagcatttaagaacttaccagcatcatcacgagagaaaccatatgtcatctgtgttaagtcgtttgtaccgaagcagaagaagtcagcctcttttgcgatctcatcagctgtaagagcagctcttggaatctcgatcatagtacctacttcatactcaagtttgatacctgctgctgcgatctcagcatctgctgtctcaacaacaacatcttttacgtattttaactcttttacttcgcaaaccaatgggatcatgatctcaggttttacagtccagtcagcatgtttcttctgaacgttgattgctgcacggataacagcttttgtctgcatctttgcaatttccggataggtaactgcaagacggcatcctctgtgtcccatcattgggttgaactcatgtaaagaagcgatgatgttcttgatggtctcaacagatttaccctgagcttttgcaagtttctcaatgtcagcttcctcagtcggaacgaactcatgaagaggtggatccaggaaacggattgtaactgggttaccttccagagcttcgtataatgcttcgaagtctccctgctgatatggcaggatcttctctaatgcagcttctctctcttctacagtatcggagcagatcatctcacggaaagcagcgattctgtcttcctcgaagaacatatgctctgtacggcagagaccgataccttctgcaccaagctcacgagctttcttagcatctgctggagtatctgcgtttgtacgaactttaagagttctgaactgatcagcccaagccataacacgtccgaactcaccagcgattgtagcatcaacagtcttaattgctccatcgtagatgttaccggttgtaccatcgattgagatgtaatctccctcatggaactctttgccagctaatgtaaatttcttattttcttcgtccatagcgatatcgccacatccggatacacagcaggtacccataccacgtgcaactacggctgcgtgagatgtcataccgccacgaactgttaaaataccctgggaagctttcataccagtgatatcctctggagatgtctcaagacgtactaatacgactttctctcctcttgcattccactcttcagcatcctctgctgtaaatacgatcttaccacatgcagcacccggagaagcaccaagtccttttccgatcggtgtagcagcttttaatgcagcagcatcgaactgtggatgaagtaatgtatcaaggttacgaggatcgatcatagcaactgcctcttccggagtcttatgtccctcgtctactaaatcgcaagcgatcttaagtgcagccggagctgttctcttaccgttacggcactgaagcatgtataacttcttgttctcaacggtgaactccatatcctgcatatcatgataatgattctcaagagtctcacaaacttttaagaagtctgcatatgcctcagggaattctttctccatctgagcgattggcataggtgtacgaacacctgcaactacgtcctcaccctgtgcattgattaagaactcacccatcagtttgttctcgccagttgccggatcacgtgtaaatgcaacacctgtaccggactcgttatttaagttaccgaataccataggcattacgttaactgcagtaccccaggaatatgggatatcgttatcacgacgatatacgtttgcacgtgggttgtcccatgaacggaatacagcctcgatagcaagttttaactgctcaacaggatctgaagggaaatctgtacctaactgattcttgtactcagccttgaactgctctgctaactcttttaagtcagctgctgtaaggtcgatatcaaatttaacgcctctctcttctttcatcttgtcgatgagctgctcaaagtattttttaccaacttccataactacatctgagaacatctgaatgaaacgtctatatgagtcatatacgaaacgctcgaatgcaggatccggattacctttgatcattgcagcaactacttcgtcatttaaaccaaggtttaagatggtatccatcatacctggcatggaagctcttgctcctgaacgaacagatactaataacggattctcaagatcgccgaatttctttccgttgatctcttccattttcttaacgccttccatagcctgagccatgatctcgtcgttgatcttgcgaccatcttcatagtactgtgtacaagcctctgttgtgattgtgaatccctgtggtacaggaagtccgatgcttgtcatctctgcaaggttggcacctttaccgccaagcaggttacgcatggtcatgtcgccttcgctaaacatatacacccatttgtttgccattttgataattcctcctaaaataaattactatgtaattatggacaccgtatttgtttccataatcaagccatgttatgtgcctttctaaaacgcacatatttattctaacatattttgtctaaatagcaacattttttttactgtttttccctgtttttttgtaacattttcacaatgtaaaactttgttccgttatgtggaacattttggatttgtttatttctttttccattttgcatacagtgtgattttccccgtgctgcctttcttaatagaggttacctttctggtacattttttatcacggtaccatcctttaaacacatacccttttcttgttggtgctgccagttttatcatctttgaagtaatggtatatattttcggatttttcttattatttttgcctccgtttaatttgtaggtaatggtgtacttttcctttgcccattttgcatacagtgttacttttccggtactgccctttttaatagaggttacctttttggtacattttttatcacaataccatcctttaaacacataccctttttttgacggatttgaaagttttatcgtctttgaagtgattttatatgttttgggattcttcttattatttttgcctccattcaggttatatgtaatctgatactgtgctgctttccactgggcatataaagttacgacctcatctgctttttttgtcagattttttacataggcattttcctcataaaaggttcccttcccatctggctgcgtattccagcctgcaaatgtatatcctttcttttcaaacttattttttgaaagtttttccttctgacccgccgcacatgctttctcactcattttcccttttgctgcgccattgccgtcaaattttattgtataaagatatggacacacgacaaccggaacattcctcttaaatgcttctgcattgattttatctttggagagactggttattacatatattttttcaggtccgtctgtcgtttcccaggaaaatgcttcgctgccaatctctgtaatcgtctttggcagccttatcttcccaagcacgccgccgtccttataaaacgcacagattccgattgtttttaccgcggtctgggaaagatcaagttcccccgttaaatttttacaggataaaaaagcataactgtcaatcgccgttaatgttttggggaatttcacggtttttaacccactgcaggcagaaaatgcactaccgcctatttctgtaaccaaagtctgggataaatccattttctccagtgaactgcagcctgtaaatgtgccaaatccaattttcgttatattctctggcaatttcaccgtttccaatgcactgcacccctcaaatgttccttccaattccgttatccctgtctgggacaaatctgcttcttccaacagcgtgcagtctgcaaacacacccgctccatcattcacttccagcacgtcaatatcttcaaatccgccacactttacctgacggatgtttttattttttacagcagctaagtcgaaataccagtttcctctgctccatctataagaaatcagactgtaatacaatccatccttcagcaagccatcaactctatatatctgatgatttgataattctgcaatctcctccggggacaggtcaaaatacctgtcagaatacccctgatactcccattctttatctaccgaataagagttgcggctgcaccatgtagcatctgcaaaaatccattttccattttcactgtcataaacagcattgtattcatgggcatgcccctctaaatccatgcacggaattccaatggaaatgcacaatgttctcataaggcttgcataacccgaacacatagcacgcttttgctcgtacacctcatacggtgaccaataacttggcttattattataataggcataataatcataataagttctgtccgcaacaaatgccataatcgcttttattttctcatactgtgtagtacacccggctacagcctgtaatgcagcctgtcttaattcctcaaactgggcatctgttatagcattcctttcaggatctgttaaaaagtaatccgggtctgcatatttattaatcagagtccaggccttctgttccgctgcaatctgctcttcacttgcgtcccccttgattgaagtttcttcccgttcttctgtttcttcttccatttccggcagttctgtttctgtgtctggctgctctgtctcctccggctgttcttctgtgtctggctgctctgtctcctctgactgttcttctgtgtctggctgttctgtttcttccgactctggctgttccgtattctcccgtttctcctgttcgcctgcctgtgtctcctgacgttcacgatccatcagatccagttcttccgtatccgcatatttttcatttactttctctgatgccgattccgctttttctgtctctgcaatcacattcgcctgcatatttaccggcatcccaccaaccaaaacagtcgcagccagcaatgccgtaaaagcttttttcatccctcctttcataaactaaaactcctccttcatttgtaccgctatgttacattaccttttctatattataaccgcaatacgactattttcaattgtttgcgaaatcatttctatcatatctccgcagactatctgcctgtacatacttcaaaatatttttcttctcctccgcgaggtgcgcatcccgcccggagggcgttttcattcataggacgtaatttcctatgaatgaaaaacagacggatcattcccacccaacaggaataatccgtctgtctttttctttttattctccgcttcgaaaaatcctagaaatctacttccgtgtcatagtaacagcatttcaacagcttttccatctcctcctggctcggctgtctcgggtttgatcctgtacatgcatctaagattgcattggctgcgatctccggcagtctctctaagaacacttcttccggtacaaagccctgctcggtcggataactgtctgcaccataattcttaatacagtgcggaatctttaagtcatcattcataccacgcagatatttgatcagaagttccactttctcgtctaatgaatcaccgccaagtcccatgaaatctgcgatctcaccataacgtttctttgcagtttcatctttggcgttaaatgcaatcactttcggcagatacattgcgttggctgcaccgtggatgatatgtgcgccgtaatccgcaaatgcagcaccggtcttatgtgccatggaatgtacgataccaagcagtgcattggaaaatgccataccggcaagacactgtgcattatgcatgttatctctcttttccatatccccgttataagatcctaccagatcacgctggatcatcttgattgcatgcagggcaagcggatctgtgaaatcacagttcgctgtcgatacatatgcctcgattgcatgtgtcatcgcatccattccggtatgtgctaccagtttctgtggcattgtctctgcaagttccggatcaacgattgcaacatccggtgtgatctcaaagtcagcgatcggatatttgatacctttctcataatcggtgatgatggaaaatgcagttacctctgttgcagttcccgaagttgaggaaatcgcacagaaatgcgctttcttacgaagttttggaataccaaacaccttgcacatatcctcaaatgtgatatccggatattcgtatttgatccacatagcctttgccgcatcgatcggcgaacctcctccgatcgcaacgatccagtccggaccaaactcttccatcgcctttgcgcccttcattacggtctccaccgatggatccggctcaattccttcaaaaagctgtacttccatgccggcttcttccagatactgttttgcgcggtcaagaaaaccgaaacgtttcatggaaccaccgcctacgcagataatcgcctttttgccttcaaacgtctttaatgcttccaatgccccttttccgtgatacaaatcgcgtggtaatgtaaatcttgccatctttcctccaatctgccgccatcaaaaggccgccccctgacacatacacatgcctgtattttttgtgtcatttactgtgtgcaacttttatataaccatcacatattttgttaattaaataacaatatgtatggtaacattatatcatatctttcaaaaataagaagcatttttatacatttttaataattcttaatattttctaagcattgtttttaaatccacattttggacagatatttcctcccttatatacataaccacagcggaagcagcagatcgtatcatgtttttctttcgccagataagaaatatttcgcgaatccggtttttcctgtaaataatgaataaattcattcaataccccggcatatgccgtgagctgcttattttctaccgcatatggaattttcgtctttttcccatttttctctgtcacatacacaccacggtttaaaagtcctgtggatgcagtgatctcatctatggacggaacatcaatacggtaagatgtcatcagtgtgctgtaatatagatgttccggtgtcaggataatcccctcttttccactgttgtttctcgatgtgtccaccacaaaaatcggatattcaaacagaccgtttcctgcggcataggatgccatggcataatcgataacctctgtttcctgcggcgctgcctgctttaacagcacttttctcgccgggtaaaaataatgtttctggctttctgtgattcccgcctcttccagttcatttttcagcttatttacaagctgttcacactcatccgtcttgatcttggaaagacgcctgcttaaaagttctaatgcattatcctttaaatccggtaaatatggtccttctgcaatcttctgatacgcatccattccctcatcaaaggacatgtgtgccggatcaccggtaatttctgcgatctcattttcatccatctgacggattttattctcgatctgctcaaaatacggcaaaaccagccccggctcaaactccttttctttcagacgctccttaagctctgtcagatcatctctggtgatttttctcgactggcggatcatattttttatttcctgctgttcggcaagatttttctgcgattctaaccgttcctgatatggggttaaatctactccttcgtattcttttaatttctcccgaagtgcatggtaacgtgccctgtccatattaggcggcattttcccaaccagctctgcgacttcccgctctgcctgtgtctgcattttctgtttcagatttaaaagcagattctgttttttctcctgcggcagcttttcctctgcaatctcgtcatagacacggcgcatcacggcataatttttatctgcgcagttctctgcctttttatttaacgcggcaagctttctgtcctgttctttttcctctaacacatccaggtattgtttccgctcttcgggcgaaattcttgtttcatgcatgagctggtgttttaattcggaaagctggcgctctgacatacggtctgcgactccaaatttagcctgataagtttcacgggctttctgtgcctccgcatcatttacctgtgcatatttttcatcggacgattccccaccaatccgcccagcttcgtgcggctgcctgctgtcactctcatatctggaagcgttcacatggcggctttccgtttcattttgacgtacatcttcatattgctttttgtgctcgttccgcttccatccactttcacccgcgctttcatttccatgctgtttttctgcatgccggttcttgctctcatcctgctcttcttcatcatctgtgacttcgtcccgatctgatgcaggcgtactctttaactttttacgacgctttttttcctcctgtatggcaggttcgcaggctgcaatactgctttccgggaaaaatccctcttctatcttatttaataattcctcaaagtctgcatctgaatattccggcagatcctcgcacagttcctcaagtggctgctgctcgtcctcgacacccgccggctttctgccgtcctcatactcattataacggctgtttgcctcatgctcgccgttacgccccatcagctcaagataatcttcgtatgcctttttatcctcctcaaaatccatcagataaatatcgccgtctccaagaagtttccatgggcgcggcgtataaaatctgtgacacgctgcacaggtacatgcttttgccaaaaggactactccctcaggcgtctcgattcgaaactcttttcctttcggatacatgatcatatgcagatttcctttgcattttgggcagcggtaaccaactttataaaagttattgccaatcctgccttttgctctttctgacagtgaaagttctgttctctcaaaaacagtatgcgccatcttccattcaactttatgccagagtccctgttcctcgtctgcttcctcttccttctgcactgcttcttttgcctcaagtgccgcctgtatcacatcttcataggtaatacgctttcctgcatgataaaaacgaaaatactgcgtggtatattccggttcaatatagattcctgcaagcacatgcccgaaaagagtattcagctgctccgtatttttttccacacgaagtccctggatcgttccccattttccaaatgcatacaggatcatattgatcacatcccgtactgctgcctcatcggtatctttgatctcatcttctttgatcggcagatctacaatattttccgccacttttctactgtcaaaatgaaaaaacagggagcgcacttccccctgtaaaatgagataattatcaagtgccacaaaaagacctgtccagtttacatttgcatgcatggtctttatcagccgttcaaatgtcatttttaattcgctatctgcttttaatacgatcacttttttcacctcttacttttcaaatgcagatttttccttcaagatctgcgcaaaacccatatgaagttcttcttttgcccactcaaaatcaatctcctgattgctgtcattcaaacagacgcttccactcttctgatgacctatatcagccacaatcctgctgttatcatttgagacatcataataccggcagagtcttcttacattgccgggaacaaaaccgccagtcagtttctgatactccctgagcacatactggctgacatcctctttctgacggaatttatggctgcacacctcgtttaacaactccggctctaattcccacattttcacaaaagtactctttttaaaaggagacggcccatgaaccgtgtaaaatcctgtaaacaacgggaacgccagttctaacatattataaataaaatacataaacggataaccgggatggaaatatgctcccggctgttttttcatattttcacgtttgtcaaaatattttgccagaagcatggcattattcaggtaaatatatggcatgacctgatcttttgtatttgccacatcaggctgaagagccagcatatccaccggaagatcatttttaaaatactgttccggtctgaccttttttatcagaaacatatcatcattaaaatatacaaaattctctgccagacctgggattctgtgcatattccactcaatggcatgtgaattaaatgtcggcagatatttttctggaataaaatctttatgatttacaatatttaacttcggatgttctttatttaaccaggatggcagatgcccccatgtaacaaagtgtatcctgcgcacccatggtgcaaaacgctccacaccacgaaaccagtacctcagcagatcccagtctctgtatctctcttttctgtcatcctgtttctgcgacagatccggctgcatactgtactccattttctgtttctgccagtccggatcattgccatctacccatgtgatcacaaaatcaatttccggaatgttattgtcgcgtgtcataataatctccatttctgcccagcaaacatctttttcatctgcttaataaatttcactgttatcatgataaaacaaatcctgcaaaatgaaaatcctatttatctgcttaatttatatttttttaagaaatactggtttttccctgttttaaggcatttccgtttcttttgttagcactcattaaaaaagagtgctgattttctattgacttttgaaatttgcggttataatattagattcaggcagcagcgaggcggatctgcccactgcattttattacgattataaaggagtgtttgaatatggcagagaaacatggaaatctttcaattaacagcgataatctgttcccgattatcaaaaaatggttatattccgatcacgacatcttcttccgtgagctgatcagtaacggatgtgatgcgatcacaaaattaaaaaaactcgaaatgatgggcgaatatacattaccgtctgactacaaaccggagatccacgttgttgtaaatccggaggaaaaaaccttaaaatttatcgataatggtcttggtatgaccgcagacgaggttgaggaatacatcaaccagatcgcattttccggtgcaacagatttcattgaaaaatacaaagacaaagcaaacgacgatcagatcatcggtcacttcggacttggcttctactccgcattcatggtagctgatcaggtaacgatcgatacattatcctacaaagacggcgcaacggctgttcactggtcctgcgacggcggtactgaatttgatatggctgatggcaccaaagaaggcgtcggtacagagatcacccttttcttaaacgaggattccgttgaattttccaacgagtaccgtgcaagagaagtcatcgaaaagtactgctctttcatgccgactccgatcttccttgagaaggcaaacgctgagacagaatatgagacgatcgacgccgctgataaattagacacagacactgtcgttgagacgatccatgaggaagcaaaaacagaggagaaagaaaacgaaaacggcgaaaaagaagtcgttgaagtttctcctgcaaaagataaattaaagatcgtaaagcgtccggttccattaaacgataccaaccctctctgggcaaagagtccgaacgaatgcaccgacgaagaatacaaagcattttaccgcaaagtattcttagattacaaagaaccattgttctggatccacttgaatatggactatccgttcaacttaaagggtatcctgtacttcccgaagatcaataccgagtatgattccattgagggaaccatcaaactttacaacaatcaggtatttatcgccgacaacatcaaggaagtcattcctgaattcttaatgctcttaaaaggtgtgatcgactgcccggatctgccgcttaacgtatccagaagtgcactgcagaacgatggttttgtaaagaagatctccgagtacatcaccaagaaagtagctgacaagctgatcggtatgtgcaagacggataaagaaaattacgagaaatactgggacgacatcagcccgttcatcaaattcggctgtctgaaagataccaagttctgtgacaagatgaacgattacatcctgttcaagaatctggatgacaaatatctcactcttccggaactcttagtcaaagaggaagaaaagaaagacgaaaacaaagatgaagctgaggtattagatgctgacggcaatccgatcaaaaaggaaagcaccgatgcagcagatgagaatactgaggaaaaagatgagcgcaaggtaatctactatgtaactgacaaacttcagcagggtcagtacattaagatgttcaaagagcagaacatggacgctgtcatcttagaccacaacattgatacttccttcatctcacagcttgagcagcgcaatgagcattataaattcatgcgtattgatgcagatgtcacagaatccttaaaggacgagacttccgctgaggacttaaaggctgagacagataccctgacggatgtgtttaaaaaagctttaaacaacgataaactgactgtcaaagttgagaagctgaaaaatgcggatatcgcttctgtcatcacgctttccgaggaaggcagacgtatgcaggatatgatgaagatgtatgcaatgaacggcatgggcggcatggatccgaacatgtttgctgcggatcagaccctgaccttaaacgcaaacaatgaacttgtaaaatatatctttgagcacaaagattccgagcatgttccgatgttctgtgaacagctttacgatcttgcaatgctttccaaccagccgctgtctgttgacgctatggcaaaatttgtacagcgcagcaatcagatcatgatgcttttagcaaaataatttttacagaatacaagcccctgcaaaacctgtagatacgagttttgcaggggctttctcatgctgttttttattgtgtttataccggaatttctataaaaatattattttgctgccgtatagattgcgatcatatcttccacatccagatgctttacttttccaagattgcctctgactgccgcattacacttttctgccagttcttttatctgttcttctgtcggcgcaatgccaagttccgttaatgatgtcggcatatggatttcccggtaaaaatcctccattgcagcaatgcctgcctctgccgtcttctgttctgtctcctgcggctccacacccataacgtgctctgcaaactgcacaaatcgttcaatacgctccccgcagacatagcgtgcccagcttccccatatcgcggcaagccctgctccatgtgccacatcaaacattccaccaagctcgtgttctaatttgtgcgttgcccagtcaccaccatccgttccgcagccggtcagtccattatgggaaagacttcccgcccacatgacttccgcgcgcgcatcataattttccggctcttttacaaggatttttgcatttctgatcaccgtgcgcatcagtgcttcactgattccatccgtcagttccatgttttcaccgtggttgaaatagcgttccatcgtatgcatcaggatatccgtgcatccgcatgctgtctgatacggtggaagcgtcatcgtaagctccggatctaaaacagcaaactttaatcggctgtaatcggtcgtgcatcccctcttcataccgccatcttcctttgttattacgcaggaaccgctcatctcacttcccgccgccgcgatcgtaagcactacaccgatcggcagacatgcagtcggtttccgtttaaaatcaaagaaatcccacacgtctccttcatttgcaacaccatatccgatcgcctttgcggaatcaatgacacttccgccgccgacggcaaggatgaaatcgacattttcttttttacagagtgcgattccttcatacaccagagaaagtctcgggttaggaacgacaccgcccaattcgatgtaagtgatcccctctttatcaaagatcgcctcgatcctgtctaacagaccggagcgtctggcactgccgcttccataatggatgagaacctttttacagttctgttcttttatcaggtttccaactttttgttccgcaccttttccgaaaacaacttttgtcggtgcataataattaaaatcgttcattttgctcctcattcccacatgtaaaagttcttattttctcttttcataactacttctagttatataagatattatcggtaagaaaacgtatctgctttagtctgaacaagctcgcaggaaaccatcaccggttctctgcgggcttacactctcttatcgtatcttcttattatatatctgtctgacaaactatctacattgaaattttatcaagtattccggtcagatgtgcgatcgtcaccccataatttgtcatcggaacctgctgttttttggcacggtcgatccgcgacatcacatatttgcggttaaacatgcatgcaccgcactggatgatcagatcatagccggataaatcctgtggaaaatccgttccactcatgatgtctacggtaatgccctctcctgcgcgcttttttaacatgcgcgggattttgactcttccgatatcttcctgcagtggcgcatggctgcagcattctgcgatcagaacatgcgattcatttgtcagggaatctaacatttttgcaccttccacatagtaaggaagatctcctttatacgctgcaaacaaaacagaaaatgaggtcagcatgctctctttcggcttgtgctcatacacatagccgaatacctgtgagtctgtgatgatcagtttcggcggttcttttaaggctgcaagtgccggcaatagtttatccgttgtcacactcatgaccaggcactttttatccaaaagttcccgtaatgtctgcacctgcggcaggatcagacgtcctttcggcgcctggatatcctgcggcatgaccagtaagacgaaatcttcttctgtgacgagatctcccgtgatcagcctatctccgtaattttccggcacaaggcgggcgagttcttccctgactgcgtcgatccctgcccccgttttggcactgactgtgagcgcctgttttcctgttttttctttgatataagaagcaagttcgtccgtatgcggatcaatatctgctttcccgacgaggaacaaaacaggcgtatttttttctttcagaaactgataccactttaattcttctgtgagatccggtaagttctcctgatttttctcggacgactgttgtaatttttcttttgcatctttcgtctctgaagcatcctctctgcaggcatccgcgccagataccacgatcacagcgatatccgccttttccgctgccagtttcgttttctccacacggcgttccccaagctcagtctcatcatcaaatcccgctgtgtcaataatcacacagggaccaagcggactgatctccatcggcttatagaccgggtccgtcgtcgttccggcaacatctgcaacaatggagacttcctgatgtgtgaaggcgttgataaaagaagatttcccgctgtttgttttcccgaacacaccaatatgcagacggttgctgcctggtgtatcatttagtgttcctgccatagtactcctttcggacaatctacccggcagcacggattttcccgctctgctttctgtttgtccatttaagatatgcatcccgtttttcttctcttaaaatctgaaatcacgttttccctctgcgatatcgtggatgtgctcgtatgcagtctgttttactttcggattcggaattttttcaagttctctgtcgatcagctccataccaagacgttttgtctcttcgcttgcataatcttccagatattcttttaatgtcatcagcgcattcgggtgacagcagtttaagatctgcatgtttttacaaagtgccataaaacggtcaccggttcttccctcgcggtaacatgcagtacagaaacttgggatataccccagtttgatcagccagttcacaacttcatctaaggttctctggtcgctgacatcaaactgctcgctggtcacttctccttctttttccggctctgcgtagccgccgacgcttgtttttgatgcaccgctgatctgggaaacgccaagcggaaggactttgtttctcacttcctggctctctcttgttgagatgatcattccggtatatggcacggaaacacggatcagagcacagatctttgcaaatgtgtcgtcagagatgccattgtcaaatgcagacggatcaatgtcatctgcatgcttgattcgcggtacactgatagtatgcggtccgactccatgtactgcctctaagtgttctgcgtgcatcaaaagtcctgcaaactcataacggtaaaggtcaagtccaaacaatacgccaagtcctacatcatcaattccgccctccattgcacggtccatcgcttctgtgtgatatgcgtaatcgtgtttcggtccggtcggatgcagcttttcatagctttctttatggtaagtctcctgaaacaggatataagttccgattccagcttcttttaatttgcggtaattttccacggtcgttgcagcaatattgacattgacacggcggatcgcaccgtttttatgtttgatgctgtagatggtcttgatgcactctaagatatattcgatcgggttgttgaccggatcttcgcccgcctcaatggcaagacgtttatgtcccatatcctgcaatgcagtaacttcttttacgatgtctttctgcgtcagtttctttcttgcaatgtgtttgtttttcagatgatacggacagtatacacagccgttcacgcagtagtttgacaaataaagcggtgcaaacaatacgatacggtttccgtaaaaatcttttttgatctgctctgcaagtgcataaacttcctggattttttcaggaatctcacatgctaagaggacagatgcctccctatgatttaagccctttcttaattttgccttctcgatgatctcatcgatcagtgccacattgtccttgttggcatctgcataggcaagtgtctctctgatctcctcatctgaaataaactcttctgcttttaatgattttgcgttatacatacattcttcctttctttccggtcagtttgcgcccgcttgctttccggttagtgtatttttatatggacgacagactgctctttttgcagaactgtcgtataaaaccagtagatccgccttaagtctgctggctttttgtcaatttgtgatttctgaagttatcttatgtccgcccgttctgtctcacagatggctgatactttccattctgctttcttatggctgaaaatcgcccctgtttacggctacctgatagccaatgctttccattcgtttctgcatgcagaagcggcactctgctgcctcgtcaccggtgcagatcttattatcatataatttatatttctcccgcacggcaaccggggataaattcggcatgacgacatttgctcccgctaaaattccaagctccctgcccttaggatgaatcgttccaagcgctgtggtcgccgggagaagtacatgcggatggatcagtctgataatggaaagcagccgcagtgtcatctccatagtgcccgctgtctcagtaccaaacggcgtatctttctgcgggataaacggaccaataccgaccatctgcggtttcaatctacggataaactgcagatcttcccacagggtatctacggtctgataaggcgaacctaccataaatccgcatccggtctgatatccgatttcttttaaatctctaagacagcgcatccggttctgataggacatctctgccgggtgcagtttcttataatgtgcctcatctgccgtctcgtggcgcagcagataccggtctgcccccacatcaaaatatgcctgatagctctctcttgatttttctccgatagaaagtgtcaccgcacagtcgggatattctgcctttatctttgaaacgatctgacagatcttttcatcggtataaaatccatcctccccaccctgcagtacaaaggtgcggaatcccagctcatatccgtttttacagcaggaaagaatctcttcttccgtcagccggtagcggtctgcgtggcagttacttctgcggattccacagtaaaggcagtcatttttgcagtaatttgtgaactcaatcagtccgcggatgtagacattttttccatagatgcggtcacctgtgttccgcgcacgctgttttaaatcctgtatcatcgcatcgtcctctgtggcaagaagaaatgcaagctgttcttttgtgatatctgctgtcttttctattgtctctgacagatttttaaaattctgcgctgacatgccatagtttttctgtttgtttttgtctggtgttctctggttttgtaacataaatttatccctgtccgatcataatggtctttctgctagtgagattgggcatccgacatatatttcttttgattttgcccaatgtgtatattttcaattcatatccacgccagcttatgccatgccaacattcgaatacaccgtctttgccgtgattccatcaagtctgccgattttcccggaaagtgcattgataacatcctgcggcgcatcgattgcaacgctgatgatatgcacattccgctcacggtatggcagacccatccgtccgataatatacgagccgtattcatgcaaaagtttatttaattccggcgtggaatccatattttcaacgatgatcccgatcaaagctactcttgtatccattcgtttcctccctgattatcaaatttatatgatttgcatacacgaatctatgatacagattttggaataaaaaaaactgtacccctaatttcaggtacagcctaataagagtcgcattgcgcctcttacattttccatttatgccatacctttcatctcaagtgattcttttgatgtcagcgtcttttctttttctaataaacaatcttgtgcaaaaaggactttacatgtgctctttgcaaagatttacaatctcaatttagatgcattttacgggcaaatttcttattataacaataccctctgcatacacaaaaattatacagcaaaattttttgcctatataagtattatgtatacaaagggtatcatgattttttaagaattgcaattatgtttcgattctgtacgatataaaatacaaaaaatgtgttactgctcacacatactgtgtgagcagtaacgattacagcccattttaaatgcatcttcgatgcatggggctgtaatctggcatgatatagtctttggcgcacagcttgacagcaagtgtcaaacttgcgagtgaacagtaacaaaaatgttactctttacggcaccggctcttcctccggcacctcgatctctttgatcatcgtctcatttccacataaaagccaggtatgttccccgccgcactccgggcagatcttaccatgtgctacggtatcatattcgcagccacagtcatcacaatgtgtcactgcatggattgtctcgatatttaactcactgccggataaaacctctgtgcggtccgccgcccagcgccagcagtctgtgagataagacggcacgatgccggacacttccccgatggaaagtgtcacagccgaaacctttgtcagttcattttcctgcgcgatctcctccacgcttttgatcacatgaaatacgattccaagttcatgcattcgctttatttctccttttttccaaaacggatcttcacttcacgttttaacatataaggaagaattgccttcatcttgtcctccgcttttaccatacggctacactccggcagctcgcggtgcagatggatcgcatcaaattcacactttgtcgtgcagacaccacagccgatacacttgttcggatcgaccacggaagctccacatccaagacaacgcgcagtctcgatcttcacctgctcctcggtcagtgtcctgtgtgcatcgcggaatgatctgtgcgcatcaatcttgtcatccattgcaggacgctgtctctttgcactgtcatatccttccagggcaagattttccttatccagttcgataaactgacggcggtttcttccgatcgtcatgcttgcgttttcatgtacaaaacggtgaatggactctgcaccttcttttccggctgcgatcgcattgattgcaaaactcggtccggtatagacatctccaccgacaaagatatccggttctgcggtctggtaagtaagcggatctgctactgctccgtttcctcttccaagttccactttagagcctgccaaaaggtcaccccagagaatgctctgtccaatacttaagtatacatgctcacattccacggtcattgtctcattctcatcgaactgtgggttaaaacgtccagtctcatctttgacggaaacacattttttcagcacgatgccacgcactttaccgttttctgtcaaaatctctttcgaaccccagccacagtgaacggcagctccctcttctttgacttcttccacctcatctttggatgccggcatctctttttcagactctaagcagaacatggaaacttcgttggaaccacagcgtgccgctgtacgtgccacatcgattgccacgttaccgccaccgatgacaacagatctgccatccacgcggtagtcttcgtttccaccggatacgatatgtaagaaatcaaccgcactcattacacccgcggcatcctcgcccggaatgcctgctttgcggcttccctggcagccgattgcaatataaaatgcctgatatccctgcgcgcgcagttcgtctaacgaaatatcttttccaacttccacgccgcatttgatatccacaccaagttcacgcatcacttcgatttcagcatccacaacatttttctctaatttaaaagaaggaataccgtaaacgagcataccgcccggacgttcatttttctcaaatacagtcggtttgtaacctctggttgccaaataaaacgcacagcttaaaccagccgggccaccaccaatgattgcaatcttctgtgggaaagttccacggtttgacggctgtacgaccggtggaatgtaacgtgtatctgaattcagatccagttctgcgataaatttcttgacatcatcgatcgcaactgcctggtccacagttcctcttgtacatgcatcctcacagcggtggttgcagacacggccgcagactgccgggaacggattttcctttttgatcagggcaagggcatctgtgtatcgtccctgtgccgccatctttaagtatccctgtactgcgatatgtgccggacatgccgtcttacacggtgccgttccggtatcataacagttgatgcggttgttatcacggtaatccatatcccatttttccggtccccacttggtattatccggcagctcgtgtttcggataggtgatggttccatctttcgtacagagtttctgacccatttttacggcacccgccggacagtactctacgcagcgtccacatgcaacacagtcctttgtctcaacctttgccacataagcagaacgtgacatgttcggtgtgttaaatagctgtgaagtacgaagtgcgttacagatatttacattgcagttacagatggcaaaaatcttatcctcaccgtcaatgtttgtgatctgatgaacaaatccgttgtcctccgcacgctgcaagatttccattaccttttcacgtgtaatgtaatgtcccttgtttgtctcgactaaatagtcagccatatcgccgacaccgatacaccagtcttccggatcatccgcgcatccctcgcccaaaacaccgcgggaataacggcaggaacacggacctgctgcatattttccatcatatttatccagccagtgggaaatatgctcgacactgacagactcattttccgtctcgatcgctttctcaaccgggataacgtgcataccgattccagcgcctcctggcggtaccatcggtgttactttctgcaatggtaaaaatgccatgcgctcaaagaatgatgcaacttccgggtgctctttgatctgatctaacttcatgttaaaaaactctgcacttcccggtacatacatcggaaggacatactgtttctcgtgtttcggattctcccagttgtactctaaaagaccgatgttactcatttcctgcaacagttcttctaacactttttcttcttttccggttgcttttacgacctgtgctaatgtcatcggtatgcgcactttcattttcagtgcaacttctgccatctcatccgtcacaagtgcttctaatccataatattccggatcttcggctgtcactgtatgaccgatacggtcggtgatcttctgtcctaattttaagatcagctctctcggctgttccggtggtgtgtactcaaactttttcatgcgtgttcctcctctttccatgcagcggtctcttttttcagccagtctgcccattcttccataccttcacctgtctttgcacagatcgggatgatctttgcattcggattgcgcatcaggatgttctttttgcactgctctaagtcaaaatcaaaatatggcatcacatcaatcttgttgatcagcacgacatcgcagatggaaaacatcagcgggtattttaaaggtttgtcatgtccttccggtacggataagatcatcgcatttttcactgcacccgtatcgaactccgctggacataccagattgccgacattctctaaaataaccagttccacatcatctgttccaagtccttttaatccctgtctcgtcatatctgcatccagatgacacatgccgcctgtatgaagctggattgcctttgctccggtctttaaaattgtttccgcatccacgtcagagtcgatatctgcctccatgacaccgatcttcaagtcatctttcagtgcctcgatcgtgcgtgtcagcgtcgttgtcttgcctgatccaggcgatgacatcaggttcaacaagaacacgccgtcttttttcagttcttcgcgaagcaatgctgcctgcttgtcattgctctcgaaaatgctctgttttacttccagaatccgtacatttcccatgataatctccatttcttttgtaacatttttcgccttatctgttacttatagataaattctatcattttagggtggttgtgtcaataaattctggtcataccagtgtgccaattttttagaatttgtttagaattgtctgattgctatcacaggaatgcgaagattttttaattcatggacgtaattttcctatgaagattcgggtgtcaaaaggtggcttccaaattttgacacccgaatcctatgaattaaaaaaacaacactacagtccgcagaaaaacctgtatactgtaacgttgtctgtcttactttagtatgcctttacttttacatatccttcttcataagaatatttcagataagtaataacatttacaacctgtctcttatcatcatcaatgtgtatcctaataagttttgacctctccatttgctcaaatccatccgatctggatctttcatagataatccaatcccccaaattctgtcttttaccgcacattctgcaaggatttgatctttcgtatgtaacaaaccttccctcaatttatcattttgggaaaattttgctataagcccttcataaactacaatctgccttataccattccagtaattttcattatagcctgccaccatacgtcccagttcttttatagatccaacctcatctgtttccaatatcttttcagcaatcacatcgtctctgaaacaaactgcctttttatacatcatatattgctccatagatgaaaatccgattccatttacatcaaactgtgacatataccagttactcaagtatccattttcctcatcaggattatgaaaacataaaatatccattttatgctgcacctaccttttttactgccagatcaagctctaagtcatgcagtccgtgatacgctttcatcaaaaaatttaacggtactttttctatcacctccgagcttggaatattatagtaccattgataatacgcataaaactcgccaatccagtccggcataaacccttctaaagcctttccagctttcaatttatacttttctgtatccgaaaaatatctccataattctttagcatccatggtattaacatacgccatcgactcatcgatatattttctggttttacttttcatatacgcttctataaaatccgttgtatcattttcaggaaatgtctgcgctacaaaatcaaacagttttccctgactctctaccacaccatctaaatatatctctgaatatgcccgcattttcctcacctcataaaattgtgctaaacacattggttactttatttgcatcagagtcaatcagttctttcatccttttccttgctgtcacatcgcgttcattgtatttttcattaaactcgtcatattccacggaaataagttcttcttctctctcagacagcctcaaatatgccagttctgatttaatacaatactgtattcccaaacctcccaacaaaaggagctcttctaaaatttccacatcaatttcatctctgacaaacgcttttgcaatataaaagtacgatgcatccgctctccatccttttatcacatcatatccgcttgtttcgataccatattttgcaataaacttctgcgacaacattctgtaacgcttagagtctgctgcatccctgtgtttcattaattcagccagccatgataaaatgctatatttctggaaatcaagtactttcagtccttccatatccaactcatatttatgaacccagccatttgtctcatccggtctgcaaaccgcccattcttttgcaagatcaatattttccgtcaaataaaagccttttccgtaatcatgccggttttctcccaatccaaaagctggctttatttctttgtcaggactcccatgatacaagataatcttacccatatcgtcatcctccctatacaaacataatttagaaattgcaatctgttccgcttttttaagctaagttcttttagcgtacccaataatgctttattcccctctttgattgcctgatctacctcttttcctagagcaatacataaaaaggtcatccgctacctcacgataacaccgctaagcctacgctattgaaaaaagtgtcgcaggtaatgcagccggagccacacgcatctctgcacggattgaccgatttcattttaccatttcttctgaaaatattctatacctatcctgccatagattgcaccagaaaaaaacaacgctacagtccgcaggaaaacctgtatactgtaacgttgtctgtcttactttaatatgcctttacttttactttggaagaaagtcccctgctcttaaataatttcttataagcggataatttcttcttcggtactttgaccgtggttgcttttgtgattcctttaaatgtactcttagaaagtgtctttgctttcagttttgtagattttatcgtaattgtctttaacttcttgcatccggaaaagacattttctccgatctttgatacattcttaccgatcgtaaccgtctttagtttcttattattcttaaatgcactctttgcgatcgatgttactttataggtcgcaccattaattttgatagaatccggcacagcgatctttgtctgttttttgtttttcggtgccttgtattctacctcatggactttaccggcattcttcttgatggtatagaacgatccatctgccttattcacaacaacctgtccgacggtaagtgtatttgtattggacggctgttcatttgttgtttcttccttcccggtcaccgggatcacaactgctgctttctgatagccgcatacgctgcattcctcatggctgctgccttcggtactttctgttgcctgccggtcgatgatcgtctgaaatgtatgctctgcctgttctaatttctttccacatccatttttacaatctttccaatgtgccttttcatcctttgaccagactgcatctgttacatcatgtccaagtgaatccgtcatgatcgtctttgtctgaacctcaaatgatggatttttaaattctgctttgtactctttcttgccgtttgtttcacatcctgctttttcctctgtataagatgcagttacagtttcgctttcttcattttcacatccctcacatatcctgcgtgccgtacagctcatatcgctctcgctccatgtatactgtggtgcaccatagtgatgtccgtctgcattactgtatatgctgccatcctgatatacagtcataccgcccaataccggagtctgatctgttccgattttctgtccccagatcaattcagccctcctgctatctccacttccatccagaagatatgcaacctctccatccgtgaatgctttcgttgtctttgtaatctcgccgtcccatggtaacgtattcttctccatacagtaacaattcgatatcttgccggtgatctcgtctttctcagcttctccgttaccgatcagcggatactccgttgtatgatagcaattcttaatattgacacccgtaaatcttcctgcaataccaccaacgtctgcagcatcttcacctgttactaccacatttcctatattgaacgaattttccagactggtattgctgtcccatgatccgatcacgccgccggtatacttacctgtattcgtgacatctcccatatttccatacttactaccatctgaattgctgcccattcttccgatcacaccgccgacattatctccatttccttccacagctcccctatttaaaataaatccatccatagaagtcatcggtgcagaatatgcatactccccgacaactccaccgacactatttttacctgtgatcctgccggtattgatcacgccctttgctgcctgaatttgacagttactgttatcagaacttgtcatatgccctccaataccaccaacacttgtaattgctgctgtcacttctcctttattctgtaacattccattccgggaaattatagatatatcaattccatatccgatcaatcctcctgctcccatagaagtattgcttcccatactagatatcttacccgtattgataatatccgcatccgcttgaatggacgcaagatctgcatatccgatcaaacctccgacatatccacttgatttagcagttatagctccagaattgagaataccctcatggacgatcaccttcattccaccactagcctgaccgacaagtccacctacattcgctgtccctgtaactgcacctgtattactgatcgaggtatcggattcgatctgtgcactgcttgcatatccagccaaacctcctgcctgacctccttgtgcggttatatctgctttattgttacagtttacgatttttgcatcactacatgcctgaccacagatacctcctacactatcccagcctttagaacttcctgcagtggtgacatttcttatctctccgccactgcctagtatgccaaacaaaccggcattattgttaatgcttctgtccgcatggatcgtgatctctgctccgttaccatcgaagactcctttataggaaccggaggaatctccgatcggattccatgttaagtctttcttttctccacgtactgttgtatcgatctctgttacaccatctgcaactttcgcacattcatttctatccgaggatgcttttacgatctctgcaaacttccacagatcctccgaaccggtgatcacatacggatcttctgctgttccacttccctgtaattcctctgccgcataaactgtcacacttccctgactgcctgtcacaatgcctgccacagccagaaagcccaataatatgccgcctgccattttcctgcttatcatttttgtcactttcaaattcagcgccttcttttttatttcatttcccttttttcatgtactcctagaattcttcatttagaaaattctaagcgtacatatatgcatacaaaaatattgtatcattttttatactgcgtgtcatcactttatcaaaataaatggttatcaaggtaaagtgatgctagctaaactgacaacccacatttctgaaaaaagcagggagcgtcaaatcattctgacgttccctgctttctcctgaaaatattctattaaaaattcttaaacccataccctgcagctctcacggcatcaataaaatctcccagcactgctgcatttgtctctgactccgcatggagcagataaattgcacccggatgaagtttatctttcatcttctgcagactcgatgcatgatccggctgattattgacatcataatccagatatgcaaaactccagaaaatactcttgtaattacagttatttaacagggcaagtgactgctcgctgaatcttccggtcggataacggaacagatacatgtcatatccgaaattttccttgatataggcatggttctctgtcacctcattttcctgtttatccaatgataaggaaggcatacccgcggaaggatgtgtcacgctgtggtttcctaacacatgtccctcatcgatcatacgtcttaccagatccggattatctttcgcatacggctctgtcacgaaaaatgtggcggacacccctttttcctttagggtatttaaaatgctctcagtctgtccgtattcataaccttcatcaaaggtcagataaatatccttcgtgtcatcaccaataaagtacgcattgtattttccatatgtctcctgtgcattaacggcatctaacggacggttttcatcatcggtatggctgccaagtccccagtcatgactggtggcatccaatgaagaaacattttcaatctgtgtattctgcaacacctgtccggtcgtaccttcgccagtttccgtacttatctgttcttccgtgcccgggacatcctcgacggattctgtagcatctgctccgtcttttccataagcctcatatgtttttaatactgcatccccaatcgcttttgcataattttcaacgttcgcatcaaacagctgattgtccgtcggactgttcataaaaccaagttcgacaatacatgccggcatgttcgtgtgcagatttacatagtaatctttgctctcgctcttttgtgttcctttttttacaccacggtttctcgagatcccggcagcatccaggttgtccataatattttttgcaagcgcctgtgtcttgtcatccgcgtcactgcggatccaggtctccacaccatttccttcacccgtattgcgatgcagtgacacaaaataatcggcattattctgatttgcaaaagatgtccgttcctccaatgataaaaatgtatcatcggaacgtgtcataatgacctgaatattttctttgtcagcaagatatgccgccactgcctgtgtgatttttaaattatcatttttctcataacgaagcctgtaatcagacccgttatcctttccaccatgtccggcatctaagcatacgatcagtttattctcatctaacttatccttattctcctgctcgtcgtcaacagccacgatcttcccctcaatctgtgaaaggtcaatacctgccggaaccagcttatgcagcaaactccccatcccctgaaataacgcaagaacgatcaaaagctgcagcgaacaatatactatgcacaccagatttctcagtcgtttttttcttcgtttctctgcattcaaatccgttcactcaccatcttatttattttaatttacttttaactttcgtccgcagtgccactggactgacaggcatctacgttccacttcggtccgtgctaaacaggtgccaccggcacctagcaccgccctatcaaataagaaaaacacaaaaaagtgcctgcaagcagtcattttttgcatttctcttatttggcactgctcattgcctacgcacattatatcttatcccactgtaaaagaccataaaacattttcttaatattttatgatgtttcatcaaacaggaactgtgcgagtgcataattgctgacatcctgtcctttcggtgtcagatatatccttcctgcacggcgctctaaaagtttctcctcctgcagatgatttaatacctcctgatagaccgcctcgatcggcataccaaagctttgaaagaaatcatctcttgaaattccatcgatcatgcgaagtcccaggtacataaattcctccatctgcgcatacttgcctaccagttctgccgaggcgtgaagattggttgccgggagctgttctatcgtaccgtcactccgtttattttcccagatgccttcccggatgacgtcaacctgttccagataagtatataaatcactggtgttggtgtatcgtatattttccatcaaagatgacgcaccgagtcccatgccaagataattgacacgcgtccaataacctatgttatgtctgcacgcatatcccggctgtgcaaagtttgagacctcataatgcacataaccgttttccttaagcatttcctctgttaattttgtcatctcatagacttcatcctctgtcggcaatgcatccgttaccattcccgcacgctgtttcaccgcgtcaaacttataaagatcgtaaaatggagtccctttttcaataatcagcgaataggcagaaatatgttccggtttcagacgacagaccttctgcagggaatccgcataagtttctatgtgctgtcccggaagtgaactcataagatccacattaatattggaaaatcctcctgatctcgcaagctcataagtttttaaaaactgttcccaggtatgaatacgccctaacatcttcagttcaacattctgcgcagactgcagccctaaactgatccggttgatcccggactgtctgtacaccgcaaatttctgcgctgtaacagttccgggattgcactcaacagagacttccgcatccggcagcagcgcaaaatttttatgcacggcatccatgatctctgccatatccgactcccacagccacgatggcgtgccgccaccaatatagactgtcgaaaccacataatccctgcaatgtgccccataatagaaaatttctttgcaaagtgccttcacatattgtctctgtgtatcttcatctgccgggaaagaaaggaaatcacaataattacatttccggacacagaacgggatatgtatatataattccagttcctttttttccatatttaatcctcatccagttttaaaacactcataaatgcttcctgcgggatctcgacatttccgacctgacgcatacgcttctttccttctttctgtttctctaacagttttttctttcgggaaatatcgccaccgtaacattttgcaagcacgtccttacgcattgccttgacggtctctctcgcaatgactttaccgccaacagccgcctgaatcgggatctcgaataaatgtcttggaatctcctcctttaatttttcgcacatctttcttccacgctcatacgcactgtctttgaatacgataaaggaaagggcatcgacctgttctttgttgatcaggatatcaagttttaccagttcggagcgctcatatccctttaattcataatcaaaggacgcataacccctcgaacgtgacttcaatgcatcaaagaaatcgtaaatgatctcatttaacggcagatcatacttgatcagtgcacgcgtttcctctaagtattccatacttaaataaacaccgcggcgctcctggcacagtttcatgattgcaccgacatactcactcgtcaccatgatttctgccgatacgacaggttcttccatgtattcgatctcagacggatccggcaggtttgacgggtttgtcagatccatgacctctccgtttgtcttgtgcactttgtaaataacccccggagctgttgtcacaagatctaaattaaactcacgctctaaacgctcctgaataatttctaaatgaagcaggcctaaaaatccgcagcggaaaccaaaaccaagcgctaacgatgtctccggctcatactgcaaggacgcatcgttgatctgtaatttttccaatgcatcacggagatccggatattttgcgctgtcagccggatacataccgcagtacaccatcggattgacctttttgtaacccggaagcggctcactgcatgggcggtcggcatttgtcacggtatcaccgacacgggtatcgcggacatttttgatacttgcacagagataacctaccattcccgctgcaagctcatcacacgggataaactgtccggcaccaaaatatccgacctctgtgacctcggactgtgcaccggttgccatcatgcggatggtatctcccacttttaccgttccctctttgatacggcagaatacgataacacccttgtaagagtcgtaaagtgcatcaaagatcagcgcctgaagcggtgcttctttatctccagtcggggctgggatctttgttacgatctgctctaatacctgatcgatatttaagccggtcttagcagaaatacgcggtgcatcctccgcctcaatcccgatcacatcctcgatttcttttaccacttcatccggctgtgcactcggaagatcaatcttgttgatgacaggcatgacatcaagatcatgatctaatgcgagatatacatttgccagtgtctgtgcttccactccctgtgctgcatccacaaccaggatcgcaccgtcgcaggctgcaaggcttcgtgatacctcatagttaaaatcgacgtgcccaggtgtgtcgatcaggttaaaaatatactcttccccgtcatttgccttataaatgatacggactgcctgtgacttgatcgtaattccacgctcgcgctctaaatccatattgtcaagaacctgcgcctgcatctcacggctggtcaaagttcctgtacgttctatgatacgatcggcaagtgtcgatttaccgtgatcgatatgtgctataatacaaaaatttctgattttactctgatctattgacatgttactctccatttcaaaaaaaaatacgccgggcatatgcccatacgtttttattatacgggaaaagcaaaggaaacgtcaagtcatccgcaatcctctttcatgtttcattttcatttattaacaattaaaatacaaaaattcacaatatgttcactggatttttagtacttttgggtgcataatagacttgctgttaaatatttaacagctgggtttctatcgtcaatatgacaaaacccccttcttaatatgaaaatcccccacgcagtggctgcaaacactgcgtgggggattttttatatcatgtgcaaaaccagcacatgatcgtgatctacacttgcttcactcggctatcttattatttcattgaactcttacttttattcataaatcggataagagattccctctctcataaataccggaatcacatcgatcggtgccggtactgtcacataatttccgccctcgtatacctttttcgtgtaggcatccgtccattttatacctgctgggagatataccctgcgctctgtcgcacctgcctccatgaccggtgccactaaaagatccggtccgaacatatacgcatcctccacgttccagctctctttatcctccgcaaaatcaaagaacagcggacgcatcaccggtgcacctgttttacttgcctgttccatgcaactacggatgtacgagcgcagacgctcacggataaacagatattttttcaggatctcataattgtcctccccaaaactccacacttcattatcctgaccggaagtaagctggcgcacaccatcgataaactcctgctctctctcgtaccacggagaacgctccccatgcatacggaataccgggcagaatgcaccccaggcaaaccagcgcaccagaagttctttaaatgccggatctttgatattcccgccaagaaagcctccgatatccgatgtccaccacggaataccagccacgcacatattaagtcctgcctgcagctgctctctcatggagcggaaggacgagtacacatccccggaccaggtaagaacgccatatttctggctgcctgcccatgcacagcgcaccagactcatgatatctttttctccctccgttttcaatccgtcataaaatcctttcgcatagccaaccggataaacgttgctgcactgcagtgccggtccctcataatagcggtaattatcaaaatcatatggtccgtactccggttccgcttcatctaaccagaaacagcggattccgtttttatagtaattttccttacatttttcccatacaaatttctgcgcgcccggattggtcgcatcgtaaaatacggtatttcccatccagctcatatgataggaaagtccacgatccggtgtgacaagatatccgcggtcgttcatctcgccatagttttcgctgcgctcatccacggtcggccagacagagacaaccgtctcgattcccatgctctttaactcatccaccatcgctttcgggtccggccagtctctcggctcaaatttaaactcgccctgcattgtccagtggaaaaagtcgatcacgatcgcatccatcggaagtccgcgctttttgtgttctctggcaactgcaaggatttcatcctggttgcggtagcgcagtttgcactgccagtatcccataccatattccggcatcatcggagtccttccggttgccgcagaatactgttcctcgatttcaaacggtgtatctcctgccgtaataaagtagtccagtttttttgtgctctttgcgtaccactctgtcttgtttgcaccaaaaactgctgttccgattgccgggttgttccagaaaaatccatagcctctgcttgagaccataaacggcacgctcgcctgactgtttctgtgcgccagttctaacattgcaccttttttattcagatttttctcctgatactgtcccataccaaatattttttcatcatcaaacgcctcaaaacgcatagtcagttcgtaatccgtactgcccgggatcggttttaactctctcgcatcaatgcgcagcggcacacagtagcggttgatccggtttctgtttctccagtactcttcggtcagaagttctcccttctgattataatagctgatccatccctccggggagatcacggccgtgatttttccatttttaacggtgtaaacttttccggtctgatgatattttgcaaactcctcgcctttgtaccatggatccgtcgtatcaacttctttacactccacctgaagcggacacatttttacctcctcggtcagcgcccagtcatgtgcatccatctgtgcctctttggtcatgcgcacacggaaggaattttctccccatggttctaaccataatgtcaatgttccatctgcaattacaagtctgttgttttcttcgtaaactctcatctaacttttcctttcttaatatatagatatattcttacgtttgtctttacacctgataaatccggtaaatgaattcttctctcccaaaatttatctttctgctatattatattttccgactctaacgtttcatctccccatacaaaacaccgcgtgacccggttgccagaaaaaatctgccaaactttcttttatccccatcgatactgttgatctcgccgtacatctggttatcctgattcagccgctcatacgattttccctcatcaaacgtgcggtaaaaaccatattccccttcaaggcgtccgcagaaataaattgctttttcctctgtcagataatccctgtcctctccgatcacaccaagtcccatccggtagcaggcatcccccgtgtccgtcaggcgtttcacatggatttcttctgttttcgtgtcataacagagtttataaagtcctgcatcacccaatgccaggtaaaatatgccagtctttccgccctcaccgcgcacttccgtcttatttgcagtatcaatatagccaaaatcacagaccggaaatgcctctttcggctgtttctgataaaagtttcttcctccatccctgctcacatagatttcggacgcaccgccaaaaccataaaacagatctttcctgctgcggtcggaaaatactttcagatatcccgtctcaacaggctgccccgccagatcaaacactcctgctttttgaaaactgtgtcctccatcattgctgacaagcaccagttccaccggaagccttatcccatccgcaaccgaccatacaatattgacgccatccggtgacactgccacccatccggcattgacattcgggttttcgatctcatgcagtttcttgtcgatctctgcattgataccaaacggcatgccgatccggtcaaatgttttaaaattatcgcacgtgcgcaccagaccgcctttggtttttcctttccagtttccccgcgccgtcacaatgccaagattactgtccgcatcggaaatatctgcgttgatacaggtaatgtaacggttgccctcgctgtcatcaaaagaatttttacagggttcatcaagattccggaatgcaaatccgccgaggtctccaacgatatccacaagctgtacctctccatcaaccggcgcatatacattcagatgaacggtctcctcgattccggtacacgcatcatgatagcgcggatgctcactgagcagcgcatccgtcataaaaacgccggttcccgaattaaaccatacctcatccggatcaaacggattgatcttaatatcactcagccagtgcagcagacaatggtttccgttatactccggtttcatgtaggaagtattaaaatataaatcccccgtttccagtccgcagagactcacgctccagctgctgccataatctttcgaaagatatacgatttcatcgctctctttttccctgcagagcgttgaacacaccagaagtcccggcattgttttacaggaagaaataccgccaaaaccataatttaaaaattctgctgtcagcgtgccatccgcatccggtgtaatgtcatcataccctgcaattttcccgtctgaaaaataataccgcaaaacctttccaccgatcacatccccggaatcacagctatatccaaggtcgaccacataattccatcttccggtgacattcatcgtcacataaaggtatgttccatcatagtcatagcgcgatgccacaagaccgttcattttgctgtcatgaatcatgacattttccggctgcatcagtttttcaaacgtctgccctgcatcataggaaacatacaggctgtgactgcgaagcgtatcactctcccttgtcgtatatcctgcggttcctgcaacaattgttttcgaatcatccgatacccagacacaggtcatgtaattttcctctaaaggaagccgttcccaggtatctcctctgtccgtggttttccagagaccatctaactggcttgcaaaataaagtgtgttttcatcttttttatctaccaccagacggtatccggttcctcttccgcaaagattgccatgaacggtcaccgggatttttttgtgaataaatgtctctccataattctctgaaattgaaaattttccatagccctgtccgttaatgccgctcatgatgtacaggcgctccggtttcttttcatcgagtgcgcatgcgattggaaatgtttcggagatgtcctccatgctcacactgtcgatgaggcttttccagcactttttttcgtattcataccggtaaacgcctccgatgtctgttctggcatagaggatgccgggctgttttgggtggtacaataaaccggtgacgtagccgccgccggggattggggcgtttttgtattcgtaggtgattgttttgtggactttcattgtataggtgaactcctttcgtgggtggtttttggggtagggggattcattttgcatgtaaggtgcagggctcttttggggctggaatggcgaacctgggggggctgacagccacacccccgcaccgcttcactacaaatcctccacgatcgagtaggagggaaatctgagtgatttcccgacctctcacaccaccgtgcgtaccgttcggtacacggcggttcaatcaacttaacaagta

SEQ ID NO: 5129 - DNA, 3784 bp, Unknown
  gut microbiota DNA sequence
taatcatatatcgggaaaggaaagatataaagacagtaaatgtaggatttcgggatatgaactttttacatatgactggtgtgaaaacaagattgtttgcacaacaattttatgcggcttgcctggaatcaaaactttctgagtatgattttgaaattgataataaaggaaaagtgcaacagaaattaatggtgttaccatatctggcgaagaaccagagtatgcatgaacttagggtaagtgatgaaatatttgaaatgattttagtggatgaggaatgaaaatagtaaggttataactcccttgttgtccaacccccgaaatggtagtataatcaaaatacacaaatcaataaacaaatgggggcaacacatatgaacattttattttttctgacaccgaaggaggacgtagcacatgtggaagagacggacaccatgcgtcaggtgcttgagaaaatggaacatcacggttacacagccattccgctgcttggtgtggaaggaaaatatattggtacgatcacagagggagatctgctctggtttttaaaggaccgcaatttcccggatctgaaactgcttgaggacatgccgatcacatcgattgagcgtagaagggataatcaggcggtaaagattgatgaatccatggagaatctgtttgacaaggtaatgaaccagaactttgttccggttgtggatgataaaaaggtgtttatcgggatcgtgaccagaaaagatgtactggcataccttggaaagaaagcagctactcaggtgtaatgataaaccgtccgtttgcgccgctgaaaaaaaatcgataaaaacagtgtcacaaactccgccaccgggatcgcgagccacacgcctgtcaccccccaaatggctggcagtgtgaggagtgacagcaggataaaaacaaaggttcttgtaaaggatatgattgccgaggttttaccgtctgagagtgccgtaaagagagcggatgaaaaaatgttataaccgctgaacaaaaaggtcacacagaataccgaaaaaccgctgacggcaaggtcataagtcgctgtttttccacccacaaacaaaagtacgatcggctcggagagcaggttacagcaaatagtaattataatagaagaaacgatcacgaagcgtctgcagattttgcagacgcttttcagtccgcctgtattttttgcaccgtaattgtaactgatcacaggtgcaacacccatggaaaatccaagaaaaagcgcattaaataaaaattgggaataaagcagtatcgtgattgcggcaacaccgttttcgccggcaaggcgcagcatgatcttattgaatgcataagtgatcacggcgtttgcaatgtttgtcaccatttcggatgcaccgttaaaacttgcagcggaaaggacacttccatgaaaatgaaattttgtaaaataaagatctcccttgacaaagaaaaagtagaagagtcccacgactgccgggatgagctggccgataccggtagctaaggcggcaccctcaatgccaaagccgagaggcgataaaaatacatagtccaacacggcatttgcaataccggcactgatgactaacgtcatgccaatgtgtggttttcccgctgtcacgaagaatgtctggaacaggctctgcagcatgcacgccggggcaaataaaacaacggtaaaaagatatgccttgcagtttgcaagtaacgaatcatttgcaccgagagcgcggcagattggttctaaaaataaaatcgtcagtatcaggatgacaacactcgccacaacaccggtaaacacgagcatggaaaagttatcttttgcttcatcgtctttcccttcgcccattttctttgcgacgacggcgcttcctccggttgcgagcatgacgccgatggcgagtacgatattgatgaccggatagacgatattgactgcggacagcgcattatctccaagaaagcgcgagataaaaatcccgtccgtgattgtataacaggacatgagtaccatcatgaccatggatggtaatgcgaattttaataaagtgacaggtgtgaatttctgaccaatggactgtgccataatgggttcctcctttgaaatatttttaaatgttgtgtcagcgcagatgaaaattgcggttttgagacacaaatgctatcataaactatattgttaccatatagtcaagaacttttttcgtgaggggagattaaaagtggacaaaagtcaatatctgacaactggtgagcttgcaaagctcatgcacgtcaccaaaaacactttatttcattatgataagatcggcttgttttcgccggagatcgtgcttgataacgagtaccgttattattcgatccatcagatcgaagtgctcgaagcgatcattatgctaaaggaacttggtatgtctttaaaagagatccaggcctttttaagtgaccggactccggaaaaattattggagctgtttgaaaaagaggaacagattctggcagaaaaaatccggctgttaaaggatcgcaggcagtggatggaagaaaaaagtaaaaaaatcagggcatatttagagaaagaaaaagatgaaatatttgtctgtgaaaaaccgggcagatattatctgatggatgcatttttagacgtttcggaatcagaatttgcggagcgcacagcggaactgatcaatttttatgagaacaacagcaaaagcatctgttatgagattggttacatccagtatgcaaaagatgtcagacggcagatctatgcaaattacagcaacgtaatattgctgatgaaacataagccgggcggcatgtcctgccattttatgcctgcggggaaatatctgacaacttattttaaagggcactggagaaacatcggggaggcttaccggaaacttcttgcttatgcagatgaacatcagattacactggcggaagagttcctggaagtttacacggtggatcagctgatggcggagacggtggaggagtatgtgacggagatatcggtgcgcatctgcgggggagatatggatgaactgtgaagactgctgtttcacttaatcatagagtgttcgcagaacgtgtattttatggttggaaatatggaagattttcttaatttagacgaaggtttaacaaaaacaaaatgagataagatataataagactgccgagcgaagcgagtataaggcatatagcatgaaaaactatctgtgtatgtccattatcacaaaaaaattctcaaaaaacgcggatttaagggaaaattatgggtattttccgagcaaaattttcatatatacccaaaaggtaaaaatgaatcgtgattgaaaggaaaaatgatggaaaagaggaggcaaaatatgaaacgaacaagtgtaacacggaaaatggcattgattttagcagcgatagttcttatgacagcatcaggctgtggcaggcaggaaaatgctgataaagcagacaataatattaccatatataaaagcaatgaaaatgcagatggttttgacacagaaacggtatcgctcgatgcgcttacaccggaaaatatcatggctgcgctgatcaatgccggtgtggttccgtcggatgtgaaagtgcttgattttaaacaggaagaggataccataatgcttgatctgtcgaaaacatttgaggaatatataggtcagatgggaacagcaggggaatatgcgaccgttgggagtgtggtcaatacttatctggatgcgtatgatgctgaaac

SEQ ID NO: 5130 - DNA, 35658 bp, Unknown
  gut microbiota DNA sequence
atataaaagaaaacaggcgcaggctgtgtcattccggagtccgtcaagcatcgaccatctctgtaaatgcatgagcatgctggttttgatgcgcagaaaagagcagaccaatctgttccgcgagattgcagaaatatttgcataagaaaaccgatggttttgactacgattagtctataccatcggttcttttgttacaattttacctctgaacaataacaataaattttttcaggaaattttcaaggaggaggcagtatgataaaacgtcttcaggaagtatctggaaaatatattgaaaaaatcatcggtcaggaccggttcgcttatgcccattcggataccaatgacttttataacctgatcgaatagtcaaaatccggaggatatcagggttcagtcattctgttttttgattttgagtccggtaaagttttcaaaccgtttgcaaaaaaagaaatgtcatttacagcaatcctgtctatgcagagggtttttactattttctgcagggcgattatgacgaaaagaaaatctctctgtaccgctatattcccggaaaacttttagaaaaagagacagaacttagtacagaagaagtgagcctgtataatctttgcatcattggaaatccggtacacatcatcagtcaggaggactcctttgtatgttattatcccgaaaaaatttcttttccgataaccggtcatgaaagcgccctttttatagaagatgaaaaaatatattttgaatcctgggtggaagaaggctggaatggcaaaaatgactgtgccacagacaattatgatctttactataaagttattgtaaaagatttcagtggaaatacgctttctgaagaagttggcgatttgtatcaggcggcagacggcacctggtggatcgcatgacttccagttgctttatggataaaaattggatatttccgttacaccataaatgtgatatgggcgaaatgatatgttacttcaatcttttcatccaaaaatactgtctcattttatgaatttgtatgatattgggtgaaaacgatcctgtatcatacaaaacacccacgaatttcgatatatgtggctgtttttcaaaaaaaagttcttttaattcgcccatttgacaatattatgtcaactgctttacaaaaaaacgggcgaaacaagcatatcctgtacttgtttcgcccaacgtatttcattttgcctgacagacttcaaaaacatctgcacctttccacatacatcactccagcactttttctaactcctcgatcacgatctttaatgctttgatccttgcataccgtttatccactgactctaagatatgccagggcgcatatgtcgtactggttttctggatcatctcattgactgcatcttcatactgatcccatttttcacggttacgccagtcctcatctgtgatcttccactgcttctgcggagtgttctgtctctcattaaaacgctctaactgtgtatccttgtcgatctgcacccagaacttgatgataacagcgccccagtcgtgcagttccttttcaaattcattaatttcgttataggcacgtttccagtcattttcgctgcagaacccctcaagacgctccaccatgactctgccataccaggtgcggtcaaagatcgcgatatgtcctgtctttggcagcctcgtccagaaacgccagagataatgtctcgccttctcgtgtggctccgggcttgcgatcggatgtacttcatagcctctcggatcgagtgctccggtgatccgcttgatattgccgccctttcctgctgcatcccatccctcatatgcaatgatgaccggaacttttttgcggtacagacggttatgaagctctcctaagcggttctggagacgtttcagttcttttttatactcgtcctctccaattgtcttatccagtgggatctccgacaacaggggcattttttccatggaaaatacattctgtaaaattggcaccgccatcgcattattggcaagcgccacatcaattccttccgtcagaatctcaagtgcctgtaactccgtccatttttttgattctgcatcaatgatataccacggtgctgacggcagatttgtttcctttaaataggaatcaaatgcattcaggcatttctcataatgctcattctgccatcggtcattcctgctgacacgccatctggtatccttctccttagaaagatgttcgatccgtttttcctgttcctttttagacacctgcaaaaataatttcacgacgagataaccgttatctgtcagctggcgttcaaaccgcttgacactctcaatgcggtgcgcatatgcctcgtctccaagcttttcatgcagtctttcacccatgatctcatccatccagccggagtctaaaaagctgaacttgccgctctccggtatttttacaaagtggcggtacaaaaacggttttctcttttcttcctccgtcggtgccgccatggacgctactttaaagaatctcggatcaatgtttttaataatctgaccgatcagtgagcctttacctgcggttccccatccttccacaagcacaagcaccggcagtccgtgctcttttaccttgagctgctgctcctgcagttttctccgtgcttcctgcagccgttcctccagttttgcatctgacggacgctctgttttttcccattgttttaacatgcaaatccctcccattcttctgtcattagttttccacattcattctgaaatatcaagtattttcaattatttttcataaaataagttttctgtttattaatttcaaaaaaatgtgtcttttttcacagatttatagtatagtaaaagtagataaatgttaacgtttcacatggtttcttcacaaaagattccatgctataaggagaacgcctatgctggttacattaatacctctatttgatgaaaacataaaagtcagcgcatattctctgtatacacagaaagcaaattttctgcttcacccgaatcttttgggaagcggaagcaatgatggcgccgcccagattgaaggatttgaactgatcttaaatatgggacttgaaactctttccccggcaaaagaaatctttgttccggtaaatgaaatatcgattttttccgatattccttcccagtgtggcctgccgcacgagtttttcgtattgctgttaaaaggaaatattccatgcacaccaatgtatattgaccgtgtcaaagcgctgaaaaagatgggataccgatttgccatccgcaagcttcctgtatcaagttacgaagcttatcatgatctgctcgtactgatggattatgtcatgttagactgtgaagagattgacatcagcaaagcacgtatttatttcaataaagtttatccaaacatcaggctctgtgcttcaaatataaccaaaacagagacatttgatgcaatctgtcaggataagagctgcactttatatgagggaagtttttacagactccctgtcacaaagggaaaccatgacgtagctccgttaaagatcaattacattgaacttatgaatctggttaatacagaggactttgatctcaccaaagcggcagatatcatcggtcatgacaccgctcttgtcatctcactgcttcgcatggtcaatcatatggctgtcaactcggagatcacttccatccggcacgcagctgccatgcttggacagaaagaactgaaacgctggatcaacaccgccgttgtcaatcagttgtgttccgacaagccaaacgagcttacgcgtttatccctgttgcgtgcaaagtttgcagaaaatcttgcccctgcctttgagcttggcggcaaagcttccgaactgttcttaaccggactgttttccgtgcttgatatcatcctcgataaaccaatggaggaagcattatcccttgtcaaagtttcacgcgatatcgaagatgctctcatccgtcagagtggtatttttgcggaacctttatatttcatcaaacaatatgaggcaggtaactggtccgaagtttcccggcttatgatcctggaaaaccttgacacacagactgtgtatgatgcctatattgctgccctgaaatggtaccgtgatctgttttctgacacctacaaaaaataatctgctacctaacattttgtcataaaatgttaggctagaatgcacgctccgcgaacattctattgtcatgaataaaagccgaaagcgacacttcattccgctttcggctttcttatttttcattcattattcttatgacatcatcccggaacctgcatttttcatccggtttttctttacaactttctgtcttgtgaactcttccctctctttttcctccagataatcctgtatctcacgcgacagtttttcatacttcggaattgtaatgttcgagagtgcattcgcgcgtttctgcgtctttttgatattataggcaaggcggtatgcagaattttcaatctccgcaaggtggatcgttaattcttttactttttcaaactgctggcacgcctcatctaatgacattcttgtgtgataaaaagaatacgccagcacctgtttctttttttcatactctactttcgggatctccgtccccatgacactgcgacgtttgatacggatggagttctccaccggaaccgcttttgcaatctgttctacctgatggattcccatctggatgttggctttctgcagtgcctggtaggcattggaaaatgtctcatcgatctggttctggatatccgaagcctctgagatcaactccatcagttcccggatcaggatatttctttttttatccatcaggtcaaatccctgttttgacaatgcgagcgcattttttgccaatatgaggtttcccttcgtcggaaacgtattcggatccatgcgtcatcccctcctaatcccagtacttttcaagaatttttgtatcaatacggtctaattctccacgcggcaggatatgcagcagccgccagccgatatccagcgtttccgccatcgaacggttttcgtcttttccctgcccgataaattctttttcaaaagctgtaccaaatttcagatactgtttatcggtatcagaaagctcgtcctcgccgatgacactcgcaagatctctcgcctcgccgacacgggcataggaggaaaagagctggtttgcaagatcctgatggtcttccctggtatatttttcaccgataccgtccttcatcagacgcgacagtgacggcagtacattgatcggaggataaatatttttctggtgaagggaacgttccagtacgatctgcccctcggtgatatatccggtaagatccgggatcggatgtgtgatatcgtcattcggcattgtcaggattggaatctgtgtgacggaaccagatgcaccgtttacgatcccggctctctcataaagtgctgcaaactcactgtacagatatcccggatagcctttcctgcttgggatctctcccttctgcgccgaaacttcacgcatcgcctctgcaaacgaagtcatatcggtcagtattacaaggatatgcatatttttctcaaacgcgagatactcggcggctgtcagcgccaccttcggcgtgatcagacgctctgcaaccggatcattggagagatttaaaaacatcgcaacatggtcacttacaccacattctgcaaaacggcgcttaaaatactccgccacatcatatttgactcccatcgcggcaaacacgactgcaaacggttcgtcctcgttttcgccatccccaagactggcctgttccacaatctgggcggcaagctcatcatgcggcagaccgttgcctgaaaagatcggcagtttctgtccacggatcaaagtcgtcagtccatcgatcgcagagataccggttctgatatagtttctcggatattccctgctgcacggattcatcggctgtccgttgacgtcacgcacaacctcggcgtgcaccgcgccgagcccgtcgatcggctgccccagaccgttgaatgttcttcctaagatttcctccgacagccccacacacagcggtctgcctgttaaccttgcatgcgtatttaaaagggacatctcctccgtgctctcaaacacctgaacgaccgcatagtcattattgatctccacgatgcgccctaattttttctgttttccttccacgaccaactccacgatctcatcatagaaagcgcctcttacaccttctactgcaaccagtggtccattgatctcactcagtccaagatactcaatcgccatatcaatcctcatttctgagcagcttattcttcacacgaatctacatttttgtgttcaaccgccccttacgcattttccgccatcagatgctgataaaattcttcgatcttatcatcatacaggtttagctgctctagtttgtcatttgccacatcatatttaatggaaatgatcttctcaaatatatcactttcccgaagaagcgccatcggcatgttccggtcgatcagtgccttgcagcggtcgtaaagatgaaggatgatctccatcatgcgaagctgtttttccatcggcacataggtgtcctctttgtggaatgcattctgctgcaaaaatccaagccggatcacacgcgcaatctcaagcaccagtttctgatcgtccggaagcacatcacttccaatcagctttacgatctcattcagacgattttccatcgtcagaagattcaagatctcattccgacactgcacgaatgtcgggccaacattcgtctcataccatgccgtcagatcaggaatatactctgaataactggtcagccagttgatcgcaggataatgtcttgcataggcaagtgatttgtccagtgcgaggaaacagcgcacaaaacgcttggtattctgtgtgacaggctccgaaaaatcgcctccctgcggggacaccgccccgatgatcgtcacactgccatccgaaccgtttaaattctgcacatacccggcgcgctcataaaatgccgaaagcctcgatgccagatatgcagggaaaccttcctccgccggcatctcctcaagccttccggagagctctcttaatgcctctgcccagcgcgacgtggaatctgccatgattgctacatgataacccatgtcgcggtagtattccgctaacgtgatgccggtataaatgctcgcctcacgcgccgccaccggcatgttcgaagtatttgcgatcagcgtggtgcggtccatcagaagattgccggtctttggatcatttaattctccaaattcctccaaaacattggtcatctcatttccacgttccccacagccgatataaatgataatgtccgcatcacaccattttgcaagctggtgctgcgtcatcgtttttccggtaccaaatcctcccggcaatgccgccgtgccgccctttgcgatcgggaaaagtgtatctaagatacgctgtccggtcacaagcggccggtctgccggatatcggtctttaaccggacgcggtttgcggatcggccactcctgtgtcatggtaagtgcctttgtcccgccgtctgcagtgcgtatcgttacgatctcatcacagatcgtataatctccatccggttttaccgccgtcactgttccggatactccgggcggaagcatcacacggtgtacgatcgactttgtctccggcacctccgctatgatagaacctcctgccacctcgtcaccttcctgtacggtgatatgcgtctcccataatttctcccgatccagtgcatctgcctgcgctcccgtcgggataaacgctccgcttttttctgcgattttttgcagtggacgttcaataccatcaaagatgttatttaaaattccgggagctaattttacactgatggcacagcccgcaccggccacttcctcacccggctttaatccggatgtctcctcatatacctggatggtcgtcttttccttcgacagccggattacttccccgactaaacggtgctctccgacatataccatctcattcattttataaccaggatttccctgtatcgtgataaccggtccgttgatcccgtatatctttcctgttatacccatatctgatcctctcaaactgctctctgtttttgtgctgtctcccggcacataacagttttacatcatatccagcatatctctcccgcgtgtttcattctctctgcaaatgattcgtcgatcagaacgttctttgccggaatgactgcccgcatgccgccggaaaactcatcctcagcgatctctaccctgcatccgctcttctcttcaaggacggcctgtctctcctgatctgagggactgataaatacggtcagatcctctccctgtgcaaattcttttgccttacctatctgtgcaagcagaaatgcttcatacgcatccgtccggcggtacgataaaagcttttccttcaccatctcaaacaattcttccgtcttctgctctttgaacgcctgataatcctttttccacgccattgtctgctctgcattcctgcggtttacttcttttttctgtttttctaagaaaatgcgtcttgagcttttaagtgcatcacggcaggactgctcatgttcttccattgccgactgataaatatttttctgctcatcgagcatcgactcgctctggctgtttgcagcaccgatcgcagctccaaaaaaaacttccagtttttcattgatctccatgcatccatcccccgtttacagtttcagcccgattgcctgactgacataatccgtaataaaattcttgcttctgccgcttccatgcctgtccgggatctccacaaacagcggcgtcctccggctcagttttaaatcatttaccagttccggaaaatccctgccgagtttttctgtcagcagtacgatcccgatatccggctgtcccgtcacaaaggaaagcgcttcttcaagttcttctctctcatgcacgaccacaccctcaacaccggaaagccgcatccccgtgtatgtgtctatattgtcgctgatcaaatacatcctcatggaaatccgccatccttcccgtctcttttatcccagaatggaaaatgagatcaaaagtccatacaatgcgatagattctgccagcgcaacgaagatcagcgccttacccataatacttgaatcctcgctcagtgctccgattgctgcggatgccgcactcgcaactgctacaccggcaccgatacaggaaagtccggttgacagtgctgccgccatgtatctccatccctctgctgcggatgccgcggtatcggatgctgcatagatatgcccgctgaaaagcagcatatctgccaccacaactgttccgaaaaacagaaccaaatttaccgcaagagatgccttaaaacttttctctttcctgtttccgagcacatatcccagaaaagggatcaccatactgaaaattaaaattgccaccagtgttatttttgctgccatatctttttctcctcctatttcctgtttccggaaaatgccacaaacggctttccggttccctgataaaaacggctgaacatctcataatattcaagtcttaatacctggatccctacgacgagtccctcaagacctgtcacgacgatatttccaagtaccacaacgatccagttcggcgaaccactctcatatccggcgagcgtcagcaccactcccatcatgcccgcatggctgagcgcaaacgctccgacacggacaaaggatatactgttcgtcgcataacttaataccacatcaaacaattccacgagagattccacaaaaaacatcgccttgctctcgccttccggaaacagctttttctttcgttcaagcagatttgtaagcggttctttcaaaaggattgcaatgagcggcactccgacaaaaacagcaagaatgccggtagccggaactggtttttcaaatgcataaagtacaatgcataaaaccgcacatccgtaacacaaaatacccgcgactccgctcggactaaaaagaatccgtcccacatctttcgcacgcacggcattgatgatatttaagaccatcgcagccaggatcagaaacattccaaatccgatcgctaacatcagtgtcgtcataatgttatccatcggacgcatccacacgggctttaagatatcctcgaatccaaacacgctgccatacataaaaccgaataccgtagaccagatgcctgctaacgatagaattgctccaaggttcatgtgcctgatccggtaaaaaacaaatcctccgatcaaaaggcacagtccctgcccgacatccccgaacatgatcccgaacatcagcgtgtaggtaagcgcaataaatatggttggatccatctcctggtatgccggaagtccgtacatttccacaaacatctcaaacggcttaaacagcgcaggattctttaattttgtcggcggactgacggacatatgctcctccacatcctcctccatcacatggatctttgaatcttccgccgtctctttttctaattttctggcatcatctgcgctcatccatccatataaaatgtagtattcggtctgctctcccggctttcttccaggtgtcgtgcagactgcaaacttacgcacatcaaaattgttgcagtaatgctctaatgcggcacatgcacccgcgatctttccgccatgtttttccaaggtatcatgaagctgcttttttaacttctgctcttcctcgtcatatgcctgttttttctgcaatgcctcctgataagcactctccggtgttccatcaaaagaatccggtatatagatgcgctcaaaatgaaacgacagacacaccgcatctacttcttttgcgtagactcttggcacaaaatagccgccccacacatatgcctcgtcactgtcacattcataaaataatacatgatcggtatcatggatatagcgttcgagtttctgataatgctctcttgcgattcttccaaaacggaatgcgataaactgaaattccagaatttttttaaattcgtaatcaagccgtcgaaacggtgcgatctgatccatcaggctctgattctccatgcgttccttccgcacttcctcctgccgtttcacgatctcatctgtcagccggtatgccgcttccaccactttttccgcttccgctggctccatttttaccggcatggcatagtctgctgtcccaccgggttcgtcctttaagtgttcccacaacgcctgtgcctttgtgcatgcatccttgtagatatttgtctctgcaaacggtctcacatgaccggatatgccaaatccggatgcggcattttcaaaatgtatctcatatctgctcaggtactgctccatcacacggtcgatatcatatttcggcccggtgatatgaagcagcttcattttctctaccacttgcacccctccatcccatcatcacagtgtctaccgcaatgattcttatacttacatcgcaaagatcagatcacggatctcatacggcggtatacggtaacggattccttcaagtgccgtcgttaaaagatcgatctcgtgctctttttcatacagataacgcagaaccggtgccacggacattggatgctttttgcatattttctcatatgtccttatcatgactctctcccacgtcagttcatcctccggctctagcaccgcctgttttccacgaaaatatgtggtctgccggacaaattccacaaattgctctgcagtttccgtctctaaaagccgtttcgtctcagcagatctcaatcggtagcttaccgggatctggtgttttttcacatccgcttctcccatcgaataaaaccgctttgcacggtacatccacatcagattctgccagtcgatctctgtcccgaaaatctgttctaagatctgccttgtctccttatcggaaacctttgtgatttctttccatacttttttataataataaatatcaagtgcaaatgcataatctgcataattcttttctgctgcagattctaattcctttaacaggctttcatattccgttcctgtcaccgcctgtatcagctcctgcacactgtttgccgccatcaccgcttttaagtcaaaatctgcatgccgttcaaaaaatcctccgcttacggtgatctcccgcccgtttccctccatcgcagactgcagacagttttttatcacattgatctcatagcgtgaaaacacaaactgcaatgctcttcttggctgtacaccggaaaaccggtacagcttacagtaatccatatacagcgaatcccggatcaccgcctccacctgaccgcggtgtgccacttccccgtgccgttcaaataccggcgcataagcaggctgctcccgcaaaaaagcaataaagtctgtcacagactcatattcagaaattgccgtataatcatccgcaccaagcagtcttgcacgcatcgcttttgtctttgtcacaagaccactgtgctctaacagtcctcctgccatcttcttcccccattccgtcacgctgctttttcttctctgccacccgccacgcacacatcagggacttataatgctctcaaaaatctcctccgcaagagaatccttcttctgcgcaaaatcctcttctaaccgtctttttgccgcttcataatgttctctctgccgtgtaattttagtctcagcttcggataaaagctgctgttttatctcttcttcctgtttttgtctcatggaagtatatcgtccatccatctcacgtttatcaaattctaactgttttaacatcttttctttttctgcagctgcctccgtcagaattgactctgccttcttttcgatctcatcaagtttcgtaatgatctcattcatgaataacccccgtatcctttctgctgtctattacgttccccaaaaattactgatatattaattatattcatttcttaatctgatagcaaggcattatttccgctattttttcagtcaatatgtaaaacagactctttttttcgacacaaaagaaggatcagccaacgtacctcattccattgactgatccttcttttgtatcattcatacaatatttacttttttgttccgctatgcttctgcagacctttgtattctggctgtaatatctcttacctctgccataatagccacatacatttcatgctctaatcccactggcgacatatgcgggcactcctgtttcatgcgatatgcctgtactaaaagtccccttttcatgtcttcgagttccaaaagctgctctctgctcataacgcctctccatctcctgctcttattctatactgtcatctctgacctacctgaatatgatagatcttttgtcataagtataaccagatgccgtgcacgcacctatgacataatagcatatctggtaaaatttaggacctcaacttgttcggcaatttcaccaaattttaaagatggattttcctgttttgcctatttacaaactatcttttattcatttgttacaacgccatcagcgtttgcagcgcctcttttttaacaatacaatctccgtgttcacggatataggaaatttgtcctatctctgaaattctgcccgcatcgtactcgactgcaccgaatgcaaacgccctcatttcgtccctcgagaacttcgaaaagtccatgatcagatagtatgcaccctctaaccggtaaaggctgctctttggaaaaatctcctcaaaacaagctcttcccatgcgtgatgcctcatccaaatcaaagaacctgagtgcgcagatcatctgccgttttttcagctctttctgttgttttgatggcttctttttattttctttttcctgtttctcttctgctactctctgttcctgtgtgtccttcttctggtctaagaatgcgtctaacactccctgacgttcttctttgctcaggtttctaaactcctgcattttctccggtgtcatctgcccaaccagatccgaaatcgcatccatcagctgctgaaaactcagatcggaatctccgccaaatgtgattgccatgctgtgatcggaaagcagctctgcttttaccatcggagaaatattttcaaggctgatattctcctgttcctccacgatttttaaaacaacacgcataaacttctgtgttgcttctccattgccaatgatctcatcaatatcaaatcccatctcccggatctcgtcctcggtcaaggcacatctgattttattttctcctacgcgctttatttccatgtcgtattccccattcgtatctcatatgtaaattttattactattatcctatttttttcgttgtttgtaaagtttagtttactgcatctgcagcttcacttttacaatgcgctccacagattcgtcgatgcgttcctccgaaatcgttccatcctgtaccgcctgaagcagtccattatatgctgtctcataatcctgcggcattaagatcatatccacgcctgcattgactgccatgactgctgcctggtctgccgtgtagtttccggtaactgcacccatattcatggcatccgtgatcacgatcccctgatagccaagctgctcccgcagcacattactcaccatcatctgtgacagggatgccggtgtgttatccccgactacctgtggaacggaaatgtgtccgaccatcacaaacgatacaccgttttccaccgctttctggaatggaacaagttccgtctgcatcaattcttctaaggacttgtccaacgtcaccgctccatcatgggaatccccggagacacctccctgacctggaaaatgttttactgcgccgaaaacgccctgactgcttagtccctcaagttcttttatgaccatatctgccaccatagacgcatcggaaccaaacgatctggttccgatcgctgtattacccggattggtgagaacatctgctaccggcgcatagtccacattaaagccaagctgttttaaataggttccgatcgtaacgccggcatcgtatgctttctgcgcatcaccagccgcaccgatatcactcatgtttccaacatttgtcacgccaaatgcttcatttgccgctactcttgcaaccgttccgccttcctcgtccacacttaagaatgccggcagtcccgtccgctccattgcaatgttctgcatattggtaagcatttctgtcgtctgttctgtactgagaagattgtctgccatatagatcagacctccgaccggtctgctttcatatgctgttttggtcgtatctccggccgccgtcacactggtatatcccgtcagcgcttccggtgttatgacaaacatctgcgccaccttatcctctaaggccatccctgatacaatctgcgctgcctgctcatctaacgggtccacggcaggttctgccacgtcacttccattctgtgatgtctgtgtatcatctgaaatttccgtgctctgtgtgtccggtgtctttacttcctttgtgccctttggcaaaaacttatgcagggcagctgccgccccaatgatcattactgccaagaccagtacaaatacggtaaccaccactgctgcatgtttgaactcatcctgtcttttctgccttctttcttcctgattcatatcttctccattctaacaaaatctgtaaccaaaattcacttttcacaaactcaccgccattataacagatgtcattctcacggtgcaacccacgcctcatcaattccatcctgtttccactggttctgttcctcggaatatccatttaccagcaaatactgatatttactgactgtttttaaagcatcatatacatagcgcagcggtatataattccgatttccatccggatccgccgggtctgcaagaaacacttcatcggtatcttccttataaagactgatatttacataatgaccacccgtctttttccagtaagtattgtcatcatggctgctgaccaaaacaactacactctttgcagatttgacctgatcccgaaaagtttcgtaatcctgcggctttgtgtatagctccgcatcaaatccacatttgcgcatgacagttttcatatcgccccagccgatcgcaccgatctttttcgtcggtgtgtaaccggagacctctcttgcatacaaaaacatgtcccacggcgaacaggtatgacctgaaaatgtactgtatatatttgccatacagcacaatccgcacccgaaattgccaaaataattgccgcgcacatactgattgctccattcaccggaccatgcccgtccctctccccaggactttggtccctgtaaaaatgaataaacatccgactcatcaaaatatccccggtttgcggcagccaccagaatgtccttatttttttcgatcacggcatactcttccccgtctaattttgtaaaaatcccggcatacagtctgactgccggcacatactccggttcggcgactgccttctctgccaccgctcccatctctttcgcattttgctgcacagacttttcaccggaaccatacgctcctgcgatcagcagaaatgttccggctaacactgcataaaatgcgtactcctttcttttctgacgacccaaatatccaatcctcccaattctgaactgttttatatcgtaaaatatcttatcccattttcgtacgaaacttctctgtattatgttaccctgtaagaagtcttaattcaagcaaagattttcttaaattatttactttactactcgttttttttcggctacaataaagcggtatcctgtaatgatgttacaagcatctgcaggcactattattttgaaaagaggtacgcaattatggcaaatccaatcgttacgattgaaatggaaaatggcgatatcatgaaagcggaactgtatccggaaatcgccccgaatactgtcaacaacttcatcagtttaattaaaagcggttattatgacggactgatcttccaccgcgtgatcaaaggattcatgatccagggcggatgcccggacggaaccggcatgggtggacctggctatgacatcaaaggtgagttttcccagaacggtttcaaaaatgacctgaaacacacagagggcgttttatccatggcaagagctatgcatccggattccgccggcagccagttcttcatcatgcacaaaacttctccacatttagatggagcttatgcggctttcggcaagatcactgagggaatggatatcgtaaataagattgcagagacagcaactgattacagtgacagaccattagagccacagcgcatgaaaactgttaccgttgaaactttcggtgtagattatccggaaccggagaaatgctaatcattctattgtcataaacaaagaagtgtatgtcgggaatcaccgaacatacacttcttttgttataacttatatttttcactgtttcaggatctcgtccccacagctatttcttcttatttcaaaggaaccagtttctcttttccgcccatgtacggctgtaatgccttcggtacattgacgcttccgtcctcatttaagttgttctctaaaaatgcgatcaacattctaggcggtgcaacaaccgtgttgtttaaggtatgtgcaaaatatttgttcccatcggaacctttcacacggatctttaaacgtcttgcctgtgcatctcctaagttcgagcagcttccgacctcaaagtatttcttctgtcttggagaccatgcctcaacatcacaggattttacctttaagtcagcaaggtcaccggagcagcactctaaagtacgaaccgggatatccagactgcggaataagtctaccgtgttctgccataatttatcataccacgtcttagattcttccggtttgcagaccacgatcatctcctgtttctcgaactggtggatacggtatacaccacgctcctcgataccgtgtgcacctttctctttacggaaacatggagagtaggaagtcagtgtgtatggaagtttttcttcgtcgttaatcgtgtcgatgaatttaccgatcatggaatgttcggaagtaccgatcagatagagatcctcgccctcgatcttgtacatcatcgcatccatctcgtcaaagctcataacgcccgtaacaacgttgcttcggatcataaacggcggaatgacataagtaaatccacggtcgatcatgaaatcacgcgcataggaaatcactgcggaatgaaggcgcgcgatatcacccatcagataatagaaaccgtttcctgcaacttttcctgccgcatcaagatcaataccattgaaacgctccatgatgtctgtgtgatatgggatttcgaaatccggtacgaccggatcgccgaatttttcgatctctacattgcagctgtcatcttttccgatcggtacggacggatcgatgatgttcgggatcgtcatcatgatcctggttactttctcctgcagttctttttcctgctcctctaactctgcaagacgtgctgcattggcatttacctgtgcctttactgcctctgcctcatcttttttaccctgtcccattaactgtccgatctgttttgacagtttatttctgcttgcacgcagatcgtctgcttcctgctgtacggctcttgcctttgcatcaagttcaattacctcatctactaacggaagtttgtgatcctgaaacttatttttaatgttctgttttacaacttccggattctctcttaaaaattttaaatcgatcatcgttctcctctttctgcggaacctgccgcttctttttgtaaatttctgattttgccggacagcaaatctctgtctgacatttttcctgataacacaaaaagccttccgccctgtgtgccatcctgcacatgggacgaaaggctataaatcactcttccgcgttgccacccatcttgtcactgcagcattcttatccaaagctttttgtggaaatccttttgcaatgacctctcgattcgtatgctatgggatacgaccccgtgactttcatcactgactccggaagtggaaaggcattttcctgtaccggttctcaccatccaccggctctctgaaacattcctgctgccgcagcttccatcactgccaatttctgacgttattatacactcattatttccgtaatgcaagtctaatataccctgattttttcttccagctctattgcacgctgtgcccaggtatgcttttctgctgtcttttccactccccgcatggcaatgtctctcatctgcttttcatctgccagcaggtctttgacttttaccgggagctgctctaaatgcttcagatcataataggaaacaccctcaccctcttttaactcttcactgaggtaccggctggtatccgagacacagactgccccgtttaaaatggaattaaacacacggtcatgcgcaccgtccttaaaccacggcatcacattgaccgagatctttgcgtgcgaaagctgctctaagcaagtcagggaatcagtctgcggatggatcctcacattctgcatggcagaacattcaagttcctcccagccttttccaatgacatccacggtgattcccgcctctgccagtgtctttatgaccattccgcgccagtagttgcggacatacagatcaatgaagatcatcttgtgcatcacaagccggaaatcatccggtgcaacttctcccatctcccgctcacagtggcgcagtgctgcctcctcaactgtctggtccgtcttttctaataattcctcaatgatcccgcggtaaaacgccgcatactcatcattgatccagttgatatgctgttcaaaaaacgaaggcggtgtataatttccggtcatgatcacatcgatatcccgtttttcataaggtacctcaagtgccccgtcaagcccggttcccgctaacggaagaaagccaaaactttgatattcgggataatattttaagaaatatgcctcctgtttccggtcaatgctgatgtgatgatatcctttaggcagatcatgcaggcggttatcgtaatagtaaggatgatccgccgctatattgtaacacgggatcttatactcatcccacacataaccgcttttttcactgtaaacgccatcttccttttcgagtccctgaaaattgaacgtgatcatcacggtctcaccgggttttataaattttctcagccttttggcacttcccttttcatctttcaggttgtagaagaacactgcatatcccatttttacaaactgttctgccatctgttttgagaaatatgcgagcgtctccacgcccccttcaaacatcacgatttttttcacgttaatctccatttcagatctgcaccgctgtcaaagtgcttattcgtggcgcaatgcgtcgatcggatttaagtttgccgccttataggacgggaaaactccgaatacgataccgatgaccatggaaaacagtacagaaccgatcgctgccggaatactgatcgcaaccggcatcgttgtcacataggaaatgatctccgctaatataatacctacgatcacaccaagcacaccgcctaaactcgtaagcaccgctgcctccgtcaaaaactgattcaggatttttgactttcttgcaccgatcgccttttttaatccaatttcctgtgtacgctccgtgacggataccagcatgatattcatgacaccgataccaccgacgatcagggaaattcccgcaatccagatcagcatcgtattagtggaactgctgagttcctgaatctgctgtgcctgctctaacaggtcttttgctttgtactggatcgtatcatctttgggtgacagataattattgagcacatctgcacatgcttttcctgcggatgtcatattatcggtactgtccacacggatcacaacattctgcggttcatcatactgatagatgatcggccaggtcgtatttggaatataaatagaacctgccgtatcctgtgcataggtataataatcatcaatggaattgatgaccggctcgaacaccttcgcctttgtcacgattccaattaccgtataaggctctttctggatctcgatcgtatttccgaccgaatcttctccctggaacagggcatttgcggaatccgtatccaatatagctactttcttatactttttgaaatcctcatccgtaaaagcacgtccctctttcataatgtaattgcaggtatcaaaatagctgttgtcgattccgcgcacatatccaccggaaaaagccgtatttaaatgatacactccgctgtaatcctgtctgcttaagtatgcagatgcattctctacatgatcgagatctttgatgtcactcatgacctcatccgttacaagcggcactccctgcggcactccgttgtaatccatctcgtattcccactcgccctgataaagagacacttccactgtattctctccggagccgatcaggttttctttgatctgttcattcgttcctttgatcgtcgatacgatcgcaatgatcgctgcgatacctatgataattccaagcatggtcagaaaggaacgcatcttgtgggaccagattccctgaaaagataatcttatattctcaaacatcctgttcctcctgattaatattcaatactttcatcctctgttactgctgctccctcgactgctgtctttccataagggaaggcgatcctgtcatcctctgtcagtcctgatttgatctcaactgcagtaccatatactgtttttccggttacaacatattgttttttcagatgatcactctcatccgcgatcataacatatgattttccatcttcctgtctcacatatgccttatcaaggtaaattccgcctgtttctgactgatttgtctgaattgcaagatccacatattctccatttttcagtgcagaactgtcttccatatatgcagtatactgataataagaaacattcggatttccttctccccaggaattgccactcacaggataatccgatacgctcgttacggttgcctcaaatgtcattcctgattcccatgaatttgcggtaacaaccgttcccggtttgacttcatctaacaaaagttcgctgatcgtaccgctcacgtacagtccgtcatccccggttaccacaagaaaggcattcccatcatcctgtttctgatccggatctcccacagatttcacaacaccatcaagttttgcataaaccacaccatcattgatgctgtcctgtaacgtttccagctccagttttaacttgcgaagctgtatatccagtttttttacttctgattctttgtcattgattgcctctgcaagttctttttcggtatatccttccggctcttcccagtcatcttcatcgttccagttatcttcattctcaagttcatccagataatcctgaagactttttccaacttcttctcctgaaaaaacataccaggaccggcttttatcatagtccataggcatggtacttccatcgacatcttttacattcggtgaaatactgtcatctgccacaggctcatatttctgtactgtaacttcttttgtgtcaccattcgactcagtactgtcatccaccacttcatctcctgtttccacactttcaaacaccattttcccatcgctgtcttttttgcagataataaactttacatattttccatccgtataggtgccatctgattttttctgcggccgcagcgaattgtaaaaacttccatatgcaaaaacatctttattacaataataaatgtaaggattctctgctgtcccatctgccgtgtctttattatatggctccgaatcttccgtcacataattataaatgcggttatccttcgcatccttttccggcagtgactctatgtaggctttcttctgctctaattcctgcagctttttatttatgtacgaggatgcagtactggcagtagaaggccgtgtcttatccaccggttttgtgttttttaatgactctaaagaatgctgtgccttcgcaagactgttttctgttgtactgatctcaaggtttttcctctggatatcgatctctgcctccgatgtatcatactggatcagcggatctccctctttcactgtatcgccttttgaaacataaacctcctgcactttgttggaatcatctaaatatacttcctgggaagaatcattcgtcacaacaccatagcttgtttcagagttcccataatatccatagtttaaactggaaacagactgtacttctgccaccagattcttcttctgatacgacttataaccataaattcctccggtgactgcaccaacagtgacggcaagtacgacaatgactgcgattactttttttaatttcatgatgcatcctccttttcatcgccctcaaaaatctccccgtcaatgattttcaccatgcgttttgcattggatgcgatatgcggatcatgtgtgatcataacgatcgtaacaccctcttcattgagtttctggaacagttccatgatctgctctcctgacttggaatcaagtgctccggtaggttcatccgcaagtaagatctttggattattgaccattgctctcgcaatcgcaaccctctgtttttgtccaccggaaagctgcgtcggacgaaagtccaccctgtcaccaagtccgacacgttccagtgctttgattgcacgctccctgcgctccttttttttcacgccggcataactaagcggcagtgatacattttccaccgcagtctctctcggcatcagatgaaaactctgaaatacaaacccgatactgcgcagtcttaaatctgacagctgcttgtcttttaactttaagacgtcctctcctgccagctcataagtcccgctcgtcggcttatccagacagcctatgatattcataagtgttgtctttccggaaccggacggtcccatgatcgcaacatactctccctcttccacggtaaggcagacatcttttaataccggaacgaccagcttatcctgctgataatccttgtaaatattctgcagattcagtatcattcccctacctccatatcattggaatcatcataggaatcatcagaatcctcatagtcagaatcatcgtaatcagagtcatcatattccgcatcatccgcagaatcgccatcgtcagctccatcataacctgatccatcttccatatcgccatttacataattctgcataccattatcgatcatcatttccgtatcgtacattccgttttcatacatcatctccgtaccgtaatcaagcatctcagtgccataatcaagcatctcggtgccatcctgattataaagaggcgaagaataatcgacctcgctcacatctgtcacggtcgttacaccctcatagagtccttccatcggccatgtgatatagtcgtccagcgaaagtccggataaaatctcatactctgcaagatcttcatcgtattcaccaagttctacataacgtttttccagacgtttcttatcatttgccgcccagacataagcaccgctgtcatcctgaacaacatagttggaatacagccagattccttctttctgctgatcgtcctgaccttcatcaagttcaatataaacatgctgccctaacaacagtccctctgcagacggaagctctacgtaaaacggatattttgttgcagagacactactgtctgaagatgaatcgtcatcacttttctgcacgttatctgtatcaatctttgaaatcgttccattccatgtctgactttcatccaccctcgaacgtatgatgaccgcctgtccatctgagatcatccatacattctgctcatcgatacttccttttacacggtattcacctgtctgaagaattgtcataaacgcagcattattgccattactgtctgtaccgttctcgttgatttcctttaccacgccggattttttgctgacaacagacgatgcatcgatctggtcttcatattttgatatttcaaggttcttgctctcaagatcaagtttattttcctcgatggaattttcctccgactgaatatcggttgtcagggaaaatttatcatcctcatctgtagtcttgtttaattcatccgtcagcgttgctatctttttattggaactgtcgatttcattctggatcccctcgagttcaagctttgcctgttttacctgcatctcaagctcactggtatcataggtgacaagtgtctgcccctcttctacctcatcccccacttttacaagaatctctttgatggtacgtgacgaatccacatttacctcataactgtcctgtgactccacaacaccattataccggttggtgtttcctgtatatgtattcataatcttggaaactttttcaacatacactttatcatccgattttcccgactgtaaaaacggaatcttctctgcaactacatcaaatgcctctgttgccacatctatcacattgtcacgataataataaccggttcctccaactgctccaatcactgcaatggttacaaccgggataattatttttttcttttccatagttcctccttaaatgtccactgtctgcatcctgctcatcagacatcccgtattatagcatttttcctacttaatatatagatgaatattattaattcttttttaaatcaaaaaatgtttttttctccaaaatgcatgattttcagctttcattataactatttcaaaaaatttgttgacaaatcctgtttcccatagtatgatatcgaatgtatctgacagacagatacaaaacaatttacatatgcgcgagtggctcagttggtggagcacgaccttgccaaggtcggggccgcgggttcgagtcccgtctcgcgctcttctcttaatgatgggaaactttggtttacaaggttttccatttttttattgcaatgtaaaaattaattacacttttttactgatcacacagtgctttttcaaagctttcctgcgaatttgtgagtggggtttccgtttaaatttactctgctttcactctgatccacacataacagacatccaccagatgaacgggctaaatttccatctttcaaaccactttcacccattattttctattttcagcttcttcctctatcattttgggcgaaactccttcatttctgctgttttcaccctgactttttgattttcgtgggctattataatgaaatctcatcctttttcacccattttcttgtatgttaaatgaatttctattataaaatggatgaaatcacctctatcttctatatatttcgcccatattaaatttttatctcatccaagagcaaataatagaatgcgcgctccgtgaacattctattatcatgaataagaaaaaagatccagtaaaaactgaatcttttttcaatgccggcaatgggacttgaacccatacgatgttgccaccgccagattttgagtctggtgcgtctgccattccgccacgccggcttattctgttttcgaattgctcgaacaatagacatcttatcatatcatgaaataaattgcaagcaattttattttaacatttgctgatatcatataaagaatttcatacaatgctattttaacatttgttgatatcatgcaaaaaatttcatacaatggtatttcctgattgtagcaaaaaaatccgaaggttcacgttaatccttcggatttttttgatagtcactactcttcaccaactccactgattgcagttctctgtacgcttttgacaccgttctccacagtcgttgtttcaagataagtaacgccattgatcacaactgtctttgttgttgtggtctcatcatcgctgtctccaccgcctccggtatttccagccgcaccggttccagatgcctgtgtggtctgtccggatgttcctgttccggatgtctgtcctgcgttttctgagtaactctgggactgaccagcttctgcttttgttttctggatttcttttaagatatcattataattttcacttggcattactgcatcggaacttccgatcgtcgatacataactgtctgcatctttgccgtctgcatcctgtatagaaacattctgtgatgctgtctgattttttaatcactcagatacttctccacagtaactcagatattcatcaattctcagtgacacccctgctgttttttctaaacaatttctaaataaatattccgttgcttttatcacagcctcagattctgaaatgccccaaacacatcgagtgtcccatatccccactctctgtttggataggtccggttttccggtttagccgtgccgcggatcagcatatttttgatggaagtattcgccatgactgtattgttctgatccacgatcgcccactgcatgatctgcgcgcaggctcctgccgtgatcgcagcagctgcacttgttcccgtaaaggtgataaagttaccaagaagcccgggaccatagacatccactgccggtgccacaaaatccggtttgatctccccggttatcgtataacccctgccggaatccgcatagatactggtatttgatgcctgataaccgcccaccgtgatcacctgccttgccgcactcggagaagtcagtgtaatctccggattggaacgaagaaaaaaattatttccatccgtcagctcccgcagcggcagccagagatgatagtttcccgtcactgtcagctgcgggaaaatgcgtatcgtccacaatccaggtgtcggtcggataaaacggaaaaatatgagctggcttgccgtctcttttgtatcgatccggtaatccaccgtaattgttgttccctcaaaaataaaattaaactgctctgacgctccacggcgcaccagaatccgtggaatctgctcccccgaaggcgatattatggtgactgcatacagttccggtgcagatgcccacaattccacaaaaaagccttttgtattttcctccaccgtgatctccgcatcctcatgttccatctctccaatgatacgcccctgaaaatgatgtcttgcattggcttcatttccagttgcagtcacgaccacacgctttcttcttccacagatataattcagataagatggcagaaatccctcgcttgcatgacttcctgcactgtttccaagtgccacacagatgacaagcggacgatttaaaatatttgcaactccatttaaataggaaaccgccatcataatgtcgttttcctgatatgccggaacgccgtctttcacaaaaaagaaatcccgaagatactgttttgcctcctttaactttaccatgatgatctcagactgcggcgccgccccgataaagtcaccgttttcactctcacttccacatgccactcctgcaagaaatgtgccatgtccgttcatatcacgcgacggcaccaaatcatacggattttccgaaagcaatgccgcattgatctgttctcttgtataatctgctccatacaaaataccaacaggcggcgttccatcctgtatggtctgatcccagatacggacgatccggctgctcccgtcactgtatcgaaatgccggatttgtataatcaataccggtatcaataaaacctatcaatacacctcttccctttaaggcgagaacgggctggttctgcatttttaaaataccggacacctcaagtgcagtctgatccaacagcccataacactttggaatctctgaataagaataactgcctacactaagcggaggcagtccctcccttggataataaaaaatatcatatccttcatcaattctctggatacacgcccctgcgatcgtctgttcattcgtttcctcataagatacaataaaatcaaaaaattcgtcagaatacacctgttccctgcaatccgccataaataaaaaaactccggtcatctattcaattactaaatagatgccggaattttttattttagaaccacaaatattattctaattcgaatttctgtacaagttcatttaatgtaactgactgtgctgccagctcctcacttgttgctgaagtctcctctgccatagcagagttatcagaaaccacctgtgacatatccctgatgccgtcacggatctggtcgatactcttcatctggacatctgccacctgtgctgtctcctgaatcattccgtttgcaatacgaacacgctctaccgcgttgtccaaagatgcaatgacatcatttacgatcgtatttcccttttcaatctcatcgagtgatacgttgatcaggttacgtgtcgtatttaccgcatcggcactctcatctgcaagaccgccgatctctcctgcaaccactgcaaagcctttgcccgcctcacctgcgcgtgcagcttcaatagatgcattcaatgataaaagatttgtctggcttgcaatatctttaattgccttgatgacaccgacaacctgtttcgaggattcctgaattttgtccattgcctcacgcatctgtgccatctgcttcttgctgtcttccattttttgttcaccgtttaccttatatttcaaaagctgttctgactgattgctgatcgcagtgcttacactgtctgaaatattcatatcctgaatcatagtatcaatcagatctgcattcggatgatatacaaaagttccatcacttgtcaacagcatggaatatccatttgcaccgatcgtataattccccatcatattcatgactgtgtccagccctacgtctattccaacgacaccgacaaccgtatctttctcgtcaaatacaggtgttaccgcacttaagattatttttcctgtacttgcagcaacataggtctttgtcagcatagtttctcctgtctgcgtacagagctgtaccatgtgcgggtcgtacagtcataatcatcgccggaaataccgcctgctgatgtaatggatgcattactgtccaaatctgccgtgaatacaccctgaatattttccgtgtcaagtcctgccactgcgacaagcttctttagtaccgccgggtatacctcattctctgtccagctttggtagtggtcagaattgtctgcacatcttcatccagggcaagctgttccaccatgcgctcaaacggtaaaaaatatttttccacctgaagagatattgcttcagaatcctgccgcagctctgtgttgttggctttgatcagcagattgtaaaccaccactactaccagcacagcaatcactgccctaaccacaataatggaggcaccgatcttgctctggatctgaaactgtatgccctgtttgtttcctgcttttttatttttttcttttttctcttttctcttttgccattttcactcctccattttttcgattagtactattgtaccatacttaatcatagtgtgaacacttttttaccatattcttcaaattcaaaatgaggaaaaatctttttctcagtctgtaaaaaagatttttccccatttcagaatcattctttcatcgtctcattcaacagcagcaatctgtgcacagcctcgcatggtaatgagtggtccgccctttttctccacatactcttttgtaatggtcaccatgccgatattgtcatctttcggaatctcatacatgatatcgagcataaaatcctcgatgatcgcacggagtgcacgcgcaccgactttcttttcctttgcctgctttgcgatcgccatcagtgcgtcatcctcaaattcgagtctgacttcatccatggcaagcagtttctggtactgttttaagatcgcatttttcggttcctttaagatgcgcactaacatatcttctgtgagcgcttctaaggtaaacatgatcggcagacgtcctaagaactccggtatcatgccaaatttgcgcacatcctctatggtcaccttctgcagaatattttcatcctggtcgtatttatccttaagctcggatttaaaaccgatcgatgcggatttattgaggcgttccttaatgatatcctctaactccgggaacgcgcctccacagataaacagaatatttttggtgttgaccatcgtcatgggtaccatggcattcttgctgctggctccgacagggacttctacctccgcaccctctaacagttttaacattccctgctgcacggactctccgctgacatcacgctgattggtgttgcgtttctttgcgattttgtcgatctcatcaataaagataataccgtgttccgcgcgctcaacatcattgtccgctgctgcaagcagtttgctgacaacactctcgatgtcatcaccgatataccctgcctctgtcagggacgtcgcatctgtgatggcaagcggcacatctaaaagctttgcaagtgtctttaccagataagtcttaccggaaccggtcggtccaatcattaacatattggacttttcaatctcgatgccgtccttctcatcggatgcgatcctcttatagtgattataaacagcgacggacatgactttctttgcatgctcctgtcccactacgtactcatccaacgatgccttgattttatgtggtgccgggatctttttgatatcaagtaccggctctttcttttctttcggctttttctttttgattttctggttattcggaataaatccctgcatcccctgcagatctgagagattgatcatgctgatatttggcatttttcccatattcatgttcagcatatcatccattgaaaatccggtctgattcatactgtcaaacgttttctgcatacagtcctgacagatacagatgttgttcgggatctttatcatctttcctgcaatatgctccggtctgcggcagatgtagcagatatcttcatactccggctctttctcatccgatacatctgaatttgtcacttccgcctgcacggtctccttttcattttctgacacgtcaggggtatcattgacgctttcctgtccgttcatttcctctttctgatctgtggatacggttgttacatcatcctcagttatttctctataatcattattattcatctgaatacgctcctgaatttttccatatctctgcccaaagcagacttatttaagacattgtaccgcaaaacatctgcaatcacaagaaaatcagaaagatttcatttttatttaaggatttttgacacaaaaaatccgggcagccctttcacaaaaaggccatacccggaaatttctcatccgttatcttgcactgttatccgttgtgttaccgttattattgtttcctgtcgcgtcatccacgccgttttccacaccgtcaataatgtctttgccagcatcgccgacgccatccaccacatcatccacaacagcaccaccgtctgtgtctgcaccattcgcgtttgtgttatttgtatttgtgccgttcgtatccgtgtcattcacggtaccatttgttccattcacattggtatcattcataccattttcggtattattgataccgttatttgtgttttcattgacacggttttctgtaccggctgccggattgttaccactgttattggtatttgtgttgtttctgtttgtgccgcatgcggtcagtgcgctaagagacaatgtaagcaccaggcatgccgcaagcattttaaactttttcatggtcattcttctcctttactttacaagaaattatttgtaacggttcaaaaactctctgaaccatcaccttttcaaggatagtatgaccatctctgctattttctataccagcctaattccatggataattcttcctgtacttttctgacatccacagataactcctccacccgttctcgcgtcatccggctggtcggtccggaaatactgaatgcatattttacttcattatgataatccctaaggcttgcagcaatacaccgtacaccttcttcattttcctcatcatcaagtgcataaccgttcttttttgcttcttttaatacactaagcatatcatcataatccgtgatcgtatgctccgtctttttttcgatgatgctctcattccagatctgtttcacttccgactccggaagttctgccatgattgccttgcccacaccggaacaatacatcggatggaccatccccacatgggacaccatgcggatcgtaccgatttttgcttctattttataaatatataaaatattgtttccttcccgctgaactaaatgcactgtttccccgctgatatcagacaaacgctccatataaggttttgcaacctgtaaaatatccatgcggtcaagcatttttcctgccatgctgactattttataagaaagcatatacttctgggatacctcgtcctgttttgcatatcccatatagactaaagacatcagaaggcgatgtaccgtgcttttgtgaagtcctaacgctgtgctgatctccatcagtcccatctcaccgtgatcggccagcatttccattacctgaaaaatgcgctctgccgactgcaccggattttttgtttctttctgttctgccataattacctcatattctatgtaaggtatcagttatttttccaatacctgtcttttaggtttcataattcacattattgtttcattatatgaaaccatatgacatcataacatgaccttccaataaaagtcaaatttttgttttttgcaaaatacaacattttctttccctaaattattgacaaggcattttgtaatgttataatactattgtaccgttgtacgaaacaatgtttcatattacgaaaccattttaagaaccttaaaattattcaaaataaaggagaagaattatgaacaaagtattagaagagttttccaaaatcggtattatcccggttatcgcacttgacaatgtagaggatgctgcacctttagcaaaagcattatgcgacggtggtctcccatgtgcagaagttactttccgtacagcagctgctgaggaatctatccgcatcatgtccgagcagttcccggagatgttagtaggtgcaggtactgttcttaccacagagcaggttgaccgcgctgtaaacgcaggtgcaaaattcatcgtaagccctggtttaaatccaaaagttgtaaaatactgtgttgaaaaaggaatcccggtaactcctggatgctctaacccaagcgacgtagaagttgcaatcgagcttggtcttgacgttgtgaaattcttcccggcagaagctgcaggcggactttccatgatcaaatccatggcagctccttacacaaagatgaaattcatgccgaccggcggtatcaacgcaaagaacttaacaagctaccttgatttcaaaaagatcatcgcatgcggtggttcctggatggtaaacaaagacatgatcgctgcaaaagactgggatggcattacagctttaacaaaagaggctgtttctaccatgttaggattcaaactgttacatgtaggtgttaacaacgcttctgaggaagtagctgctgcagagtctgcaaaattcgccaccttacttggcgagaatgtaaaagttggaaacagctccatgttcgtaggttctttaattgaaatgatgaagaatccgggacgcggaaccaatggtcatatctgcattcagaccaactacttagaccgcgcgatttatcatcttgaaaaacgtggttttgtatttgacgaatcttctttcaaatacaatgacaaaggtgagcttactgttgcttacttaaaagacgagatcgcaggtttcgctgttcacttcaaccagaaataatttaaaaaaatcaggtctgcaccggtcgatgatttgtgcagacctttttttcaatattaaataataaaaaaacagacacgggaggtttcttatggatcagaattgtgcatattgtatggagggcgaattagtcgcccagtttggtattaaaatctgtgaactgccaagttcaaaagtttatcttttcaaggagcagagccacaaaggccgtgtgatcgtcgctcacaaaaaacatgtcagtgagatcactgaactgaccgctgaggaacgcgccgcttacattgaagatattaatcatgtggcagaagcacttcacaaggcatttcatccgcagaaagtcaactacggtgcttacggtgataccggccatcatctccacttccatctcgttccaaaatatacagacggttacgagtggggcggcacttttgccatgaatccgggcgaaaaatttctttccgatgaggaatatgccgcattgatcgaagagatcaaaaaatatttataatatctatttcttcatcttaggctgaaaaataatacttgccagatatgcgaagatcagtgccgctgaaataccagcggcacttgcttttaagccgcctaaaaagatcccaagaagaccatattcatctactgcttctttcacacccttaaacagggtatttccaaatccaagcaacg

SEQ ID NO: 5131 - DNA, 53962 bp, Unknown
  gut microbiota DNA sequence
ctgactgccacgcatccacaaaatatattccatttcttctttttacaatatctgtacgcagtccatccagattgctgaccgctacctccgtctccgaattttccagtgtaaacgcaaattccgtgaaatttttcttatactgctctccggcaactttacaggccgccacccagcaccagtttgttctgttctgaatatacttcattgatttttctccatcctcgtcactgtcgtagcattataagtagatccttccaccattgtttcatctttttcaaatcttgtaaaatagtaaacctcattatatggtgccctccctgtaatacaggatgccagacaccgcttctaccggctcatcataagcagccttaccctccgcctttttatcgattccagtcagacattgttcctggaaaatcccatatacctatcttctctccagtgagtagaatgcgccctccatcagcagcagtacctgtccatccgcagatacgatcactgtcgccggattgtatctgtcgctttctccgtctttaaatttggcaaacaattttatatagacaactgggtattccacaaaaaaactttccgacagtgtcgttgtatcactgtaaatgggatactcgtcatttattctttctgtgcttaaaatgatagaaaacgggctttcatagccattgacacggattgtgtatccatcttcatattcttccaccggttgtacttcaacgctgatatccggtacaggactctcctctgctgctcggaccgcctcgtgatattccccgaaaaacgtttcccgtgcttcctcgtccgcataagtattcggctcaaacttgcgcagattatacgggagaacatagcccatatatgtatccgtcgtccatgttccttttagcggagctatcatggcatctgtctcttccaaactccaccggttgttaattctttccgtatccatcagcctatctctgctaaccgaaatttcttttccatccaaaacccggaatgtgatattcttattttcggagacatctttacgctcttcctctgtacttgaaatccctcccccatatccgttttccccagaccttttcattgtcgagctgcagcctccggtaatcaaaaaaataagcacacaaatacctaaggcgatatgttttttcatgtctatttcctacctttgcaccttaattaactcaaaaatatgatccatacagtcctgccggatctttttcagacatccgctttgcccaaaaataattattatcttttaccagcaccacagtcatttcatcctttaaaatcattttatcccaaaaacaatcctctgaaaattcatagaaaactacacaaaattcattttccagacccattgcctctacaagcttctctattgatttttcccctatatccacaagataaaaatcacagatctcattatcctccatactttttgtggaaaagttcattccgatatattcttctgcgtcgtgttgctctgattttagaacttccgtaaccacccattccccgctccaaagcccatagtctgctctaaagaaatcttttccttctacgatatcatcataatccaccaccttctccatgcggtatacttttctccccaaaaaggctaacatctctttttcatctgtcaatatacatggagaaaaggcactgcgtgatctggcatactcctcaccaggctttacctcaccaaacgacaggtaataccccgccggcgtcggcagcatatttcctatattatattcaaaccaccgaacaattggagaggcttcatacccacccaactctacggtatatgaccacgttttgcttttataggaacagctttccggcaacatttcatacgctgcgcctaccagttcatccgtctcatcccaggtatctccttctctgatacctgtaatctgccagactccccatatatactgctgtcttttccccttgttttcccaaccatccatgttttccgcgtcctgttcctgatgcaccttctcctcattcgttgcttccgttctcatcaaatcaccatcattcagataatcctccatataagcatccagatacaccccatgctgatccctcttggatgtccgccttgcccacaggtaatttccatcctttaccagtactgctgtcatctcatcttttacaatcattttatcccagtaaaaatcttctgaaaattcataaaaacctacaaatgtttctttctccagccccattgcctttaccagttgttttatggacggctcccttgtggaaacaatataaaagttacaaaacttttcctccagtatctcttgaaaccatgtggaaaaatctgctcctatatactgctctgcatcatcaccatcctctttcagaatctctgtgacctcccactctccattccaaataccgctaattggtatcagaaagtcttttccttctggcatatcattatagtcggttgttttttccagacgacaccagtttccatcttcccgtcctatgatttcattttccccaattaaaatcaataccgtaaatgcactctttatcccagcatactttcttcccatctccacctcactgaactccagacaatagttcgtgtcctgcggcagcattccggctatatcatactcccgtgctgaaatcaacgatgcagagtacccttctaattttagtgagtacgattccgtgctgcttttgtatgaacagctctccggtaacagctcatacacagcacccacccgttcatccgtctcatcccatgtatccccctttctgacaccggtgactgtccattctccataaatatactgtttcttttctccctgatactcccagtcctccgttcctatcagatcaaaattctccgttgtatcgactttttctatttcttctgttgtatgagaaccgcatcctccatgaagcaatactgcacataacagcattatagatattcgttttagttttttaatttttctcatacttctcccattcgtccacgacaatggtgctcccaagtccaccagccacttcataattcccgtcaaaataaatatccaactctgtatctatcctatctttatatttgccacgattttccatatactcatctttcagttcatcttttcctgcatttgcattaaccttcgtctgcacatccgctccgaggctgccagtttggtactttcctatcatcaatgcatccatttcttgttgtgaaagttcccttaattccccatcgtctatctgcttttttaaggatttgtaacaagaatctacatcagctaaaaacttttcaaagcacacctccacgggtattacaacatcctttatttgattaaaatcactttcctgtgtactcaaatgatatcctttttcctcataaaacgtcaaatcatcctttgacagataatctccaaatccaactgtgataccgccatcacccactaaatgtggttttattccaatcagcctaccgttctcgacaaccaaatatcctttatttagagaatattcactcaacacctcaagttccatcaacgccatcattccctcttttgacatatatggagcacccgtgttgtaatctgaggaatcattctcctccttcgcatcttctttctcattcgcacttccatgaacattctgatctgcctgtttctccatcttcttataaagcaaatcatcacaatccatattctcttcccccgtacagcctttctgcacacggttcagcgcttccaccctctcttcttccgtggcataatcaaactcctctgcgcccacctctctgtcctgcccggaattgatgggcataataatgccaccgtgtttacagacaagaaatgaatccatcgtcagtgtattgcacccctctatttccccgtcctcttttggcagcttgtttccattatccacgatcttcgtctggtcatacgattccagccatgttcctatgatatggggcttacactttttgccatggcacttttttccgtcatctcctataagctggatctgctctgtctccaattcttccccgggcgtgcagataccgaaccatgtgatgttttcctcatccccctgtatacagtctaactcatgtaccactgcatgagccttgatataaaccccatgacaggggcttaagttcatcatccttttattgcttccctggctgcacatcagttctgctccccgtaccagataggcaggattcttcttgttttcgttatgctggatcaggtgttccttaatgatggcagccgactcctcctcgtctgcatcctccgcttcaagggcttccttctgctccatgagattcttctggccgtcttcccccagcgcatcccattcctcctgctggcttttgatctgtgccgtataatcctttccttctcccgcctgagtggtcttatctgtttcactcatccttctccctccatatcacttgcagctccgtcaatccgattccccgcagccccctctttagcatactctccacaacatcaagatttcccacaatatatgccttttccacgcctgcgatccggaaaatcgcatgtccccgcaatttctttccatccagcacaatctcttttaaaaggctgtggttcagattaaataccgcattctccgcaaggcagtccacctcctcaaaaatcggcagaaaatactgggataccttctcgttctttctgtccaacagtaccgtttccctccacacagtccgtggctcatacatctccacaaccatttttgctccctgcgacagcagaaaaacaggggttgaaattatatccggataaaaggtatccgtatctccctttaccgtcaacagctgtctgtgcgcgatcttatatgcactttcccggtgaatatccctaacgtcaatcttatcgtgcagctggacaatctgtggcaactgggatatttttttatctgtttccagaagaaaatatttcatctgtcttccctctctgatacaaaggtatactcttttccatataccgtccaaatgaaactacaacatcagcatccggcatattacactccccatacacttcttccacagccataggaaccaactcccgtaaaagaagcatcaccataaaataatgattccatagataagtactccgcacatcatcaagttcatactcctttatgcgtggtatcttttcagccgccttcctcttaaaatctgtgatatcattctccacatgttcaaaaatgaacgccggagtccagtattcatataccggggtatcatcaaaaaacattctttcatcgcaaaatgcgatctgcagctcatagctttttgtcagactgctactgtacaagacagacaagatgatattcttcactgccttttgttctttctgacagctttggatcccacgccgtactttccttgtaaactcccagcagatctcatttctgtttgccttgtaatactcttttatctcctctttccgctctgcgaatctttctgcccgatagttgtttatgacctgatcgattttctctgttctgtccatccaattccctctgacttttaattcagcctgaccttcgttccctgcatgatcatgctatctgacagcaccatactggtatttccctgctttaaggagattttctgcggagataccagatctatattggcacttacactcgtaatctcgattgcctcttctgattcaaacacaatctttttgtcactgataatagaaatcccgtcatcatccgacagttccagtgacattccatgattatttgtgatcaggattgaatccggtttaagtaaaatctcttttccctgtttatttctgatcgacttgttttccggatttgttctttgcccaccggctccattctcgaaatgcatagcatttagcacataagcctcatcggcatcctcagatggaaaatacagccgcacacggtctcctttttccggcatacagtaccatccgctcccatccggagatgaataaacagtcgcatatggaaaccatctgcctgcaccggaacattcgtccttgtggatggtcagtgtgaccgatgttcccttcactccggttaccgttccctcaagcgatacaccgcttagatgccggttttccacttcctcctccgttttctctgtaccaaacgtataagtgtgatacagcacacccttattataaaacgtttccctttggattacatatagattttttccattaaaatttacactgtctccaatatcataaatctctcgcagtgttccctcataggcaacgcccgtttttgtctgccggatcatgtattccgtcaaagtcacgccgcctctgtttgtccccatgggtctgccaaaatacagtttttcaccagagccaatatagtttggataaacaacagtgtgacataaatttgcaagacgctttgcaaactgccagtctgtttcctgatactgacacaaaaatcggttgatgctttttctgttcccctcctccattatatatccatattcctgatacgaagctccaaaggaggcaaatatctcatcataggtacagccaggactttggaacgtccggatatgtgtctctaaatccatcagaaagctgcctgtcttaattttaactttcagagttttcagtccgttttcaacactgatctccccatctgtcacaactccggtaaataaaactccagcctttccccactcatcgtataccattacggatgcccacacagaggagccaagcagcttcaggtattccccctccttttcttttttcatatatcccttgatcatcataaaaccatgctggtttgcacacaccactccactgcactgtagaatttctgataatccaaatggctctaatacgacccgctgttccctcataactgtttttcctcctccgaaagatcaagaattgaatacatcatctgtctcgccgcttctctccattcaagtatatcttcatagtcacagttaaaaataccatgcagcatcttccccccaattcttgagacaaacattaaattatatacatctgtatcaagcccgtagctcttaaactcaaaccatccaacaggcacatgtctcttatccactccgctctcataaaatacaaatgcagggttcagcctttttagcgcttcccgtgactgatctctcaactccttgatgtgttcttcctctattcctatgtctgtcagactcataccaaagttcacagttgtatccctgctagtcctgatgacctgtggacgctgctgggaagaatactttatccttgccagttttgcaggcagtgtgacaaatgattctggaagcatgacccctagtttcccctgaaacattttcttcctctcaaaccgcaccaactcattttttatgtacattccggtttctaaggtgctgtatttctcattacgggcatgtcttctgtactccaatatcttttcatcaaaaaattcttccatcagcttctcctattttcggtttactcgacaacgattctcttgggtgtttttctttccattctagagttcttattgcctataatcctttccatatccccataaattctattattgtcatttttttctgctgtatgatccgctaattttccacacagatatgccacaatcacctttcgctccactcgcccctgcgcattccagatcagactgcatatcccaacatctgccgcatccttttccttcatgttccagagttcctccacaaactgtaggagcagtgccgggtgcagtgttttctccccaacacctgccaccgtagcataaatcagatttatcgtatcgtactccgttgacatatccgcaaaattcttataactgtcacgcagtgtcgaaccttcccgcagatagaagcggcacatttccatctggttctcgcccagctccagctcctcatccagaaaaaatctgacacggtaagccttgtagtctaaatttgtatcatcctccaaaaattcggctttcaaaacctgccacctgttcttgggctgataagctacctcttcctcttccatcagcaaatagataaaatcgtgaaatttcaacatccctttcccgatgacaagccgaccatcttctgtatgtatctcacagccctttaacaagccatccgtatgatccgcataatacaactgccatcctgcataggtgtaatccctgatatcccacaaactttcttttttcaaaatacgcctgcccgcaaacaccggaaccctgatttccatgaaacttcacactcctatttcttcccgtcaaaaaaactgttcacccagttatcactctcgaaactgaaaaattctgctttccccagataaagttcatccattttacagtaaaccggaacaacctgaaatccccattcctcctgttctgcccatacgaagaacttcacatctccattctcaatactgtccgtctctttctgtagaatatgggaaccataaaccgcctcaatctcctcatagcttttctgtgaaaaatcttcttgcctgcatacatactgaaaacggcaatgttcctccccgtccgcatttttcaaatacagcggaagaatcaaatcctccatattcctcgaaatagttcccgccgtatcccagtctttaaaaccatccaccagtaccacttcttttccattgtgggtataagcggtaatccaataggggagcacagcttttccattgtccaggtgaatatctgccagcccatatttccggtcacgcagatatttcagcgccccgtccacacaagtcatctttaattcaaaatctgccgcatcaatattcgcccttttccgaaactgtatcattctccccggaacaaactcttttaacgcatccttgaacaaatcaatcttgcaggactgccccgtcagcttaataaaggaaaaatcctgtattcttccgctgtggtataattcctccataaatttctgcacaataccgtatatctctccggacaacagcagctctatctcaaaatagttcatcatcacttccggtatcatcttttccaccgtaaggctgttccctttccagaaagacagtttccatttatccaataaaacgatattttccctctgctccttctgttccgaagtaactgtgacctccaatgctccgacttttccgtaaaataatttttttatctgctctgctgtattgaacaaggtataaaaattatttttcaccttgtaatactcgctgcggttatatctttcaaaatcggcaaaacgcgtcggaagtgtctcttccgctttttgatattcctgctctaaatactgataaaactcctttactccatgcgaatcaataaaacggtaaatatccgtatccatgtattccaggatttctttcacactgcttacattctgatttccagttgcccgcaccagtgcgattttcaatatctgcataatgcggtacgttatgttatttccgccaaagtccgtatcgccgttttcgtatgtagtttccatatagattttgtaagcggctctgcggtcctgaatacgaaaacgataagaacataaatctgttgtccctcctccacagtctatgataagcgcttcatattcttcattttcttccagagtctcctgctctaacatattggaaatggtgttatataatacagccattccctcatcgagcatcgtttcctgacccgtcatatattccggcagtatctcccggaacattctgcggaaataatgcttctgcttcaccggacttgagatatgtacctgagaaatgcggcatttaaaacggttctccgtttttcttatgatatacaggaaaaatcgacgtaaaatctccgcccgctttaccagcctccgccgtccctgtctgtcaacaatttcttcctctttctcgtattccccaatccagcgtttcacatcataaaagacacaaaaaccctcgtctacataactcgcatttgccagccttatcgcatcataaccgaacagcagcttgtaatcctcttcttccactgccaatactcctatcacgctgggcaatagcatactttctccgttaccatcctcaaaagctgtataatttatctcattttccctgcaattttttaccgcagcctgctctccgacattttcaaaataagcagaatccagatacaccccggcagtggtatttacagaaccaaaatcaatcgccatgggcagcatcagtgtgacaggttttctcaccacaaaatcaatcagtggtatactgtaaacctcgatatgctccggcaatattgtgtgctcaccataatacaaatgatacaagctctccgatgtctgacgtcccatacagaaaattctgtaatcttttctctgtgtctcccgtatctctaactccgcagccttggtcagatacaatttttcctgtctctctccgtgctctttgagatttaaaattgcacagagtgtcatatcgcttcccattaaaaaggcatttgttcctgacagttctttcttataaggaatggtatagccgtcataatactcgatggacagtccctcataagctaaaatctgggactggcagtataattcttcactgggctttattacaatcctggtattttttaaaaattcctctacccgctcttctcccccttttttcctgtcacagataaggaagtcctgtctttttcccatgtaacgcataatcgtctggatcagttcttctttatcgagagggtgtatcacaccgttcatgattttttcacgacggcagatttctcttagctgataggtcgtcatcaactccagttctgatttttcatattttatttcgtttttcatcgtatctgttccggctgccttcatacctatcacctccgcatttatattaaaagtaccttatctatcaccatggtttcttccatatcaaggattccaaaatgttccagataaaagacttctgtcctcatacctattggcaaaaaggtgtctaataaaaactgaacccttttcctttcttcctgcgtttctgcacttccaacgtaaatataaagttcattggcacaatccatgcttttatatataatagagtcttgatatatctcttgaaacagccacttgaaaatctcacgatagttacgagaagatatgacatccatgagcgccaatacaatatattttttttcataggatgaaaataactgtatagccgcctttgccttcctcccaaactgcccgctttccaattcctccaccaggaacttaaaataataatccttcctgctcatgcccatccttaagtccgtcagcgccagataatgaaataccgcatccacaaagatttcctttgtttttccatattctttctgattaatatccaacaccccgctgaaaatatcaaaaaagcggtaaaatggattcacctctacggcagtctgctccactgtctgcgtatttaaatcgtaaaaggatacctccagatacggacttcgtacctctggcacctcatactgcaaatcagcttcccttattccgtttttttccgctgcaagcacaacctcccagatatactgcataaaatttaaactcctttgtcctgcaaaataccgacacacttatattcacagaccgataactgtatctgtgacacaaaaaaacgtaccatatcttcgcaaaagttctttttctgtccctttcgtgtgaaatacaatgccaacgtttttcttgtctccatcgggaaaacggtatttcccaaaaatggattcatatccccttccagacaggactccggtggtgtttcaagcacctcacacttttctaactctacataaacattatgttcaaagctctgtaccatccaaaacaactctgtccggctgccaagggaactttcctgccgttctctgtaattttgaaaaaaactgctttttctgctgttgcttaacatttcgcaggtatacccatgggaacttgtatctgtcttttcaatgaaacgatatgcttcccaatcccgaaaagattctttcagcgacgtcataataattttatctttttcatgcctgactttaaggatatcttcattgattccaagcatatatccgctgtccaaatcatagttttttaaatccagttcatgttcataatatttctcatccatgcacggaaccataaatttacggcactgaaatgtgaacttttctatattccataacagcagcatgtcatttttaatatcttcctcatagctgccaaaatctattttcaaactgtttccatccgtttccccgtccgtatctatttcataaaatctatccagatatcccgtattgactgttgtccagcatatcttgttatagacgaatacctgatataactctgacagcgcctgctgatagcattttgctttccgtactctgatggcatagggcttgccattgtcatcaaagccctgaaaatctgcggttttctcaaattcttctttcctctgataactgcctgcaaaatagataaggcagggcattggttccgtcttctcctgctccttatcctcctgcactaatacaggaataaccggatacagcgttccattgatggggtcatagtccttttgctttataaccgtcatagaaactgcatatttttcattcggaatctctatttcccgtttgatttgattttccaaatccagataccgtttttccatccgttcaaaaatgggcacaagaccttccaacaatatttcccttgcgtccttccgctcgtccagatcctctatttctgtcagcctttttcgtatgtgctgctgtaaatctgtcatactttccacaatgttcacccctctgtgatctgcatatcaatatcgctcaaaattccctctatcctctgcacatcttcatcactcccaagttcctgataaaccgattttgcagacagatactgtgattttgctccccacaaatccccggactgccggcaggcttctccctggctttcataggcagccgccgtatttttctgttcctcctgttcacttaacttttcttctacggcatccaattttttctgtgcatcttcctgtcccgccgtatccgctacttcaccatacttggcaactgccatcgtataataaactttcgccccaacataatctttttccagacatgccttatctcctgctgccaccatctccgctgcggcaactgtctgctgtgcctgactgtctgcttcttcctgtgccgcgctctcggcatctgccttttcctcataaagcttttccagcgaatccataacagtctgtttgccctccgcatcatgtacggacaacgcggctttttttgccagcagatacttctcttccgccccatcataatcgccctgctctaacagggaatctccaaggtttatataatcctccaccgacaggaatacactgatattctccaacttattttctatgtaatccgtccctacattgtccgcatatctggtgcgatccaatgcagaaagatagtattcttcggccgcttcataatctgcgctgctgtagctttcatctgccagtatcacagtctctatcacaaaggaatattcctgcagacggtttctcatactgctgtctttcagcttttctgccagtttctgcgcctgctcgcattcctcctttgccctgacataatttccggtattgatatattccaccgtattggtaaaatgataattcatatcctcagtacgctgcacttttctatcacgcagaaaccacagcaccacaccgataacgattgccgctatgacaacaataaccgtaatcatcactattttttttatccgtttccgcttctctggattttggtatactttatttacaaaaataactgccagcgtatagttgtccagattctccggctgtcttgaaagcagtaagtcctcgatattatccaccgttgtctgcacttcgttgtcagcttctgcaaagacatcatccagttccgcctcgtccacattctcccagattccccttgtatacagagcaatcatgtcggtttccgccagctttatcttctttgaaaccacgggtttaaaatttttctgtcccagataggcataaagattattcctctcttcatgctgcatcaactcatctttggcaattttctcctgctccaccatctcctgggcaagagacatatccctcgtctgacggtaaaccgcccctccccggtacatgcggagccttgtgttccccacatagccatatctcatcttctggtaatccgttacaaccactgtaatagatgcctttaaccgtctgtcactttcttttcctaacaatgcccggtttgcccgctttaacaatctctttacagcccgctttgacagagatggattttcctgaaaactaagaatgactgtctcaatggcaagccttgcgctttctacatccgtgacctccgtaattccgtctgcgatgacatagcaggcgaactcatctaattccacatacccaaaataatctctgttttttaacctgcttccctcttcggaaataaaccgtgcctcaaaatcactgttctgttttctcatgtcatttctccaactcttatcagaattacgctggcattatccttatcgccttttttctgatttaccagttccaccaaatcaaatgccattctcttacagcttttcttccgggctaagcagtcttccatctctttccatgtcacactctcctgcattccattactgaaaactgccaccacatccccttcctgtaagcgaaccggcttgtcgtagaactgtatttccttaaaaccgtctcttcccaggtaattgtaaattcttttttcctgcagcatagacagggcatcttctcttgtcagaacgccttccacatacttatcctgtgccagcacatctacggtgtgtcccgttccaaggggaaccaattcctcatttcggaatactgcaatctttacattcccgacaatcccgtaaaacagaaatcctccctgtatcataacggcgctgactgccgccattcctcttccctcatccatctgttttaaaatttcccggtttgccgtctgaaacgctttcttaaaaaaataggacgggtggtctgccatgttgtacgtttcaaaaatttctttaaaaacccgaatgactgtcttagcagcaattctgccgcccgcttcttttcccattccgtctgctaaaaccgccagtaaaccattctcattttcttctattgtaaagtaatccatctgtatttcacggctgccgatggtcttgcaggctcccgtctcatatccctctctgctgctccggaataccagacaaaaacggtacaaaaatgcaattcctaagaaaacgcataagatacagactgtcaggtacgggacactcatttatcgtcctcccacatataatgctccccgcagaaaggaacaaaaaggaatgtgctctcccccatctcaatcacgtcatatgcgcttaacggctgcggcagatagaccgcttcaccgttcagatagaccagaccgttgctgtctcccggtaaaatcatgttctcccgtttcttcgcatcaaatacaatcaccgcatgatttctccgtgcgattttgttatcccccagaatctgaatgtccatatcatctgcccgtcccacaaaattctttccgtccatgacccggtaatctttgcctcttctcggaccttttacgcatacaatccagccgcagaccggattctcctcctccagaaaaagaatgtcctcaatttcttcctgcgatttttccactgactttttttctttcgtggctgtctcaatattgcagtacggacacactgttccatatctcctgcttgaaaaaagatgtccgttctgacagcgaattaaatttccactcatgttttttcctccatatgtacacgctattttgcccctaatctggtattcccgataaaaataatatcgcctgcgttaatccggcagggatgctcccttgacacctgatacactttgccatccttcgcatcctggattcttacgccgtttctgcttcctaaatcttcaatataccactgccccgccgcataatttaacacggcgtgctgacggtctgccattccgccatactctgtattctgaagattaatgtccacgttttccttatgctcgtcccgtccgattaaaagggacgtctttccgccaatatgccaggctgatatttcgtttccctcttcatctaacagcaacagttcctgtattccccgcccatttcctctttttttctgtctgccggacagagaatccgtcactgccagcagcaaaaatgccagaaatacaatcccgcagacagccataagcgtatcccgccccctgctctgctccatatatgtaaaacatagaattataattgcagcggaaagactgcatatcatcatgtccatgaaatttttcttattcattttcacctcaatatcaccgcaaatctgcgtctgaaaaatcaaatcgtctttctcaacgtttcaatcccatataacgttcaaataaatctgtcacatccatgggattaatcttttgttgcgtgcgattctcctttttctcactctgctttcccatggaaaaaaatcgttcaaattccttttcaatatctcccggatcaatcgttcctcctccggtattctttctgcccgtcccagcaccgttccttcctgtcccagcgctgttccttcctgccgcacttttctgttctttctgcgctgccctagcgttgtactcttccctcttttgtttatcgctcagaatccggtatgcctctccgatttccttaaaccgttcctctgcccgcttatctcccggatgtgtatcggggtggcattcttttgccgcttttctatatgccttttttatggtgtcctcatcagccgtttgcgaaacccctaatacctgatatggattcatatttgttccaacctttcgttcatggcaatagaaagcccgtaaaatgcgctttctattgccgatttaaggcgcaggctgtcctatttgctgacaatctgcgccctgctgttatgctgaataatttccttctaccgctacagaagcgattttgtctttcttctgtctgagtactaatgtgaaggttccggttccctctacatcgccaaactcttctttgtagtcaagcacaaatgcgttggggaaacaatattttctctccattacgccgcctgccacatgctctactgtcaccttccgataacaatccgctttctccgccggaacaacggaccataatgccagcttcctggtactgtcagtaatatccccgtccaaagccgctaaaatctttccggtaattaccatagttgcgccgacatccttcgttctcgcattagaatccagcggaatatcagtagtaacctttacgcttctgacacattccttcgccacttcaaagctctcgcttccttcgacttttactaaaaatgacataatttcctctcctttctttattcaccgtagccgccttcgatcttcaccgcatcattctcgtcctttttctgcttgatgtggaggtaaaatgtacccacaccggtttcatcatccatatgctcctcatattccatgacaaacgcattggggattgtgtactttcttaccacctgtcctgctgatacaacatcgatctgtgcatttctgtagcagtctgcctgctcggacggaacctgagaccatttggataatccaagtgttccgtcttctccgtctgctcccaccttatacaacatttttccggtaatctttactgcaatgccaaaatctgtagcccttgcgttggaatctgttgcggaatcggaactgaacgtaactttctggatagttttctcgtccagattgatgttctctgcgcctccactcactgctaatctaaaacccatgttcgtttcctccttcttttcttttagactttatttaaaatgttctgtcctcgctgttgacccggttaatctcgatttcgagattcttcacgttaccgttaaatgcgatatcaagcgtgcagtatcccgctgcctcgtcgatggaataccggatatcgtctccgtttccgataatcgcattgatgcaatccttcttctccatccatctgcttctctggctggtaggcttgctggagaaaaactccacaatattttcctgcttaaaatcgcctgtcgctaaacgcatcactctctgaatgtaagtagtcacctgtgtcttatagattggctcataactctttccgtctgtcagcaggttacgtgccttgtagaccataatgttctggatattcatatccttaagcactgcattttcggaagaaaatacaaatccgaaattcttccggttgatatcgctcttgatatcgttggtgtatcctgtaatctcttttgccatggtagtccgaacctgcagtgcgtgatctcctgactcaatgtcaaaccggacacccggaagctcatcgtccacgtttttcttaaacacttcttttaagtagtccggactctggtaagctgccaccaaaccggctgccacataagcagctcctatgtagacaccatcaatccagattttcataacatcttctttttctttagacagcgctgccgtattctgctctgtaatgtacattttgttatccagaatgacgccggacttgtcttttggtattacggtaaaattcgggatacagggaattgcatattcactaaaaggcttgccaatcaactgcgtgcattttgtttcatatttttcaattccctctgtcgccataacattaaaggtggtcttatcccccgtctcatagctgaagaaacactgcacttcataatctttcagcgcatccagaatccgaaccagcgattccatgctgttcacatcctctttctctacgttctcatttcctttaaaacgctcctttaccgccttcagcttagaactgctgtttaaggaaaccgacggaacaatggcataccagatggtattctcaaaatcattttttgcgtttaccgtattgagatatgctaaaagtcgcggaatgttgctgctctttgccagcatatcgttgctcacattcgataccaccagagaaggtttcattcccttgcagtttctcggatactgctcgaagaaagcccatacccccatgattttttccaccaacggttttactgtcttgataaaatcatccttgctccgcttgtagaactcaaggtaagaattgtagttcgctacttctttctcaatatctaccacactctccatcgtagatgccagcggacagaaagttcttgcaaccaacgacataacatactcatttccgtcctcgttcaaatccatatagtctttctcgattgcctgaatcagtccggcgttggcattgtcgtctaataccatcagctcttttttgttttccttcggcgcctctaaaatcttaagttctccgtgttcatccatactgagcacgccaatgcttaacggcgcttcgtcttttttcttctgtccatcgcccaacaacagccttgtcttgatatcctctatcgcaagcggcagcattgccattacattgttgtaattgacacttgcttcttcaaacatcagattcagcttatctgccgtatctaacttcttcggatcgccgtcctcaagtttcgcatattcgctgtaggtatactgaagttcttttcggttctgtcggatatcgtccatgacctttttgggtgaaatcatatccgtcagtttctcaaatttaaaatctacgttgatgcttccctccgcccgctttgcctcaacaagcgtcatcagcattttcagataatcattctggcggttcagatgaatttcactcagtaactcatcttcaatcgtttccggttttttcagcgtatagattactttctgattgtttgcgtcaaaatacgaatacaccaccggctcaaatttctccaaaaattcgtcaaaacttctcaccagcaaggcatcgtttatttctttgattttgtcgtcacttacgctgtttacccccctgacgtctccaacaagtgtcagaagattcagcttttccggattgatttcctcaaagagaatcgtcctgtttgtctgtgttattgtattcactttgttcctccttacctttcgcttggtttcatatttttataatgaagttcaatttctgttcctccattattaaaaatcagcaatattttttctccatagtataaagaatactttctctcccgtttcaaaatctggttttcttttacgattgttgcataaccactgtttttgaaacacagtgcatggtcttttccgccagtaaacctgattttatctgcatccgataatttatagtcaatcccgcagcggtctttgatccagtcaaaggatatactttttcgtgattttccgaataacttaatactgcagggcgcaacgtcgtcttcctgctccccctttaacaaatataccgccaactgtcctgagaaatcatatttcggcagcacaggaggttccgacttctctatgataatggaacccgtctcaccatcgttttttttttgctttttcctttcatataaaacagagagcaaaagcaccactgcacataaagatataattacaatccaaagaaccgtataatcaggttcctcctctacaaccggaactgtcaattccaccgtatctgccgtttttatgtaatgaaccacattttccgacggctgaattgcaatttccacattcacttttgccgtctcgtctgtctgatacggaaccatcgccgtgccattttccacacggtaagacgcttccttgccattaatcaaaacagaaatactgtcttttaaagtttccgaatccaaaaccggcttctcctgatggtttacaacatttaccttcagggtaaatgtcccttcctctgatgtataggatttctccatatcagcttttaaaaaatattcttttatcagataagtatggacatttcctctgttttccagagaatagtccattgtaatctgccgttccaatggattttccaattcagcaaccgcaaacttgtttccctgaagcatattcaggctctcacactgtcctgcaacatgaaaatcctcgatgttttcccctgacacgagaagtatctttgcattctgcatataagtatcctgcagatccactgtcatatttccttctccggaaaccgcctcgccaagttctattttttctatctgtaacgtctggaacagatattttgcagtgatttcttcaatcgtctggttttcgcctactgtatactgctctcctgacgtcactttcgttccatacgaaacctcattctccgtcttatcattggggattgcaaacatgtcaatttttattccctgttctgcaatctgatccaccatattttcaaactgcctgattgcagtttctgtttcgctttgatcccgcagagaaatttccccgtcggaaataaataccactcttttatctgccgccgcactgtcaaacatatcagccgccgtttccaacgccaccgctggggtggtatagccctgcagttctaccgtctcgagtgcatgtctggttttctgattaatgtttccgaaatcttcctcataaacaatttccgtgttatataccagcaatgccacttcgtattctttcggcaacgccgacgctatcatgcatgcgctgtccgctgcctcaatccactgtccgtctccctgcattgatttgcttgcatccagcaaaaatataatctgctttttttcggtgatttcattgatttcattcttctccgctgccaaaacccttgccggaaacagcaaagaaagccctatgaacagcattgccaatttaattgttatcttctctacttttcccatttttctccgtatatctttttactgaccatgccagataactcactccacaccagataactgcgcccaaaaccgcatatgcagctctctgatttaccgctaagaataccattccgagtatcagctctgttacaactatgattcgcgccttttttccgattactttcttttctgcttcctccagaggcttatttttatcctccaggggagcaaatagaaatatccccatccccgcagccaacgccgcagcgattgtaagacaggtctgataagcaaattctgcttttatccataacaaggttaaaaccagaatcccacatgaaagaaaatagcagctcatccatcccggtgcgtgatatcctcctgcttcctgccgcaacagcataaatgcaatcagaaatatcatgcaatataacaattccccaaaggccgcgccaatgacaacacccgttccaatattgaaagcatatacagcaacggtctgcaacgcgaatagatatatatccctgtactccgattgaatgcttccattttcttccatgaagtctacgattctttcaaaaagttttctcatttcttactctcagaaaactttttgagattttccggcaccttgggctgatgcagaataaaatagcagcattttgttgcagcgcctgttgctactttctccagaccaaatgtcattaaattgctcaaatagcggtttaacagatttctcatcttgattccccctctcttttttcctaataataccatttttcgacacagaatcttcaaaacgtcaagaatcgtatggttatctgtaacttttttatttttatgcaaaaaaaagagacgcctgtctctcactcacgcatctcttatttccctttacatttctttacatagaaaaaatctcatacaataatactgtcaccacaaattgatgattcccatcatcaatgataacctccccatcataccgtctggctatcttccttattatattcagtccaaatccatgcctgtatttttctttttttgttgtcatataatgatttccgctcttcttccgttcttcttcgtaatggttagaaaccatcatcataaggtttcttctatccactcgtatttctacgcaaacactacgttcttctgctttcacttttttggatgcctctatcgcattatccaacaaatttccaagacagatacagatatcttctgtttccacttttaaatctctcggtatcatcagctttgtttcaaatttaatatcaaatgtctcagcaaccgccgctttatagttaataatactgtcaaaatagaaacaccctgtattagatacttttctctgcttatgtaacttttctaaagaattatcgcaatattttttgagtgcctcatagtctcctttctccagatacattttctccatcagataccgttccgtcatattatggcggaactcactcatttctacccacagattcatgttttcattgtactgtctgagataatattcactttgctcctgtaaaacctcttcccgtactcttttttctgctgtttctccaattttatcatacaaataatatgtaaaaatatttatcagcattaccataagcgctgccacaaaatccaatgtctcgctcatgctttccttttgacagatcatttcagctaaaatgacaatgcttcctccgggaatcataaaaatttcaacccattcctgtgtattcagcctgatatttttatgccgcttgataagcgccagcaatatttttataaagaaaaacataactagcttggaaaccagcaatagtaagtaatcctcatttgccgtatctactttgactccacttttctgaacaaatatctgccatccataataagtcaatacttctgataatgctccgctaattgccataaaagcagtaactgccgataaaacccatgcagaatctatatataaaatacgtaaagcaaaaaaaaatgagacaacaaatattcctgtattgtcccacgcactttttgcaaaactgtaagtaaaaaaattagaaataacaaaatacattccccatacaaaacactcccacactctgccatgctttctttgtgtcaggactttttgtgcaaaaattctctgatacactaaagaaaaaatttcaatggctgccagcattactttcatcatttagcttatcctcatcaattcaatataactttttcgtattttatccttatatctgggacctattttaaattctttgccgtcatccatcactactttttcataccgaaattcctttacatagttcacattgaccagataagatttactaatccttaaaaacttgatattcatctgttctaactgtgcttctacttcatccagttttttataaaaggaagaaacaccgtctgtactgtaaagattcacctgtcgcttatcactctcaaaataacgaattttatttaccaaaatcttatatggaacttttttatatgtatactcaaaaatttcttctttttgactcatcgccttaaacgcttctctaaacccacgatccagttcctcctccgaaacaggcttgtctataaaccgaaatggctgtacattaatgatttccttacaatactgttcatagtaggaaatgaagaacaaaattgccctgttatccttttcccgaatccgtcttgccgtttcaactccgtttatcccgcccatttcaatatccaaaagaatgatatccatattgcctttttgttccatttcccatagcaaatcttctccactttgaaaacattttatttctgtattcagccccaaacggcaaacgatattcctaaccatctcttcctgtatctgaagttgttctactaaatcatcacaaatcccgatccttatcatatatctttgcccccactgtaacaactaatgtttccgttttgccagactcttaaccaaagcttttaccatatcataaacaattctgatgtcttcttcactgcattcttccaattcctgtgaaatttcttcatcaaaaacagctttccctttcaccagattatcacaaatcaatgcgtccaatgtcgtatccagagggtttgcaatatctatcaaagttgccaagcttacttttgtctttccccgctctatattactcatatgtggattggaaattccaacagtagatgccagcatctcctgcgaccattctttcttcgtccgacgctcttttattctcatacctattgcgcaataatctaatttcatttctatctccgaaactcattttccttttatcatatcttttctttgactatttaagaatgctctgtatactaatttattttgctatggtttaataatctacaagaaattttttattttatttgcaaaattatcattttaagcttaacatatacgtcattttacgtttattaccaatgtgtaaccagactatatttctattttatcctaaatacttttttttcactttttagtcttttagttaaaatgaacgttcaaggtggtatcaaactgacctcctccccagtccacccccaaaaggtgtctctttcgtccactcttccatacgctgtgtctgttctgcaaatctcctttttatcagtctgtttcctttgacattgcttagttttctcctgctgcgtctctgcatttgcgtggctcttgattctgtggaaagcccttagaaactctgccattccctctaccgccagcgtttccgactgtaccggaataatcagactgtcacagcatatcatcacatttatcatggctgtccccatcttaggcatcccgtcaatgaggatgtagtcatactgctccttaatggtgtccacaaactctttcagcttgtattctgcaaaatcagtatcacacatcagcttatcaaagttatccagcttgttattcgccggaattaaatctactcctgtctctgtccttatcatgtaggaccctttatccggcagttcttcgttcatcacgatacacttcaaaatgtcataaattgtcacggaaagctgctctggtgcggtcactccgcaaagttttgttgtgtgcctctgcccgtcaaagtcaatcaatgcgaccttacagccctccttagacagcagatatgacagggttgtggcggtcgtggtcttacctactccgccctttctgtttacaattcctaaaaccttgcccatacgtttgcttcctttctcttgttgaatttgttattttggttacattggattctcatgcaggcagcgagccaaggccaggcttgctgaaccttggcgactgccatggtatcaatttcatatgacacttggataaaagtaggactgttcacttacctccttccatgtaagaacactatcggttacaatttggaaaatagattttgcactaaaactgagattgattagaaatgataaatttgaaatacatttgaaaaatagatttttaactccttatggtattttagtgtcaagttatccgatttccctttttcagaatgaaaactaggttgttttcatcccaatttgccgttttcacagcaatttctgttttggacgaaatcagcggaaccccttgattttactggcttctcactaacttgacactataataccattatccccaaacaccggattcggatagtcccgcatcgccggaagccttcttgcccccttgatcagatacgctttcattttttccccatacagatatggatcatttttatccacgatcccccattgcatcagaagtgctgccccgccagtcacaaagggagccgccatcgatgttccgcttcttgtcacatacccgccgcccggcgcacaggaagtaatatccacccccggtgcgaccagatccggtttgacctgattggtctcccgcgtatacccgcgcccggaaaatgccgccgcgcggtcaaaatatccgtcgtaggctccgacggtgatcacccgcgccgccgtcgacggaatcgtcagtgttgtctcctccgacggcatcaaaaagcccgtaccttcgtttaaaacaccgcccgccggaagccacatatcataatttccggctgcaattctctgtggtacaagctgtatcgtccagacgccgctgtcaatatactcgtttaccggaagcaggtcaaaataaatttcctgataaggactgtagggactcggttctccgtaataaagcagaatatctgtattccccagcctaaaacgctgcggacctaaaatctgccggactggtcccactctcgtaccattcggatgaatcagcgagaccgcaatctcatcggaataatttttccaaatttgaagatttaaagacggctcataactgctcacggcgatttccacatctttcgtgatattttcccgcagggttccagacgcatgcaccgccgacgccccctcatttccgctgccggcaacaatcgacgtccgccagtaattcgccatatcatcaagataactctctaacagggagttgccggagtgggaaccatagttattcccaaagctcaaatttataacgatgggcatcccgtattcctgggcttttctgatacagtaatctactgcctgcatcagttccgtcgttcttggaaaagatcgttcccccggcgttcccaattttacgatcagaagcggactttcatatgccactccgcggtatcttccctgtgaggctctgccatttccggctgcgatccccgtcacatgggtgccatgcccggagatgtcacggctggggcacaacgcaaaccgctctctctccgttgtctgctctaaagcgcggtctatcaccgctctcgtaaattcagttccaagaaagtaccctgacggtgcccctaaaaatgacgtttctccattctccgcaggaaacggatctgccacgctgtctgctggtatcgtctgatcccacagatttaaaatccgggtggttccgtctgcattccgaaaatccgggtgtgtataatcgatgccggaatcgatcactgccacgatcacgccggttccacttaaatttctgccagacgacaatgttccctgctccgtccccaccgtctgcagctgattgatgcatgatacacgtctgccgttattcactgcaaaaaacaaaagtttcggtttctccatgtattcgatctctgtcagtgccgccaccagttccacaatatgctctggcaaaagcaggatcgcatattcattccgcagatttgtaatcctgatccggtcatactcctccggaaatttttctgcaaacagtcccctcaacgcttcttccgtgcctccgaattttacgataacttcccaggtccgttccgctctgtcatacccggtatcgagatctaacgatttttccctctcccgctctgtcgcatcgagtgcaagatttaacagattttccattttctcattggacataaaaatcccccgcaaacgcactccttacttattagaaatgcagcttggggggattttatgactcttttggggtaaatttaaaattctaccgacttattattattttttaatgcatgatacagttctgcgcgtgtcagatatatgtaaggttctacataaaaaacaagaagaataccaaatgtgcagacacctaacagcgtccagccgataaatgaaagatctaacacaaatgcatcccatttgtttccatccatcatctgtttactttctgcaaaggcttcctgtctggtcatctccggatgctctgctaaaagatatgggatcatcatatactcataacttttcacgatacccggaatgataaataataacatccagagtcctgtaaacagcccccgcaggaacatgatcatgccgatgtgcgcatatccgtttttaaatccgtatgcaatatcgcctaattccgcgttaccatacttacagttaatgaaaaatttctgacatcccacttcaagcggattccagataaaaatactgagcaggatgctgatcaccatggcaacaaatactgctgccagtataatcccaatcacagtaaataccattaccggatctatatccgtcaatccatccgttgatgaccttgccgaattttgggcagctgttgagcctgaacctaaaataaatgacagaatcagtcccaccagcactgctttccagtaattcgccttcaatgccagctttgcattgctttttaactcacttctgttccacatgctaaactcctcctgataaaaacattttacacttttgcagtttaacacattaacgtttttttgtcatccctcaaacaaaaatcctcagaaaatcttaagaattagacctcaattttcccttcttttaacaattcaataaatgcctctgccagttttggatcaaactgtgttcccttattgtgttctaactcactgattgcataatcgatcgacatagcttccttataggtacgctttgttgtcatcgcatcaaacgaatcacataccgcaagaatacgccctaacagtggaatatcttctcctttcaggcctctcggatatccctttccgtcatatctctcatgatgcgataatacagccggtatcacatagttcatattcggcagaaaatgaatcatctcaatggaattcgtgacatgtgttttcatgatctcatattcctcatcatttaacctgccctgtttttttaagatactctcaggaataccaatctttccgatatcgtgaagcagtcctgcctcctttgcaatttcaatgtcattcggctcaagacctattttttttgcgagaagaaccgcataatccgatacatggcaggaatgttcaaaggtataagaatcctttgcatcgattgctgcagtcagtgcgtaaatcgttggtgcaatctgttcataatgcttttgtacctgctgatcctcaagttcatcttctgtatgtgctccataaattttaatacagttttttccgtcccgttttgcataaaaatttgcacgttctgcctgactgagcagctcatccgctcccgaagccgtatccggataaaatgcaattccgacacttgcagtcaccggttgtagaacatccggtttttcttcatccgcgagcagaaaattcttctgtatcttcgccgcaatctgtgccacctttttcttttcatccgaatttatcagcaccacatattcatttgatccaaaccggaatgtttctcccttacttcctacagtattctctatgatatgcccgcaccattttaatatgcgatccccacattcttccccgtacagctcattaaaaagcttaaaatcatccagatcaagatacatcagagctatcttctgctcttctttccagttctccgccagaaactttttaaaatatcccctgttataaagccctgtcagttcatcatggatcgatatctgatatacttcctgataagtgctgatattcttaaggcacacacccgcatacacaccaattctccagtaataatctctctctaaataatttaatctggttcttttctccgattttatatagataaatccctgtatctcatcatcatacttcatcaatgaaatctcagagcactcacctgcccccgatctttccagcatagccgtgatttcatcctgctctgcctgatccggcatctgtccaccggctgtttttacaaccgtaaacttttctccatttttgataaaaacaaagacgtcctttactggaaacatctcatttaccacatcaaccagcagcttaaacagatcttcctgccgcaatatagacgccgactcattctgaaaacgacgtaatacctcgatctgctttctgttctgcctctgcatgattccctctgccatttttcttgccagataaaatacaaacaacgaccatcctgtaaatccaagtacgagcactataactttttgctgtatttccggcaatacactgccaagataccactccgcattgtgattaaaattgaacacaggaagaagactgaccgccagtgcaaccgagtagatacatccgatcacgatacggttcgagatatcaaacagatacttgtgccacatgatatataacaggcacaatgccataaaaataccgcccagcatatcatacgggaaaaaattacccggcagtgcaacaaaaagattgcctgtcaaaattgcaactgttccaagcagcagtggaaataatttctttcgtttttcaaatttattgccgattgccctgtgcgccaaaactgtcgtatagacgatcacacctgcctccgcagctgcaaataaataacttccccaagatagatgacaggcatatccaatgcttccatctgcataccggataatatccggttccgggataaatacttctgtgacaacattgatccccattgccaccacagtagctatgcaatatccggtcaggaaaccattctttttgatctccaacatataaaataaaaatgcatacataaaaatcggtaccgtcaaaaatccgaataccgacacatgaaaccagaaccgcatccccggcatgatctgcatacgcatcattactacaccgccagtccagatcagacaggataaaagaatctgtctgaaatacctgaccggttttgcatccccggcattcaggaatgaaaaaaatataaataaaaaacagaaaaacgctccgattggaactccaatatataaactatccagcgtcaaagccgtttcctccaaattgaatgtaaaatttttcaaaatcaatcattatattcatgtgcaaaatcggcacatgatccaattcacaattcgtcaatcatacaagcatgttgactctctctcgctcattatagcatattttaacctgcaattccatttttttccatcatccatcatctttttgatgggaatccatcatctttttgatggatttgcatacactaacagggattaaatctgttttttaatggagtgaccttatgtgcggaattgcaggattttgcagcctgaaacgctgttatacggacagacagtccttttgggaaaatatactggtgtccatgcacgaaaaactcatccaccgcggcggtgatgcttccggcatttatctgacacctcatgccggtctgtcacatcagagactttctatccgtgatatcacgcacggtgcacagcctatgatacgtcaccgggacggggcagattatgccatcgtctacaatggggagatctataataccgatgaactgatcccggagcttactgctgccggatataattttctcacaacatccgacacggaagtgatcttatatgcctacatgcatttcggtgcttcctttgtctcccgcttaaatggaatcttttcctttgccatctgggacggtgccgcaaaacagctttttctctaccgcgacagagtagggacaaagccgcttttttatcacgcaaaagacggtgagcttgtctttgcctcagagccaaaagcactgttctgctttccggatctttcacccgctattaccgaaaacagcctgagagaactgcttgcagtcgggccggcgcgcacccccggatgtggggtttttcaggatatctatgaagttctacccggacattacctgtgttttgatgccatggggctctccgataccacctactgggatctgaaatgtctgccccacacggactcctacgaggacaccgtggcacatgtatcttttctcatgcgcgataccgtaaaacggcagatgatctccgatgtgccggtctgtacctttttatccgggggcatcgattcaagcatcgtcacagcccttgctgccgcttaccagagggaacacggtgaagtcttaaatacgttttcctttgactttacggaaaatgatatttattttcaatccaattcctttcagccggaacgcgatcttccctatgtaaactgcatgttagagcactgtaaaaccagtcatacttacctggaatgcacccaggagacgctcgccgacatgctctatgctgccgtggacgcaaaggatatgcctggcatgacagatgtcgatgcctccttactttacttttgttctctggtcaaaaaacaaaacaaggtcacactgaccggggaatgtgccgatgaaatcttcggcggatacccgtggttttaccgcccggaactgatgaaccgggatggttttccgtggtctgcggatatcgatgcccgtactgcctttcttgatgatgatgttatgaaaagccttgatctctcttcttactcccatgcaaggtatgaagaatccctgaaaaaaacaccgcatcttccggatgaaaccgccgaagaatacagacgccgtgagatcgcctacctgaatatcaaatggtttatgcagacactgctcgaccgcatggaccgcaccagcatgtattccggtcttgaggcgagagtcccctttgctgaccaccgcatcatcgactatgtgtacaatgttccatggaaaatgaaataccagaacggtgtggaaaaggctctgcttcgtgatgccttctgcgatcttctgccgccggaactattgcaccgcaaaaaaagtccttacccgaaaacctaccatccggattatgaaaagatcctgatcgcacggatgacggatattttagcagacagcaatgcttctatccttccgcttatcgataaaaagaaagcgaaaaaatttatggaagcaccaaaagaatacggaaagccgtggttcgggcagcttatggctggtccacagcttctggcctattttatccagctcaattactggatggagaaatatcatctttctgtgtgacagaaaaaaacactccggcacttttactttgtccggggtgttttttgtatattatgattctaaaacttttctatgttttttctgatacaccctgcataccagcactgcgatcagtgtccccgtgatcattccggcaagaacgtccgtcggataatgcactccgacataaagtcttgaaaacatgatcagaaatgccaggatcaaagccggcaccccgatcttccctgggcatgtcagaaagatcacaacagccgctgcaaaagaactgccggtatgcccggatggaaatgaaagatccctctgcgcttctatgatacgctgcagtccatccacagcctcataaggccttgttctggcgaccagattttttaaaatgagattattaacgatcagagatcccaacagggaacacgtcatgagcacacctgttctccgcatcttttttacaagtaaaaatacgattgcaagagcaatccagatccatcccgcatctcctaaatgcgtaataaatgtcatgaccggcgtcagaacagcattcctcacatgctcctggatccacaataaaatattcccatctaactgcaataaaacatccatcttatgtattaccccgtttttttatgtttttacatacattttatgtttctactgctgccccgtcaatactttgttgagcagatcggcaagcggtaccatcgcattttttgcctccgccagtgtatttgtctgcgcccccacctcgatcagaagtgtcttcgggcaatagtgcatattgtagcggtatcccttcagataaattcttctggtaaatcccgggtaatattctgccgcctttaactgcatctggaacgatatcgccagattatctgcaatataaggattataaagatattcgatatcgcctgttttcgtcgtgcggctcaatccattaaaaaacatgatctgcgccatcggcacgccgttttgttccgtaaccagtctcgtattgtttccgactccgtcacggtgcagatcgatcacaacctcaatgcttttattttccgctaagatctgttctaacgcagggcctgcttttgcataggcatgatcgcggtctccgacatcatactgcccggtgtgatggatcacggaaaagccatatttttgtgtcagaagctccgtcagataatcaccgacaccgacgaccgacatggatgcatcacccggaacggaatccgcatacccttcctgtgaatgcgtatgatagatcagtatctgcggtgtggacgcatcatggctcaaacgtacatcctttccgagcagggcatccgcattgagctgtgtgctcccgatcgtcgtcgtattgtccacctgataaaaattctggatcagataatcaaaatcattcagcttttcccttgcaaatgtcactgctttgatgtctgccacagcggaagctgcctgactttctgctgcacctgcctctgcaatctgtgcctgctgattttctgctgcatctgcctctgccggctgctctccggtgttctccgccacacctggctctgccggctgccctccggtattctctgctgcacctgcatccgccgtctgtcctcctgcatctttttcatctgacaggctcgtaccatctgcgcttccgaccgatggtatcacttcccccgtcttttcatccacataattttcatctgcagcctcccgcgccagaattgcctcataagagagatcactctcgatctgcgtctggtatgatccactttcaggttcatagttttccccggaaaaaagcacatcgatcactttctccacaaaagaccactccgtctcatcttttacactgtaagacaaaccgggcagataaaaatcaagtactttttcgcagcagctttttgccccctcttctccaagctttgcaaagaaagatctgtttgtctgtaaaagtattccaatgacagccagcagcaatccccccagccagacggcaccatttatttttttcttttttaaatgtcgataacgataagcatacatactacactgtatgcacttctatttttcattataccatgaagctttgcttcttgatcgtgatctgcatgagtttcgcccggcagtcttattttactataatcccgcctgtctattatgccggcagtccttcccccataaatgcaatattgatgccttccgagatcgtgtagcttaatcttttgaccgactcatcaatatcttttggcgtcacaaacatcgcatttaaattcggtgagagaagttcccggatcagttcatatttttctccatcgtttaactcttttaacgaatccccaagcatatcaaatgccttgctctggctcatcgcagcgatcaggttaaacattgtgtcattgacgatcgttgcagcatccacaactgtcggtatcccgattgatatcacgggaatcccaaggctttttttattcagtccgtgtctatggtttccaaccccgctgcctggattgatcccggtatccgtgacctggatcgtccggtttaaccgcttggtgctccgcgccgccaacgcatcaatgacaatgacaagatcgggttttgtctcatcaatgatcccatgaatgatctcaagactttccatccccgtctgtgccataactcccgggacaatactgctgatccggttcacatttttttctccgaaagcatactttccatactcttttacaatgtgtcttgtgataaaaagattgtccaccacacgcgggcctagtgcatccggcgtaacttcacggtttccaagtccaacgaccagcaccgacagctcctcattttttttctggatcaactgacggatgatcttcgcaagctgtacggatatctctctgtgatagtcttcatcctcctcatccatatttcccgcctcgatcgttatataggttcccttgggttttcccatcgtctttgcaccgttttccgtctcaatgaccactgtgctgaccgtgatatttttgtcaactttctcttctaaaaaacggactcccttcagatcaacatgatcttcctgcattttttcctgcgtttcaagcgctaaatccgttcgtatctgatacataaattttcccccatattccaatgccctgctccggcatctgttatctttgcctatattatttctggtctgaaaaaaattatccataatttctcattattttactgttttacacttgacaaccacaaaaacctgccctataatataccagtatgtttacattgaactgtccgtgtccggctttaatgtaacaatcatgaacaataacgattacaaattggaggtgtacggattggctaacattaaatctgcaaaaaaaagaattttagtaacagagacaagagctgctagaaacaaagcgatcagaagcgaagtgaaaacttctattaaaaaagttgaggctgcagtagctgcaaacgataaagaggctgcaaaagctgctttaacagttgctatctcaactatcgagagcgcttcttctaaaggaatttaccacaagaacaattctgccagaaaagtttcccgtttaacaaaacttgttaacggtttagcttaatttttgaaacatagataaaaacatatatgcggccttaacccagccgcataataaaaacaccagtaccgtcatactggtgtttttttgattcataggaatttacgtactatgaatcaaaaagccctccgggcgggatcgcactgcgtcgaagatgaattatgtcgcgaagcgacccgccgcaggcggggaatcctgtgaaacagaattctttttatgttatttttctgaccggctgtacttcataataaaaagctctaccgccatctgatcattcatgcgtcctgtttttacggactcctctaagtcagctccatcataaagcgccctctttaactgcgccattgtaaatccttttgcctgtgaaatattccgttttaccgcaaacggcgggattcccgcatttttggcaatcgactgattgtccattccacgccctgccatatcacgcacatttaaaaggatctgaaactgtctggtaatcagaaacataatgcgcaacggaggttcttttaatgtcagaagatcataatacagatccagtgccttccgctggttatgctcggcgattgcattgaccatctcaaatatcttattggtcgtctgttccgtcgtgactgccatcacatcttccgctgtgatcacatcccggtctaaagcataacagatcagcttttctaactccctgtcaatatttcccatatctgttcctgtcctgcttaaaaaaagctgcatcacggatccggtgatgttttttccttctttttttaatctggtcaagatccagcgcgtcaaaagttcctcgctctgtgctgaaaactctacgatcttcccattattcttgaccgttttatacatcttcgaacgcttgtccacttcctcttccacaaaaataaaatgtgtcgccggtgccacctgcgtgagatattcagcaagatcctcacaggaacttttaaaaaatccgctgtcctcgatcaatatcactctccggtctgcaaaaaaaggcagtgtttcggcaagatcaatcacttctttcggattgatattctttccctcaaacgtcgtaaaattcatgttgtcatccggcgctgccattgcatttttcaatttgtctttatactgcttttttaaatatgcttccgttccatacagcaggtagatctgtttgaaatttccgcttctgatatcatcatcgatcgttttcattttatctgattcctttttatcacttatccagatacaaagcactgatattgcattacacttcgctgcattttcgctgcatcgaattacgcagcgctgcactaagctgctttgtactaagctgcataccacagtatagcatacattacctgacaaatacaaaccgcttgtccggaagtaaaaatttttgtactgccagctcatttttctttaaccgagtcactgtgatctgtccaccctccatcgtgtaaaacagtgcactccccgtatcccggatattttcaaccgccgctctgcccggatgtccgtatcgattcttttctgcgcaggaaatgaccgaaatccgtggcgaaaccgcatccagaaaactttttgtgtttgaatattttgaaccatggtgcgccgccttgtaaaaatctatgtcattgattcctccccattttaaaatctgtttttcctgctcctccccgatatctccggtaaataatgcagaaaaacctttttcctcgtacaataacaccagtgactcctcattcttatctgtgcccatttcatttctcatttcatcccccgcatgataccccggcgaaatggctgttatctttgcgtttccagaaaaaagcgcatctttccggctcatcatacagatttctgttccatgttcttttgccagtgaaaccagcttttcatagctctcatcccgcatcatcccccggaagagcaccagattcctgatccggtatccctcatcgaaaatctccaacagacctgagatatgatccagatccgtatgggaaacaaaccagtaatcgatctcattcacaccgtttgactttaaatacggcaggatacggtactttcccacactctgcacatttgtactgccaccatctataaaaatatcatagccgctgtctgtatgcagataaatcccgtctccctgtccgacatcaagcacggtaagtttcatcccttgtgaaactggtgtaaacaaaaaaacaagcagtcccaacccacaggcaaacaaactccactccattccccggtaactctttcttctcttttgccttccgttttcttctgtcatctgctgcatttctttctggcgctttgtcacatgagaaagcaaaaaaagtcccacggcaagcaacagatagtatacggtaatttttactgcggatggttttccggtaatcagcaacgcatgaggcagacccgatgcgatcgtacaaattttttcataaccgcttaaaatcacatggcacggcaacaatacgatatgcacgagtactgcctgcggcatcaccgcacaccccagcagacccccggcaattccggacaccagtacaattccaacaaacggcagcacaagcagattcagcagcatcgcatataccgggatttcataaaaataccatgccgtaaccggcagtatcacaagctgaagcacgaatcctgtaccaattttttgcagcaccgcatgcctctggtatgcgctctgcacaatttttccagcccataccacaccaagtaccgcaataaaagaaagctgaaatcccgcatcatataacgcaaacggctgtttccataaaatgagcagtgcggtaaaacccattgcatttagggaatcataacttcgccccaccgcctgcccaagcagaagaatgcaaaacatactgaccgcacggaacgacgaatatcccattccggtcatcatgccatataagatcataaacactgccgcaaaaattcccgatccccagaaaccaaagctcccttttcgcagcaatcggtacaatgtcatgccgattactgcgatatgtaatcccgatatcgccagaatatgtgagatcccggcggtgcggtaaagctgttttacctccgcatccagaagatttttttctccgagcagcatcgtacttaaaactccaccctcccgcacgccaagtgcctgttcatacacccctgccagatgatatttccattgatacattttctccgcaataagattcgcttttccgtatgcagacacttcatccacatcacttacggcaaatgcggtcccacgcgccttataataagccgcctgatcaaaatttccctcattgcgtgcccggttaaataattttatttttccatgtaaaacaagcgtttgtccgatagaacaggtgtcggactcaccatagatgatgatgcttgcagatatgcgctgccattcactgattttagaatcctgtctgatctgacaggatgatagattgtataaatactgttcgtttttttgctctttgccggtgagtttcccctttaaaaggatctcttccccatcttccaaatacggcagatattgattttgttccgcctgcacaaccccgcagtgatgccagcccaaaaataatgctgcgacagaacataccgccatacaccaccgccgtttccgaaccggatatctgtcactctccggcatccctctgtcatgtcctgtcacgattgcaggccagagcagaattccaaaaaataaaagccagaacgtccacggctttccatacacggcaatggaaataccgcagataaaccctgctgccatttcaagaaatggtcttttccccaatttattcctcctctgttactcctgtctcttccaatgaaacgacgtaatcaagatttctgtcatacatgtcgctcaatttaaaattatcacggtaagtgccactggtatccccattgaccgagatctgtactttactgatcgtagacaattctgtcagggaatccacgattgaatagatgacaaccgcctcattcacctgataatcctgatttttaaagttttcatccagactcacatagcagacaccgtccaccacggatacattgatcagtttcgttcccgccggaatcgcagattttgccccctctgtctgcggtccctccaaaagctgttccatgatcagtttttccatcgacacgttgctgctgtaatagacatcgcttcttgtctcctccaccagtccgtcaccggtttcatttgcaaaataaagttttaatgtcgtacattggattgaattgatctgttctcccggattctcaataaaactgtcctgattcatgcttccgacaatattgcccctgatatccgtaagcggtgcatctgccacataaaatgatacacagtccacccctggaatctgtgtcatggtaagaaccaccgcagcacggcacaatacttcttcaacctccgtcatactgctgtaatccgcatcaaaatggatcgagagcatcacgccgtcaagcgaataatcggtaacctccaccccgtttggtatcggtttgcggtactcaacattgtcagaatctgagcttaactttgctaaaaattctttgatcatcccatccgtatccgaagcctccggctcatagggaacatctacgatctttgttttgtccttattcagatattcgatattatattcgctgctcacttcatcatttccgcatccagccagcaaaaagactgccaggatacatcctgacaacagcacaatgatttttttatccataatctgacctttcattttcaatagatccaatctgttatgaaatataattgagcggaatacgaacattaaagatcgttccctctccctctgtactgaacaccttgatcgcaccacggtgcatcagtactgcattccgcgtgatggcaagaccaagtccggttccaccgatctccctggagtgtgacttgtccacacggtaaaaacgttcataaatatgtcctaacgaatcttccggtattccgattccggaatcttctactttcaggtaaaaatattgatgatccgcattcagcgaaacatgtacccagccgtcttccttgttgtatttgatcgcattttcaatcaaattggtaaacgccagagtaatctttacctcgtcaacatctgcgctgaccgggcggaaactttcaagcacaagctccactttctgcttgtccgcgatcggacgcagacgttttaagatctgctctaacagttcattgatattgatatttgtgatattcagatctcccgctgccttgtccatcttgactaatgaaagcaggtcattgatgatcttcgtctcacggtccacctcattgccaatatctcccataaactctttgtagagttcgatcggggcatcctccatgctgttgatggaatccgccagcaccttcatggaagtaagcggtgtttttaattcatgtgacacattcgacacaaactcctgtctggaatcatctagcaccttcattcttccaagcattttattaaatttctcactgatcagcttcgtctctgtataatcattgacagaaagcgcatcctcgccataacccgtctggatctcatcaattgattttgacatcttatgaaacggtcttactatctgtcctgcaatgatgacgcttgcgaaaataactgtaaaaatgcagatcagttcaatgatcctcgtgttcgttgcaagataatccaggttcaggctgatactgtccgttgacacgctcaccatcatgacacctatcacctgtctgctttcattttcctgatccgtgcgcacaagtggtattgtcatctcaatataacgatattttgaatcatatttcgtaatctcctccccgtaaaagcttttgatgacttcctctgagatgatcgtctttttttcatcaagcttataagtatctttcactacctgaaaggtgtcactgatgatcatgacacgcccgtcatagatagtggaaagctgctcgagctgtgcgttaatggtaggagaaccggaattttccagataatcatttgacacgatctgattcgctaaaatctttgcctggcttaagatttcgctggttcgaagtgaaacagccctgttttcataagaattgagcatcccgatccgcaaaagaacacatgggatcacgcctataagaataagtaaaagaaccagcctgaatctcaggctgttcataaaatctgtaaatttttttaattttgtcatggctgcaccttactaattctgagaataataatacccaacgccccatttggtatgcacatacttcggctcgctcggattgctctcgatcttttctctcagacgccgcacatgaacatctaccgtacgcacatctcccggatattcgtatccccacacaagattcaaaagattctccctgccgtagactttgttcgggttgttgacaagaagctctaacagatcaaactctttcgcggtaagattcacttctttccctaaaataaagagtcttctgctctcacagtctaatttcagatcacctgcttctatgactttgctgtcctcttttttcggctggctcgccgcagtacgccgcatgatcgctttaattcttgcctttacctcaaggatattaaacggttttgtgatgtaatcatctgcaccgtactctaaccctaagatcttatccatgtcatctccctttgcggtgagcatgacgatcggcatattcgaaaactccctgatatgctggcatacctcaaatccatccatcttcggaagcatgatatcaagaagcaccatgtcataggcattttccgttgccatctttaatgcttcctccccgtcatatgcgcagtccacttccattccgtcctgctcaagactgaaccggattccctttacaattaacttttcatcatctacaacaagaaccttttttgccattttacttcacctttatatgatcttttattcgattataaacgccctctttgatcccctctacctgcttgatctcctccacagaagaaaaagaaccatttttctcacggtaacggataatactgtccgccttggtctgaccgattccggaaagcgtcataagctccgctgcagttgccagattaagatctattctgccatctgaatcttgggctgtttcgccatccactcccgtctccgttcgttcccctgcttcttctaaaccatccttagcagcttcctcctgcgtcagaatgcgtaccatctctccgtccacgatctcccgcgcctgattgacagactcctctgccgcatcctccgtcagaccgccggctgcctcaattacctcatagagtctcgcattttgcgtgacctcataaactcccggtgtatttaccgccccgcagatatatacaaaacatttttcagtctgtatgccgttctcctccgatatctgcgtgtcatccgtctcaggtactgcctcactccgctgcgtttctgccacggatgtctccgattgaaaatagacgttttctttctctccacatgcagctgccaacaggcaaatgcatgaaaaacatagtacttttataaattttttcgtcataagcgtctccttcttcattattccagaaggagtcctcaatgcccactctctatattttaacgaaatttttcatttattacaagagtgtataaaatttatttcatttatttttacaaaatttaaaaatattcggcaattttttcctttaaccctacccagaaatcttttgcatcctgggaatccggcagtaaaacggcatcctcgtatgcctgataagcggttttttccgcatcatctgcagtctgtgataaaaataccgaataatgaccactcatatcatgcagtctgtctgtaagccgcactgttacaaaatctgcaaaatccgctgcctgatccgtattttttgaaaaatcattgacaacaaacatatccgtagatgcacatccgatagaaggaagttcctcattcagtgccgggatctccatcacagaataagatatatcgtctaatttttgcagggaatctgtgtttacaaacgcacagagtgtttttccggatttaaaatgttctaaaatgctgtccatggagactgaattgatgtctaaggaaaatgatcctaaaatggtttcaaagtattcaagatctttctgatacagatcttcatcataggccacattcatcgtttccggcgccgttttctcaaacgttacactgtttccaacgaacgggaaatcgtaaaatgcatcatttacatcccactctaacaggtattccacattttctcccggttcattctcattagaataatcaatgatcgcctgcagtgactccggctggttttcaaaatatccgttctgataaacaaacacatttgcatcgtaactgagcggatatccaatcattttatcctcataggtggaagctttcactgacttttgggatgccccctcataagatcctccatcctcattttccatggcaagaccatataaatatgcctcctcaagctcatcgccatttaacagataaacatccggataatcctctccctgcatggtattgtcgtaaatcatcccgatataatccagagtatcctgacatttgaaagctgccttcacacccgtctgttcaaaatactgtctggctgcatattcaaaaaaatcttcataagatggatcttcataccacacggtcaggtctgtatctgccagatcgtatgcatctgttttcacatccggctgttttccttctgtgcccggttcttctgcctgcaacggaaatgtcgtctcttttacaggctgttttgaaacgacaccagccataatggctgctcctgcgcaaaccactatggctgcaattacacttctcttttgtatgttcttcataatcccattttcctattcctcgttttacgacaacagactgcacacatccgcgtgcagtctatgattccttacatctgatccaatgcttttttcagttttccgatcatctcatccacatgttgtttctcgatgatgagcggtggtacaaaacggagtacgtctgaacctgccgtgatcacaatcagtccttcctccagtgcctttgcagcgatctgtccgaccggcttttcagataccacaccctgcatcagtccaagtcccctgcgtgctgtcagaaaatcgtaggaagctaccagttcatctaatttttcttccagatatggtgtgatttctttcacatggtctgtgatgtggtcgcgctccatcatctcaagcaccttatcaactgcagcaccgacaaatgggtttccgccgtaagtcgttccatgatcgcccggttttaaagatttttctgccaccttttcggtcatcaggaatgctccgaccggaacaccgcagccaagcgcttttgcacttgtcatgatatctggtttcacaccgtaatgctgccatgcaaacatctcaccggtccgtcccataccgcactggatctcatctaagatcagaagaatatcatgctcatcgcagagtttccggacaccttccataaattcttttgttgccggataaataccgccctcgccctgtactgtctcaaacaggatcgcgcatgtcttgtccgtgatccgttttttcacgctgtcaaggtcattgtagtctgcaaatttcacacccggcattaacggttcaaacggttcctgataatgtttatttccggtgacggagagtgctccgatacttcttccatggaaagaatgattcattgcaatgatctcatgtcctgcatgtccgtctctcgtgtaagcgtatttttttgctgccttgattgcaccttcgattgcctctgtaccactgttggtaaagaacacacgatccatcccgctcgcttttttcacacgctctgctgcatggatgattggcacattgtaatacaggtttgatgtatgcataatcttatcgatctgtgcttttaaggcatccccatactctttgttgccgtatccaaatgcctgcactgcgatgcctgccgcaaaatccagatattcttttccgtctgtatcatacagataaacaccctcaccgtggtctaataccagtgaaaaacgattgtatgtgtggaggatattttcctccgcctcattgatatatccttctttattcatgataaaacttcgtctccttatctcctaaaatggcagttccaattccgcggttcgtaaagatttcaagaagcaggcagtgtgcgatacgtccgtctaagatatgtactcttgaaacaccgttctcgatcgcatcgatacagttgtttaacttcggaagcatgccgccgccgataaatccgtccccgatcagttctctcgcctctgatacacgaagctcagagatcagtgtatctttgtctttcggatctttgtaaacgccctcgatatcggttaaaaatgcaagtttttcagcttttaccgcttttgcgatcgcacatgccgcatcatcggcattgatattatagctgttgtattctgcatccattcctaccgggcagatgatcgggagaaaatctttttccagcagatcatataaaatctgcggatttacctctgtgatctcaccgacaaaaccgatatcctcaccatttgagtatttcttttctacttttaacagtccaccgtcttttccgctgatgccgactgcattgacgccaagctcctgtaccagtgtcaccagtgatttattgaccttatttaacaccatctcggcgatctccatggttgcctcgtccgttttgcggagtccattgataaatacaggctccatgccgactttgccaacccatttactgatttctttgccaccgccatgcacgatgatcggcttgaatccaaccagttttaacagggtgacatcctggatgacgtgtttttttaattcttcatctaccatggcgcttccaccatattttacaacaatgatcttacggttgaaacgctgtatgtatggaagtgcttcgatgagcacttcggctttctgcaaaagttccttcatattgttatcttccattagtttggttctcctctataaaatcttgatattgccgtacgaaactctgattcaggttgtgtttgctgtgaccacctgcctatgagcggtaatcggcgttaatttttacatagtcgtaggttaagtcgcagccccaggcggtagcctgtgcagcacccattttgatgtcggcgatggcggtgactgcgggttcggataagattttggttgcttcttcttcgctgtagtcgacggcgactccgtctttgatgatctgcatttttcctgcagcactctcgaagaataagtctactttttccggatcaaactgtgcgccggagtagcccatggcacagaggattctgccccagtttgcatcgtgtccgtagatggctgctttggtgaggcttgatgtgatgacggatttgcttaagatctttgcctgctcttttgtctcggcaccgattacttttacctcaaacaacgcagttgctccctctccatctcctgccatctgttttgcgagtgtctcattgacaaagcggagcgcctttgtaaaggtctcataatccgcatttttctcagtaatttttgtgttctctgccattccgtttgccaacaggagacaggtatcatttgtggaggtatcgccgtccacggagatcatgttataggtatcttccacgtccgcttttaatgcctctaacagcagctcctgtgaaattgcagcatcggttgtcacaaaacttaacatggtacacatattcggatggatcatgccggaacctttgcacatgccgccgattgtgacggttttgccggaaagctcaatctcaacagctacttctttttcatgtgtatcggtcgtcataatcgcaagtgctgcattatgtccgctctcgatatcgccatttaattgtgggaccatcgtttcaactcccgcacagatgcggtcgatcggaagctgcataccgatgactccggtcgatgccacaagcacctcatcggttgggatctgaagcagtttgtttactttttctgcagttgctttgcagtaacccatcccctcttctccggtacatgcatttgcaatacctgcattgacaatgactgcctgtgcctttttactgtcatatactacatgctgatcccatttgaccggggcagcttttacaatgtttgtggtaaatgttcctgccactgcacatggtacttcactgtagatcattgccatatctgttctgtctttatatttgattcctgctgctgtacttgctgccttaaatccttttgctgcggtcacgccgcctttgatctgtttcattgtaacctccattcctgcactgctttctaatgtaaacaaaattttcatttgcatctcaagtttgtgcgtaactcaaatccttcatgtaaaaattgtatttttcgcactgtctgttcctgtgttttacggattaaatacggtctggttttcttcgtttgtgacatattcataataattgacatcctcgcggaacgtccatcccattccctgccagaagtggtttccgatgtcatttttcttaaatgcaatcagattgaccttgttgacatgttcacgctttaaagccgcaaggcacgcttccaccatcttctgtccgatgccctgctttctgtaatcctcatgaacgcagacatgatataaacatccgcgcctgccgtcatgaccgcacaggattgcaccgatgattctgtcgttttcacacgccaccatactcgtggtcggatttcgtctgataaagcgttccacaccttctttcgaatcatcaatactccggattccaaacccgtgaatccccatccacagtgcatgtacctcctcaaaatcctccattgtcatctcacggatgtttacttttttctcttccatgtctttgattccttttccagcataactgtttcgtccagttactttttacctcttattaaaaatataattcagtgtattactatgtaatctttattactatgtaatctttattactatgcatccatctatgatgcttacgggaacatcggaaccatatttaagccctctgcctcatcaaaaccgaataacaggttcatgttctgtaccgcctgtcctgctgcaccttttaccaggttgtcaagtgcgcccatcatcacgatacgtccggttctctcgtcaatcttaaaattaacatctacataattactgccctctacccattttgtctccgggcagacatctttttccagcacacggacaaatttttctttgccataatatttatcatagactgcctttacttcctcataagaaggaaggctgccatctgctttttttaccagtgctgcatactcggttgcgaggataccgcggttcatcggaacaaggtgcggggtaaaattaacaacgatctctttgcctgccgcataaccgagctgctcctcaatctctggcgtatgacggtgatttgtcactccgtacgctttcatattttcattgacctcacagaacaggttcggcagctttgcaccccgccctgcaccggaagttcctgattttgcatcaatgatcagcgtattcgggtcgatcagcccctcttttaccagcggataagcggtcagaatggaacaggtcgtatagcagcccggattggcgataagtcttgctccttttactttatcacgattgatctcgcagagaccatagacagcttcctctataaactgcggactcttgtgctcgatcttgtaccatttctcatagacggaaacatctttgattctgaaatcagcgcttaaatctatgatttttaccttatttaatatatcctctgtcagtacacctgccaaaaatccctgcggggttgctgtaaagatcacgtccacctggcttgcaagctcatccatattatcatctaagcatacgtcatccacgatctcaaacatattctggtaaacttctgcatattttttatctatgtagctgcgggatccataccatttaatctccacttctttatgtcccattaaaatacggaccagttcatttcctgcatatccggttgcaccgatgattcctgcttttatcatttttctcatcctttccgctcatgcttatctcacatgatttctgcacttttcagcccattattgtatacaggcatacctgcataagcatctttcttcctatattaatacacctcatcgcagtcgtaaagtatcttttttcgtgcgctgttcgatattgcataattatacattcattttgtcttttatgcaatactattttttgtctttttcctataatatgtattatacttaactattttctccattttgtataatctttatgtatttttatgaataatgaatgtataatttttcacttgcgtttctacattttttgttgtatattgtctttagttaatgatccggcatacaaatgggtcaaatatacataacagaaagggctgtatcacatgaaggaaaaagttattttagcgtactccggtggacttgataccaccgccattattccatggttaaaggaaaattatgattatgaagttatctgctgctgtatcgactgcggtcaggaagaagagttagacggtcttgaagaaagagctatctcctgtggagcttccaaattatacatcgtagatatcatcgatgaattctgtgacgattacatcatgccatgtgttcaggcaaatgccatttatgaaaacaaatacttactcggaacctctatggcacgtcctctgattgctaagaagttagttgagattgcaagaaaagaaggtgctactgcaatctgccacggtgctaccggtaaaggaaacgaccagatccgttttgagctcagcatcaaagcacttgcccctgacttaaagatcatcgctgcatggagagattcaaaatggaccatggattcccgcgagtcagagatcgaatactgcaaagcacatggtattcatcttccattctccgctgacacaagctacagccgtgaccgtaacatctggcacatcagccatgaaggccttgagttagaggatcctgcatgtgagccaaactatgatcacctgttagttctcggtgtttccccggaaaaagctccggaagaaggcgaatatgtaaccatgacatttgagaaaggtgttccgacttccgtaaacggaaaagagatgaaagtttccgatatcatccgtgagttaaaccgtcttggcggtaagcacggcgtcggcatcatcgatatcgtagagaaccgcgttgttggtatgaaatcccgcggtgtatatgagactcctggcggaacgatcttaatggaagctcaccagcagttagaggagctcgttttagaccgtgcaaccatggaagtgaagaaagatatgggtaacaaacttgcccagatcgtttacgaaggaaaatggttcactcctttatgtgatgcagtcagagctttcgttacctccacgcaggaatatgtaaccggtgaagttaaattcaaattatacaaaggcaacatcatcaaagccggaacaacttctaaatactctctgtacagtgagtcactcgcaagctttacaaccggtgatctttacgatcatcacgatgcttccggattcatcacactgttcggacttccattaaaagttcgcgctatgaagatgcaggagatcggtgagaaaaataaatatgaggactaatcacaggatgtgattatggttctattaattcatagcggacaatttcctatgaagtaaaaaaacaggagcttgtgctcctgtttttttactttatactgccttgttctgccatccatgaaagagcctgattgtgactgtgcctctgacatctatgattctcactgtctcagtgcttctaccaacaatttttcaagatactctgctgccggtgtaagtgccgcctcatccgcataaaactttggatgatggttcggataaccgactcccgttcccacgttgataaaacagcccggaatcttttcgagataaaaagcaaaatcctctccacctgtcgaattacgctgtggaacaacctcaaagccactctcttctgccactttttgtgcaaacgcactccacgctttctcattgacggttgcaggcggccccggataccacaacaattccgcatttgcgccatatgccgctgctgtgtgttccgcaatctcacgcatgcgtctttctataaagatacgatcgtctttttccatggaacgcacggtaccctccagttccaccttatccgggatcacattccaggtattgccgccattaatcctcgtcacactgacaacacctgtatggaacggatttaagtttctgccgacaatactctggaacgcctgtatcacagatgcagctaccaggatcgtgtccacgccctcatccgggtgtcctccatggcagcctgttcccgtgatatttaactcaaaccggtctactgcagccatgacactgcccgcgcggattcccagcgttccaaccggaagatatgccgccgtatgcag

SEQ ID NO: 5132 - DNA, 15753 bp, Unknown
  gut microbiota DNA sequence
caaattctcccgatccaaaaatcgcataagatgcatggatattcagctttgccgttccaggcatcagtttcattgcctcttccatatctaccatgagctgttccggtgtcttcgcacgtcccatataatttccggttgtctggattcctccggtcagtcctccgtcattatcaaacccgatcacatcatcaagctgccagcagtgcagtgataccggaacctttttcaatatctcaattgcctgatctgtatccacacctaatgctgcatattttgcttttgctgcttcgtaacctgtcatattttacttttcctttctattctgtatcctgattacttgtaaaaatatttatttcaaacgactctgcaatacatgcccttgctgcctttaggtcttttagttctcccgccgcgatcatctgtgcagcaaagtttccgactgctgttgcctctgtcggccccgcatatacgtttttccctgcatactctgccgtcagttcatttaaataatgtgcgtttgccccgccgccgacaatctgtattctggaataatcaatacctgtcagtttttctatttcctctgccgtttttgcataatactttgcaaggctgtgataaatgaccgcggctaattcaccaattgtctgcggaatctgttcccctgcttcttcgcatgccgattttacttccgctgtcatattttccggtgcaagaaatctcgcatcattgacatctacaaaggatctgatcgtttcttttgatgcaagtgcacaaatttctccaaatcccatatccggtgcgctttcttttttcactgactgtatcatccataatcccatgatatttttcagatagcggaatctgtaatcataaccgccttcatttgtcatgttatgctgcatactgactttgctgcaatctgcctcttttaactctgttcccatcaatgaccatgtgccggaactgatataaagtgcatgctcctcctgcgttggaactgccatcaccgcagaagcagtatcgtgcgttggcggaagaactactttacaatcaaatccaaccctgttttgaatatcttccgtcagtctgcctaattcatatcccggattttgaattttatggaaaattcttcgaggatatccaagcatatctatcaattcaatatcccaatcttttgtcacaggattcacaagctgggtcgttgtcgcatttgtatattcctgtacctttttcccagttaatagaaaatgaaaataatccggtatcattaacatactttttgcccactcaagctgccccggctgctgctctttgactgccatcagctgatagatcgtattgaaaatctgtttctgtattccagttcttccgtataaatcgtcttccggtataaactcatatactttcctgtccatatcttccgtccgtctgtcccggtacgccactgcatccccgatacgttcatcattttcatccagcagaacaaaatcgactgcccatgtatcaatacccatactatatgggatttttcctaccatggcacattttttcatcccagtcagaatctcttgaaataactggtccacatcccatactttgtgaccatttttttcaatcatgccatttggaaaacgatatatctcttccaaaacaattttgccgttctccaggtgcgaaagcatatgccgtccgcttgaagcaccgatatccacagccagataatattttgtattcatcccttactcctttccttctcttttgctgaatttaagatatcaaaaataaggacagttttttagactctcattcgactaaaaaactgtccttattttctcttcgtaatacttttcgtctttcttttattttgtctttaaatttgctgaaaactattcaactcttccaacagatatttcgaagagtcaacattttttatcacttgctcgtgaatatttaaaattgaatttgcaagtttggtcacattttctgttgcattgcttactccacgcacattttcctctactacagctgatatatttgtaatgccatcattcatctctgccataatattacgaagagacataatatttttattgaaaagacctgtaatagtatccatatgatctgccttttcataatacatatctgttgcagcctcaaattcaacataatcattcattatctgattttgtatgaaattcatgagatcttgtgcatttgtcatcaattgattgactgccgcaataacacgaacactgataccctgaatgtcatttgccgtattcttactgttttctgccaattgacgaatttcctctgcgacaacagcaaatcccttgccaacttcccccgctcttgcagcttcgatagaagcatttaatgcaagcaaattcgtctgacttgcgatctcaagtatatcgttagttaaattattaatactgctgatttgccgactttcttcaatggataaagataatgcctgactcttttcgttaataatatcagaaatgtctgttttcttcttctctgtctcctctttaacaccaaccgctaatgctttaatatcagaggcaattacaacaccttcattaacttgatttccaacatcgttaattgaactcactatatcattggtgttcccggtaattccctctatagaagatgatatttcttccatactcgcagtaatttcttccatggtagacgcaatattatctgcattttcatttgaattgtttacttcttcattcattaatccaagtgaactttgcattatttctgactgctttcgtattttttgcatagcattctgtaactgaatgataaaattgttaattccatccgataactgaccaatttcatcccgcgaactaacagtaatacgctgcgtaagatttccctgtttcttattgataccatcaataatatcatttagctgccggctggcttcacttgccggtttacttacagtcttacttataaccaaaaagacaactactgataccaaagcaaaaaaagaaaatagaatttttgtcattattaaatttgtctcaacagcttgattatattccttcgataaatcagaaattccctgctcaagctcctctgtaagctccttttccgttgtttctcccatatcaaccatcagattctgaaaatctacaccaagagctataccagcctgcacaaaatcccccttgtcaacatacccttgtattatggcaaattgcgaaataacctctgttaaaaaatcctcatatgtatggattttatcttttaactctacattatcgatatttttcagatattcatccatcttactctcacttgccgtaatcgtcgaaatttcctctgctagtgaactttccaactgttgacgtagctctgcatcatcatacaaactgataatgttaagatatttctgacctcgttccatacttttttggatagtgaaaatctctgtctgaatcggaatatactgtttcgttatctgcaatccagcctgttttatactattctgcattcttatagaaaacactgtatttaatccaaatatcaaaacaaatataataatcattaaaaaaactttatttccaatttttttcatacaaataccccactcttatttttcagaataatattttcgaagaaaataagcaggcgcacaactccaggcatgacagtaactattaacaatagtcccaccataaggtgattcatccggattatttggattatataactcccaaaacgtatccgcaccaagtcgtgccatacctccccaatatttctccataacactaagagcctctgttttatcaccacatttaagtaatgcttctatataatagtgatacatatatggggtaatcatttcaattgcctctgtctgtgtcgcaacatcatgtaaaattcgaattccactctgctcatctacaacatcaccaagaatcatccatacctggcttgcgtaggaaatctgcctgcaatcaccactgacaaatagtcctttttcttcatcataaaaatgcatcttagcagcttttctataaagttcataagttttcattatgcattctgcatcatggtcttttccgatttcttttgcaatggcaacggcacttttcatcgcatacagcaaaacaccctgtgcacctgcctgcttatttaattccagtgaccagtcaagaaaacaccagccgagtttattgcagtcttttaccacaccatcattaccgacctgtttctgtgccaatacaatctgcatttttgctgtttcccacaaatcttcaagggcctcacgatccttcgtttctacataataatcccacagggctgccacaaacaataaagagtaatcaaacatactggtatcatctacttccggttcaggctctaaaaatacacatgcacccacctgtccattttgcatcggtaatgcagcaaataaatataaacacccctttaccatatcattcatctgatatgtctcatagtttgccaatgcctgtaatcgaagatctcccatccaaagtcgccgatcacgttttggtccatcttcaaaaactttctgcatacaatcatgcagtgtatggcacgcaatatgatcaatctgctccaattctttatgcacattatgatatggttttaacttactatcatctgcagaagataatgcgattgccatgacatcttcaataaccaaattaaattttgaactgatatcaagtatatcaattttcacatagcgaaacgaataacgcctcggcaaagtatactctcccggaatcagatcaaaatgaagttgttcctgttgtacccacgctgaacagatccatccctgataattccccacattttcttcaaattctttcaaattctctgcaaaggaaaatctaatccaaaccggagcatctggatgtgaattgacataacccatttttacttgaagatgtcctaccaaatgtttcccaaaatcaattgttaccgaatcgccttttcctaaaggttttgaaaaaaactgtccctcttttggaggaaccagtgtctccttaacttccggcaataaacttaatgccttacttaaaaattctaaattttttttcatgtatttgttcttctctcactcttaccattttaagtattcttttccacaaaacggatctaccggactcttgccagtaaaattgcttcttcccataagtttttccatcacactatcaattacatactcactattggaatagccattgataaaggtttttatcatgggtacatccacaagatgatatggattagcaaggctgataaacacaaccggtctctcagcagcaaaccatggaacgttatttccatttccccagaatgtataccatgaaagtcggtttgtcactttattggatgcattttctacatttccaatataaatgaccagatcataattcttccggaatgtgccaacatcaaattttgctgtttcaaagttctcctgttcatatacgttaacttcgaacccctcctcaaccaatcgcttacgaaagctttccaaaacacgctcatttgatggaaacccacctatgatttccagcaacacctttttggtcttatgcggattcaacggtaaaattccatctatatcctttacaagtgtaactgccttgtctgcgctctttttagcccatgcaacatgctcatcagcctgcagaatacaaagtgcactttccgaaggcacaatttcacactttgcttttctgtgaagtccaagcgaagctttagttgcaagaattcttgtgattgcttcatctaatcgctgttccgaaaggattccctgcttgtatccattcagcatatactgataatcttcctcaagatccttattaaaaaggaacatatcacatcctgcctcaatcgcataaggaactgccctttctctgttcattgcacagctaaaacctaccatgcaggtagaatccgttacaatcagaccgttaaatcccaattttttacggagcaaaccttttaacaattccgatgaaagtgttgccggtattaatttatttggaaaatctgtattatacgatttttgatatgccggctgtgcaatatgtccgaccatcactgtctgtgcccccgcctgaatcaagccgctatatatttttccatatgtcgcatcccactcatcacaggaaagattatttacgcttgtaagaatgtgctgatccacttcatcgcagccatcccctgggaaatgcttaattgcaacaagaacattttcttccttagctgccctcatgtaattgagaccacatgcaagaacacgatccggatcatccccatatgtacgcacgtttgtaatcggatttctccaatttctatcaatatcaaccacaggtgcaaaagcccagttacaaccaaccgctgcaccttcactacagcttacttttccgagccgatatgcatcctccgtgtctccagttgccgcaacctgcatttgttttccgtactgtgttccatctgttgcaattccgcagcctccatcctcaagattagctccaataagaagtgggatcttactgtgttcctgcagataacggtgtgtccgctgcatttccttcgcctcaccacaacgatacataattccaccaatgtgatgtgcgagcatgacatgttccagatattgcggatctccggaatacccgattgggacaaacaactgacctattttttcttctaatgtcattgacttttttgtattttcaacccattcaatgtcttcccctgaaaggaagaatggattctttgttaagttgatcatattcataccctcctgctttctattttcgttttccgttaaaaagacttaccaataaatgttcattactcaaataaatcaaaaagactacaagcagtactgcattaatgattgcctgcattgatgcatttacctcattggagaatacagcaaatgttgaattaagcatggacatacataaagcagctaaaaggaatccaattttttcgtttgtaaagcgactgatataggagcctatgaacattggaagaaacgccgtaaacataatgctgatagaggaaaagttcaactgaccaccgttgattgttgtgcttcttgtcgcatttaaaaatcctacaattcccatcaatccgccacagatcacataacatccaatggcatttgatatctcttttataccggtatttaccgcaaccttctgaccatttttgagtgcattataatcatatccaaactttgtgtaatcaaagattgctatacagacagctaacacaaccacaataatgattgctgcataaatccagcttcctgtaaaagctgtcatagatggattctgcacttccttcatcacataacgtccttccgtgattgtaaaaagaattccctcatagatcagtgtcactccaagagatgtaatgattggcggcagatgcagcaccacatacataagtcctgaaacaagtccaagtaacataccaaataagatcgtcaatatcaacatcatcaatgcactgttacttccaccacctaaaatggaatatgtaattttagctcctaatacagaagaaagtgctgccattgatcccaaggaaaaatcaaaacgaccactatttaaattaatggataatgctattgttgtaatcatcacaattgcaatatatacaacaaagttatcaaaacctgtcatgtttgaaatcattgtttttccattgaacatgcagattccctgcaataatacagccaccagtaccggtattgttaatgtaccaattacattctttaccaaatgtctatttttatttttcatgttgtcctctcctttcatttttcaggatattccataccctctccaaataaatgaatttttaacttttcatttatttggagagagcacggcttctaaatgaagccgtgacctgactgtaaaaatgaattacttcgatgttacaagttcattgatctcatcaaaagtaacagactcaccaataatctggtctaatgtttctttattgtaaattggattatctccgttatctgacttataaaactcatcaaatgtagcctcgtcagttgcaacctgatagttttggctgagtgagactgcatttccctgttcatcacggattacatttccattgatggcatttaaaactaatgcaaatgcaggacctacagaagatgaatatttaccggcaagatagacaagttttccatttgtgatagcttctccattactctgtgtaaaggaatcaatatctgagaactcaataccagcagcatttaactgctgtgtaaaaaatgttgttgccattcccactgaaataaatgcttccggttttgcctgaattgctgcattgatctcatctgttgttgtatcaccatagccctgcagataagaaacaatctggatatccccagaaatcttagacaaatccacgctctgatcagtaaaaatcttgcccactacttctccctcttctgtagcaccatcataggaaagtcccagaccggaaagtacacccgctacacggtatacatgcataggatttggaataaatgccccatagatagcagctgtcttaatgcctttttccgcaaagaacctgcccatttctacaccagcttcatactctgtatccatgcttggtccaacctgaccaaggaagtactcatttgtcttatatttttcaaactgctcctgatcaagagttccagcagcaaccgcataataaatctgattttcctcacaggtttcaatctgcaatgcacgatcattacttgaaagagagatgactgcctgatatccctgtgaagcgaatttttctatagcagacttctcgcttgccgcatctttaagttcatcggtataagtaaatgtcacaccatactgattcgcaacataatcttcataataagtacggaaccctaatgcttcctcgccactaacatcctgaactaaaacaccaatcttagcattctctgctgtctttgtctcctccttgacacttgtatcactcgtatcatttgctgtgttgtcgctggctgtattgtcagctgtttctttgctgtttccacaaccaaccagcattgtcaacgatatggcagcaaccagtccaaggcttaccattttcttcattgtacgtttcataaattattcctcccatttctcttattaaaattttatttttaacacgttatgtgttaaattcatatttctgttatcgcggcaacatctgcgaacgataatttgcacttgcaacataaacaactaccagaaaaaaaacagcactgacaatctgtgtaattccatatccagatgttgaatcaatcagcagatccagaatattatttaaaataatataggaaaatccaccgactacagccgcataaattttcgatcttgcacctcctgagattggcatacctccaaacacgatagcaaccataatgttcatccctatatcccccgctgtcgttgttgtaacagatggggtataaaccagcgtcataaatgcgccgattccaacgccgattcccgccagaaggaatccaagtattgcatatgtattgtatttaatacctgaaagctgggcgcagattggatttcccccaacaaacttttcacgtcttccaaacttggtgtaatcaaagatgaacgcacatactaccacccatattaccaaaactataattttaaatgcggatgtatccaaatgtttcactacctcactcggaatgctgattccgcctactgcaccaccttttgtggtaatgatctgtgatgcaattgcagacaaaacagacatcattgccaccgttgtaacaaacaccggaatatgaaaaatggatgccagcacagaatttaacaaagaacagacaattccagacaataaaatcacaacaatcattaatataaaattttcagttgcattatatgtcattaccccaagtgttgctgaaaaaagcgttgccgcacccaagctgatatcaaacgaacctaatgtataaataaatattgcacctgttgcaacaatggataatacaataccttcattaaatataatcttgatatacatatccaggcgatatcccttactgcttacaattccacaaaatactgcaaacaatacgataagtgctgcaaacggcaatgcacctatcattatttttttactttttgtcatctttcccagcctcctatatcatgtactcaataatctgtgagtcagaaagatttttatttctctcaaattctgccgtaatctctccgtccttcatgatcaaaatccgatcactcattccaatgagttccggcatttcctcgctgatcatcagaatggattttccttcatttttcaacttaaccataagctgatacattgcctgctttacaccaatatccacgcctcgtgtcgggcagtccagtataagaatttcacttccgcagccaatccattttccaaatacgactttctgtttatttcctcccgagagttgtgataccgcctgatctcttccagaacatttaatggacaattcctcaatctgttgatttacatattttttttcgcgattttttaaaacaagaaaatcttttacggcaaatttgctcattcccgcaattgatatgttgtcttcaatacttgcattcaaacataatgattccacatctctatccttagacacataacccatacgtttcttcatcgcttttgccggactgtcaattaccgttccatctgccactgaaacatttccttcttctggctttactgcaccaaaacatacctttccaagtgtatgcattccacaatgtgccagacctccgactccaacaatttctccccttcgcacctggaaggaaacacctttcagtctatctgtataaacaagatttttaacattcaacgcaacttcctgctgtgcgcttgcttcaaaatcacttcgataataatccccctgcagttctcgtccgatcatgcttgaacgaattgcacccgcttcaaactcttctttattaaatgttctgattatttttccatctcgaagaaccgttaaagtatcacacacctccataatctcatccagatcatgtgaaataaaaatcactgacttattttctttgcggaaacgattcataatatcatataaaatttcccttccatcatgagataaggcagtgcttgtctcatcaattaccaaaatctgaggctgtttcatcacgacctttgcaatctctacaagctttcttgtctgaaaatccagctgttgcataagcatatcgccagtaatatcatttaccccaatttttttcatgacttcagttgcatctgcattcatcttcctgcgattgatcaatccaaacctgtttttatacctctctgtctctgccagaaaaatattttccgcaactgtaattcccggtattgttccgctttcctgaacgatcattccaatccccttgtgaagtgcatcaatcatactaagaggtttccagtcctgatttttaaatatcatcttaccactatcgcatgcctgcattcctgctacaatggaagtaatggttgactttcctgatccattctccccaattaatccccgaatttcccccggatatacagaaagtgacacatcttttaaagccactgtacttccgaatcttctattcatgttttcaacttttaatattggttcactcatgtttatcacctcgtctttatagatattataagttttcattaattttcatgtgattttgttttttatctgtttcactttaatttttaacttttttatgtctgctcttcttttctttccacatcttttcaatccgtcatacaaaacagattaaaaattcgatgtttttattgattttttcattacatttatgttttaatcattacaatatcttatttagttttaaatgggggattttttatgtcagaaaattacgatcttatttcagaaaatgatatgcacatgcccattcgctgtataatgcagcgttttgatcatattcgttcacaaatgcatgactattttgaattatcaatgattgtttccgggaactgtacattgcaactggatgatcatatatacaatttaacagaagatgacgtgttctgtgttaatccactctcgcttcatgaacttcatggtgtcaactgtgtgattgtaaccgttttattcaaccagactttgtttgaacagattctacccgttccattccatcctcgctttttctttatcagtacgatgaccgataatcaggaagctattgtccaactccgcactctgatagcgcacattatcaaaacaaatattgataaaaaagatgggtatgaattacgaaactggtcttatatctacaatattatggatgtactgtatcggaacttccgcatcaaactctctactgctaaagaaaagaaaaatcacaagtatgctttacgtatttccgaaatctcacagttgatccagcagcattacacggaaaatataaccttacaagaacttgctgatgcagtccatttgtccgttccatatctttctaagttttttgtggaatattacggaatgaattttttaagctatcttaaccaataccgccttatgcacgcagtacaggaactctcaaccactgataagaatattgatgaaatagcgattgacagcggtttttccaacagtcatgcctttgtaactttttttaaaaagcaatacgggatgttaccaaaagactatcgccgtgaacaaaaaaagaagaaagagaatactgcccaacgtgtagaacaacataactatatttacggattaaaaaaatatttgaaagaagatacattttttcaggttgtatctcctgtgaaaaaaactgaaattgagatttctgtaaacggaagttcctatactctgcttcacacctggaaaaaaatgatgaccgttgggcgggcaagtgatgtactaatttgtgatgttcaaaaaatgttaacacagattcaggaaacagttggatttgaatatattaaattatgtggcatcttttctgatgatctgcatatatacaatgaaactgcaagtaaagtcccggtctatagcttttcttatcttgataagattttggattttgttatcgtcaatcacctaaaaccctggcttcaattatcctacatgccggaaaaacttgcaaaatatccaaacagacgattgtttggtgcaaatgtcagccagccccactctgtcagtgcatggtgtcagctggtccatgaatttttgcttcacatcactgaccgttacgggttagataccataaagacctggaaatttggtctatggaaccaaccgaatacttcttccgacctatttggctttacaaacgaaaatgacttttttctattctataaaagcacttatgattgtattaaagatttttgccctgatatcgaatttagtcttcctccaacctactacattgtaggcgaaagctatgaaaactggtatctgaactttttggaatggtgtaaaaaaaattcctgtcttccagactgtttaagttttacatactacgacactaaaatgatttccgataaaaatcattccaaggaatcgtttggttttgtgtatgcaatgagtctttctgaatctcctgatgggttaaaagattttgttatgcaggttctccgtgaacgacgccagcttggacttggtaatatgccaatctacctgtcagaatggaacaacacaccaagccagcaggatttgctcaatgatacatgttttaaatcgtgctacattgtaaaaaatattttggaaaattatgaccgactagatagttttacttatcaggctcttaccgatcttatggcagatgacgctctgcccaacaaactctttttcggtggactaggtctgttcacggtaaatggaattccaaaagcaagttattatgcttatactctcttacggcagttaggagatcagtttttaggacgaggagacggttatttcattacccgtaaacacaacagttatcagattatgttgtacaattacaaacattttaactatctttatgccaacggagaacgttttgatatgacagaaacagatcgctatactgtatttgcagattctgatccagtcacaatcgaactatgtctttctaatattccgcaaggtacatacaaaatttctgagacttatgtaaatcgaacacatgggagttcttatgaccaatgggtttccatgggtggattagaacttaccactccttatgaatttgacttgttaaaaaaagcatcctctccaggattccatcagaagctgatgcatatcgcttctgatgaaaccctaagattgaatgcagaattagaactattagagattcgacttattcaaatcacacctgtcatctgcccatctgacgttagcagatagaacaaatagaaagcagatctttaaatgcctgaatcggatatgtcacttggctatgacctgcggcatctccgattccagcactctgaaaatcaccagcataagcagcatcaataccggcaagcgcatcctctacgaccagacaattttcaggtttttcaccaagcatctcagccgctttcaaaaatacttccggatccggctttgatttcgtaatattcgttccgtcactgattgcatcaaagtatccgtttaatccaatctgtgtcagaatctttttcgtatttttactgcttgatccaatcgcaagcttataccctcgctgacgtaatatttccagtgtcttttttacctcctgcgacagatcatccggagacatcttttccaacagacgaacataactttcattcttccttgcggcaagttgttctttttcctcctgtgtatattctcttgatgctttctccaaaataatgtccagactttccatacgacttactccccgtagtctgccattaattgtctcatcgaaataaattccttctgcgtctgccatttctttccatgcctgataatgatactgatccgtaaagcatataacaccatccaagtcaaaaataattgcacgtattgtattcataggatacccccttgtaaacttatagactatgtatctttttttaagataacaaaaataaggacagctttttagactctcattcgactaaaaaactgtccttattttctgcattgtctatcttttataatgttctaaccgatactttcgcggtgtcattccatatctttctttaaactgccggaaaaaatagctctgattttcataaccaacatctaacgcaatctcttccactgacaaatctgtctccaataataaatgttcagctgtctcaaaccgcctgtgctgcaaaagttcctgaaaattatatccggtcttttgcttgatgagtctgctaagtaccgtcatggactgatgggtatctgctgctatcttggtaagatttgcatttttgcagtcactgttaatatatccaagtactgcctgtacaaccgtctccttataatccatggaagaattatggcttaagctttcaagatgattcagcagatataaaaatacaagtcccatagaatactgattaattacatcctcatttgcatgttcatgtaacatggaatcaatcatattttccataagattttctacctgcggatcttcctgcagacgaaacaacagataatgggaaacaggatacttctgacgaaatgcaccaaca

SEQ ID NO: 5133 - DNA, 47311 bp, Unknown
  gut microbiota DNA sequence
aagttcatcctcaacggatgagagcaccttctttccctctttatggttattagacacaaactgcggtcgataaaggctgttagatgcagccgaaccattgatatatgccgtttcaaatcccaatcgtaactcatcaattttactcattttttctcctgatactgccagttaccaaacccacagttttaccaatgaaacaattctcaaaacacactacatccagtatattccttattacaaacgttttcaacaaacattcccacgaattctccatcaacttttcttgatttgtgaaattgttaatgttatcataaatgaaaacaaggataacaggagagattctagtgtgaaaaataagctcgatagcttatttttcgcacggctatttgtttctgagcaaaaacaaatagcttctatgacaaggcataaaaaacatgccttcgagaatttgagattctcatcgcctcttcgcaacaagttgctcagaaatgaggattactatggaaaataaagcattagagatgcataaacagtggaacggtaaattagagaccgttgccaaatctaaagtaaagagccgcgaagatctcgcgattgcgtacacaccgggcgttgcagagccttgcaaggtcattgccaaagatcctgaggcagcttatacatataccatgaaagccaacaccgttgccgttgtttccgacggaagtgccgtgttaggcctcggcaatatcggtgcatacgcagctatgccggttatggagggcaaatgcgtattattcaaggaattcggcaatgtcaacgctgttccgatctgtcttgacacacaggataccgaagagatcatcgctaccgttaagaacattgcaccggcattcggcggtatcaacttggaggatatctccgcaccacgctgctttgagattgaggaacgtttaaaagaaatgctcgacattccggtatttcatgacgaccagcacggtactgccatcgtagtacttgcaggtatcatcaatgcattaaaggtgaccggcaagaaaaaagagggctgccgcgtcgttgtaaacggtgctggatctgctggcgttgccatcacaaaattacttttaacatacggttttaaaaatgtgatcatgtgtgaccgtgagggcatcatcggaaaagattatccaaacttaaactggatgcagcagaaaatgaccgaagtaacaaaccttgcaaatgagcatggaacacttgccgatgcattaaaaggtgctgatatttttgttggtgtttccgcaccaaacattgtaacaccggagatggtatcttccatgaatcacgattccatcctgtttgcaatggcaaacccggtaccggagatcatgccggacgttgcaaaagcagccggtgcacgcgtggtcggaaccggaagaagtgacttcccgaatcaggtcaacaacgttgtcgcattccctggtatcttcaaaggcgccttagagggacgtgccacacagatcacggaagaaatgaaacttgccgccgcagaagcgatcgcaggtcttgtttccgaggatcagttatgtgacgaatttatcatgccggaggcttttgacccgcgtgtcgcagaagttgtaagcgaagctgtcaaatcccatatcaaatgatgatctggggcgacaaacggtatcattctttagattatgaattaaaacagactttcggggaaaaggtctaccgcctttccttaaacggcggtatgacctgtccaaaccgcgacggtactctggggaatcacggctgcattttctgcagcgctggcggttccggggattttgctgccgcgcctgacttgtctgttcatgcgcagattctttccgccaaaaaacggattcaggcaaaaacaggctgtaaaaagttcatcgcttattttcaggcatataccaatacctatgcaccggtagaatatttaagacggatctttacggaagccattgaagaaccggatgtggtggcattgtccatcgcaacccgctgtgactgtcttccaccggatgtcttagatctcctcgacgagttaaaccgcagaaaaccggtctggattgaacttggacttcagactatccacgacaaaacacttcacgcgatccgaagcggttttaccctctcccagtttgagcaggcagtatctgatctgcataaaagaaacattccggtcattactcatctgatccttggacttccgggtgagacaaaagaagatatgctctcctccgtccgttatgttggcagccttccggtcaccggaataaaactccagctccttcatatattgaaaggaaccgatcttgggactgcctatatggcagatccgtttccactttttacactggaggaatactgtgacctgattgcagactgcatcgcactgctgccgccggagatcgtcatccaccggctcacaggggacgggccgaggaatcttttacttgcacccttatggagcaccgacaaaaaaagagttttaaatacgatccagaaatgcctgcgtgagcgtgacctctggcagggaaagaatatctgattataaaagaaagagggcatctatattatggcagaaccaatcacaatctataaactgacaattttaaacatgctcgataaagtggattttccattgaccaacacacagatatctaatttctttttagagcaggattacacggattatttccgcgtccagcaggtattaagcgatcttgaggacgcaagtctcatccacgcagaatccacacacagcaatacacagtataccattactgctgccggtaaggagacgcttggttttttcaaagataagatcacgcctgcaatcgaacgcgacaccactgcattcttagaaaaaaataaattagaactgcgcagcgttaactccatccttgctgattattacaaaacaccaaatcaggattatgcagcgcgctgtcagttccgtgtacatgaaaccaacctgatcgacctgacacttaccgtaaaaacccgggaacaggcgcaggcgatctgtgataactggaaaaaacaaaatgaagacgtctatgcatatctcatggatcttctgctgaaataaatggaggctttatggcaaaacaatatttcaaacccggcaacatgctctacccgctgcctgccgtcatggtaagctgccagtatcctgccggaaaagaggatgcgctctgcaccaatccagcccttgccgggaaaccgaatatcatcaccgtagcgtgggcaggtaccgtgtgtaccaatccaccgatgttatcgatctctgtccgcccggaacgctactcttaccacatgatcgaagaatccggcgaatttgttgtaaatctgacaacagagcagttagtccgtgcgaccgatttctgcggtgtccgctccggaaaagatattgacaaattcaaagaaatgcatctgacaccgctcccctcgaaggagatttctgcaccgggtattgcggaaagcccggtcaacattgaatgtaaagtgcgggagatcaaaccgctcggcagtcacaccatgtttcttgctgatgtggtgaatgttaccgtagacgataaattttttgatgaaaaaaatacctttcatctcaatgacaccggacttgtcacttactcccacggtgcctatttcctgcttggcaaaaagcttggcaccttcggatacagtgttgcaaaaaagaaagcaaagaaacggaaataaccgccgtttctttgcttttttcttacatatatttgctgtttaacaaatcatttttcgcaagttcaatcgctttttccactgtgccctgttcaaacggattcatcagatgtgcataacgcagtgtctctaaatagctcatgcttccaccgcatttacagagatttaagtaatctttccatgcatcctcatgattttttctgtccttagtcttaaactccatcgctcccatcgtcgtcagtgtatagttgatgtaatagaacgggtagagataaatatgcagcttgtgataccagtagccgccgcggtcaaagaaatcatccgcctcatattttctccacggcatgtaggtttcctctaatttcttccatgcaagcgtgcgctccttcggtgtcatatccggattgctgtagcagatatgctggaattcatcgactgcaacaccaaacggtacgaacgtcagtgcatcctgcaaatgtgcaaaacggtatttatctgcctgctctccaaagaatttttctgcatacggataagcaaactgttccatcgccatggaatggatctctgcaatatccgtggattcgctgtaatatgctgcgatcggctggctgcgcattgccatatatcctgcaaacgcatgacctaactcgtgtgacagtacctgcatatcaaagatcgtctgattgaaacaggaaaatacaaacggtgctttgtagcggtcaagggatgtcatatatccggtggatgccttgcccggtttgttttttaagtccatcagctcatggtcgatcataaagtcaatgaattctcctgtctcagggcttaattcatgatacatttttctcgcctgatccaccatgaaatcatcatcccctgccggaactgcattgccatccgggaatacacgtttttcatcataaaacatcaatgtatccacgccgagacgttttctctgtgcctcatataatttttcacacagaggtactaacacggtacgcacctgctcacggaaagcagctacttcctccatgccgtaatcggtacgtccctgctgcatatatccaaccgggataaagttctcataaccaagattttttcccatctgtgtacggattttgatcagttcatcccagatttcctcgaggcgtttttcattgccatgataaaaatcagagtaagcctttacagcagcctttcgtacttcacgttcctcatgttcaaaatacttctgtaccccgtacaggtttaacgtttttccgtcaaacgggattgctgcggttgccatcattttttcatattccctgcacagtcttgactcctgctgcatcagtgggatgttttcctcacagaatgtctttttctgcagatccatctgtgcaaaatactgttttccatattcgttttcgatatcgccgcggaactttgattccatcagggcatcattcatagccagaagcttcggcataacggtcggcaccatatcgttgatatatgcatcttctttttcatagaactcatctgtagtgtctaatgtatggcggatggatgcgatcgtacagtccgtcgaaaaatttttcgacatctcttccatctgctccatatatccttttaattctccataggatgctgcatttttgattttttccgtgatctcctctgcaaatgcacctgttttttcaaaatctggtcttttatattccagtgtgctgaatttaaaatcttccatgtttcattttgtcctttcttcctgcatttctatatgttattggtctttgaccataacagacttttattctgcgctctcatttttgtctttcgcaatgttttctgtcatctgctctttcacttcactttcagttttcttctcattcttatgacggattttttcccaccatccaatgattttttctgccggctgttcctgttctgatttctgccgtactgcttcccgctccgctttgcgtgcttcccgtttcttacgcctttcttcttccttttctttgcgcgctttttctctctgtgccttcttctcgtttttccgctgcagtttttcaaacgctttttctttcagacgcacttcctttaaagccgccttctccatttcttttatgtaactgtttgcctttttgcggttgcgcttatccacgcggtatggatcgtaagcaaaataagatatagccccaagcatcagaacaaccacaccagcgatcacaaagattggaactaacatatcatattccttaaatttcagttcgtagcacacaaacaccgtcagcatcacagggtaaagtaacagatataaaatcttgatcagcacctcaaaaaacgctgcctgttttctgccatttgaaagaagcgtaccctcaattgccgtataaaatgccataaaaatacacagttccgaaccaaacccatgtaaaacaccacacactgccactaagatcagcgacagaaaaaacagtgcaaacgccgctccctgataccatgcattgcggcgttcctccatgccctgaagtttatcctcactgatgccatgcatccggtaaacttccgttctgatatggcgctcaaactcctcatttagcttctgttcttcttttgtattcttcagatttgcttccacggagtcgatcatctgattgatatattcctgctgctgtctgatccgcttgctgcgaagctgctctaattcattctgccgctttgcttcctcttcaagctttaaaactttcccgatgcgcggatttttgacttccatctgcatgtaatccggttctgtttccatcttcacatcttcgctctctatgataaccggatcttctacctgttcctgttccataacattctctacatttacattttccttttctgtggcactctgttcttttgcttttttcttttccacggcactctgttctttttcagtttcagttttcacggaactttgttcctgaaattcctcttctgccatactgctcttctcctctgttttatttgatttcccagtataatttatttcaatattatacaaaaataaaaccaaagaagcaatatacacactttccctattgtctaataggatctgtctttcaggattgatttcagatccatcgtgtaatcaaaatatccttcctccacatactggactttatcgacctcttccccgttttccatatgccggatcgtctgttcgaccaaaggggctgtcagcggattgcactcaaaatcagccatgatcttctcatcctgcatcaccgtaagcgcatcttttactgcatcaaatgagatcacgatcacatcaccatctgttcccattttctttcctgccgcctcaagcgcatcgatcacgccaaacgtcatattgtcgttttcactgatcacaacatcgatatcatcgtacttctctaaaaaatcttccatgacttcctgaccttttgcctgtgtaaaatcgcccgactgtttttcaagcatcacccagtctgagtgtttttttaatattttttcaaaaccgtccgaccgcccgatctgtgcggaggaacctgacgtcccctgcagtgtgactaaatggatcgtctcatcttctcttccctgttcttttaaataattttcaagccactcccccgcctttattccctcttcacaaaaattacttcctacccagcagctgtaaaggctttcatcgccgacttccacggtacggtcagagagaatgacagggattcctgcctcctttgcctcctcaagcaccgcttcccatcccgtttccacaaccggatctaaaataatatagtccacatcctgtaggataaagttgcggatcgccttgacctgattttcctgtttctgctgtccatcctcaaaaatcagataataaccgttttcttccgtaaaaatatttttaaatgactgcgtattcgttgttctccagtctgactctgaaccgacctgtgcatagcctaccacaatacacccatcatgacctgccatctcctccgtgtccagtccattcgtacgctgccctcttttttctccacatcctgccagcaaaaatatcgccccaagtaccgtgattcctgctgatacccaccttttgtttaacatatctcctccgaacccataacctctgcttttcattatataccaaaaagccgccgcacataaatagagaattttctctgtgcgacagctttttcttattcactttattatttactgctctctttcatctttgcaaaaatactctgtaacacaataaagaaacaaagtaatgctgcaactgcgatgctcgaccaggaacttaagagcttaccattggtctttaccagagttgagattgtaccgttgatcagtacaccgaagaaggaaccgatcacatttccaactcctccggtcaagagcgttccaccgataacggatgatgcgatggcatccatctctaatccaagtgcctgctgcacgttgccggacatggtattcaagcaatagcagataccgccgatcgaacagaggaaagaagataacacataagcttttaattttgtctttttcacatcaagtcccatcatggtcgctgactgctcactgccgccaactgcataaagacttcttccgaatttggtgtagcggagcatcagaaataccacgactaacactaccagtgccacaaccacggaaatacggataaacggtacctgtaccacgcctttaccattgacataagatccaaacggaagtttgatcttggcatttgcaagttttacaaaaaattcattgctgctgatcgatacctgatccgtacagatcacagccgtcatacctcttgcgaagaacattcccgccatcgtcacaataaatggctggatatttaaatatccgacacagaaaccctgtacaattccaaatacaacgccgatcaaaaggaccagaatacaaagaaccactgcgttcatgttccatctctccattccgaccgcaagaaacatacagtccatagctacaagagaaccaaccgagatgtcgattccgcctgtcagcataacacatgtcattccacaggtaatgcataagagtcccgcattattgatcagtacatttaaaaatgtctgcaggtgtgtaaatcccttatttgcataaatcgcacatccgactgcatacatgacgaagaataaaacgattgtgatgatcaaaagtaccgtgtttccattcattttctttttcttcattatgcgacacctccttttgccagctgtctttttgcagacatctttttcatataatccttaaacggaggcgcctggatcgcaacgatgatgataacaatgaccgccttgtataccggtgcctgttcggtggaaacacccagcgcatacagtgttgtcgtgatcgcctggatcgtatatgcaccgataatagaaccggtaagacggaactttccgccgccaagactgttaccgccaagtgcaactgcaagaattgcatccagctcaaagtttaatccgatattgttagaatctgcagaactgatacgggaagatgccacaattccggcaattccggcgcaaagtccacagacaatgtagcacaggaaaataattctttctgatttgatacctgcaatacgggaagcctttttgttgataccaacactctgtacatataaccccagcgccgtcttttttagtatcagggaagtgattatgatacatacggctgccacaacaatcggtgtcgggataaatccaagatatccaccaaaaattttaaaggaatcctctcttacatacacaatcatattattacataataacagaccgatcgctcttgctgccgagaataaaataagcgttgcgaccatcggctgtacattcagatacgatactaaaaatccgttaaatgcaccgcagacacatccgatcaggataccgccaagcactccgatgataagcggtctcgccagttcattcgtggaggaaactccatagcctgcaagcagcatacagcagaacgacgctgccagtgacatgaccgaaccaacggaaatatcagtacctgcagaacaggatacaaccagagtcattccgatcgcaaggatcgcgatctcacttccacggtttaagatatcgataatacgtccatacaatactccgtttcgaatggagatcgtaaagaaattaaatgcaaaatttcccgatgcaacatcgtaaatgatatttaccgccattaccaataacatacaaaagataggcagaaacagcggtttgctgatcagtttctttatattattcatttgtgccacctcctgcgatcgcctgcattacatgttcctgtgtcagattatccgtgatctcaccgactttttccccatctcttaatacgacaagtttcgaacaggttcgaagcatctcttcgatctcagaagaaataaagatcaggctctttccctcctccgctaactggatcacaagtttctggatctctgtctttgttccgacatcgataccacgcgtcggttcatctaaaattaaaaattccggatcggtcgcaagccagcgtgctaagatcaccttctgctggttaccaccggagagctgtttaatcagtgtctccctgtttgcggtcttgatctgaagaagttctatgtatttgtccgcgatctcgatctgcttactcatcggcagcagtttgaatattccacgttttgcctgcagtgcaagaataatattttcccttaccgacaggtcacctatgataccttctgcctttctgtcatccggcaatagtcccattccaaggttcatggcatcgatcggagcattgatctttacttcttttcccgccactttcagctctccggtctgatttttgtccgcgccgtaaataacacgtgctaactcacttctaccggaacctaaaagtccggtcaatccgactacctctcccttatggatctgtaagtcaaacggtttgatttttcctttatggctcaatccctttgcatcgataaacagcggttcctttgaaaagtctttcgcctgctctgtttttacggccgcaagatcatcaaaatcttttcccatcattgccgcaaccagacgcaccctcggcagttcttcgattggatattccccgactaatttaccgtttctgagtactgtgatacggtcacagaccgcatagacctgctctaaaaaatgggttacaaacacgattgcaactcccttttctttcagctgacgcatcagggtaaataatttttctacttcatggtcatccaacgatgacgtcggctcatctaagataagtactttacattccatatccaccgctctcgcgattgcgatcatctgctgcagggcaagtgaatattcttccagattctgcgttacatcaatttttatatccagactgtccatgatcttttccgattttgcgaccatggtcttccagtcgatcgttccaagttttgttttcggttcccttccaataaataaattctctgcaacactaagattcgggcaaagatttacctcctgatacacagtggaaatgccctttttctgtgcatccagcgtcgaatgattgacaaccggaccatcgatgccctccacatgtatttctcctgcctcaaatgcattgattcctgtcagacatttgatcagcgtagattttccggcaccattttcccccatcagtgccatgatctcacctttgcgtaatgtaagatccacatgatccaatgcttttactcccggaaatgtcatggttattccgcgcatggtcaatacaacattactctccatcttccttcaccctttctttaaaatgggagagaccagatggtctcccccgcattttatgccatcaggtttgattagtactgggcatctacgatttcttttgtgacaacggtcagatcctgatcttctccatttacattgatcgtagaaaggacatcctcatttacgaaccagtgttctgtcatgtatacttctttctccggagtctcaccagcctgaagctgtttgataacttcctctacgaacggagctgcaagcgggttacactcaaagtctgcattgatgtcaccggacattacatactcaagtcctgcggtacatgcatcaaaggaaacaaggatcacatcaccatctacaccgtaggagataccagctgccttcattgcatccattgcaccgaatgcttcgttatcgttctggcatacaacaacattaaatttaccttcataactcttgatgtaggactccatgacttcctgtccgcctgcctgtgtgaaatcacctgtctgggaatctaagatattccatccatttgcatctgcaatctctttaaatccgtcggtacgtccgatcgttgcggaagctccggtagatccctcgatcacaagtacattgacatcactgatgccctttgcatctgtatatgcttttaaccactctcctgctgcaagaccttctgtcttgaagttagaacctacccatgaaacatatttatctgagtcatcgatcgtacggtcaatgacaataaccggaattcctgcttcctcgcactctgtcagtacagtgtcccatccggttgatacgatcggatcgatgatgatataatcaacatcctgctcgataaatcctctgactgcctctaactgtactgcagaatcattatcacagtctacaaactgaagatcgtatccattgtctgcggaaaaaacacttaaacaggaatctgtggaagcggtacgccagtcagattcgtgtccaacctgtgcaaaaccaattgtaaccgtatcaccgcttgctgcggagctctctgttccggctgcctctgcgctgtcttctgtctgatctgcagcagctgcatcatctgtttttgctgcggcatcattggatgcacccgcattacctgttgacgtgtttgcgctgtttccgcatcctgctaacattgttgcccctaatgccatacacattaccatactcaccaattttcttttcatttcaaaaacctcccatagtttttttagatttggtttcgttgctaaccatggtctaattataactgtgagaggtttttatgaataccgaattaaatttgaattaagtataattttttactaaattgtgaacagctttcatatatttcggtaaaaaagtgtattttttttggaaaaatgtgtattttttatgaactgctttctgttcttaccggaattcttacccagacttccgtttcttccccgtaggtactctgcactttcagtccatattccgtgccataatgcaactggatgcgttgattgacattaaacagtccaaagccgtcattttcttttttcgtattgccatcctcttttaacatcgcgcatacttctgcaagtctctgtttatccatcccgatcccgttatcttttaccttaaagatcaagacatccgcacaacgctccgccgagaccgtgatatgtccctttccacgcttgttttttatgccatggtaaagtgcattttccactaacggctgaagtgtcagtttgatgacctcataaccgtaatattcctccgggatcgcaatctcataatctaaaatgtcccggtagcggaactgctggatctctaaatagctgcggatatgctctgtctcttctttcacggagacaaactcccttcccttactcaaagaagtcctgaaaaatgtggacagggaggacaccatcattacgacctcgtctgtcttttttgactcggcaagccagatgatattatcgagcgtgttatataagaaatgaggattgatctgctcctgcagcacccgaagctctgctgcccttaaattcaactcctccgtatggatatcttccacaaggttgccgattttttccaccatctggttaaaactcttatttagcacctcaatctcttccggtccggttttcaccgcccggattctgaaatcgccacccccggcagccactgcggcatcgcacagctccccgattggttctgtgatgcccgtcacgatttttctgctgactgcaaatgcacccactaagatcaccagtaaaataccgctcgtgatcgcaatcgcctgctccacatcattacgaatcccaccccgcagatcctccatgttcatgctctcgtaataaatataatactggatctgttcctggatcagctccgtcagcaccctgatatttaagtccaaactctccatatttgtctcataagatccactgactaacgcatcttcctcaatctcctgcacccttttttcaagggtgtcaagactctttaaaattcgcgagagacgctgtttcgcatatgcggaatcggcatcctctgccaattccccaaacacctctctcgcctctttgatcatcttttgcggcttttgtgtatcgactaactcctccgcacgttccgaattaaccacgataatgtacatcacatagtcgatatcttccttgaatccgatgttatatgcatttgcctttgtgatcttctccacaatatggtcatattttgacgatacattgttgatcataaaaagcaaatatgtgatcataaccgttagtgggatcacacagataagaagcagcagatacaacctgttttttaatgaaaatttttttcttacgttcataatttttcctgttcctgctctggtctgtcactcctgtttctgtattcccgcggcgtacacccctgtgtctttttaaacaggttactgaaataatgtgcatcccggaaaccgacttcaaatgcaatctccgtggtcttagtcccggtcgtccgcaataactgttttgccttatccatgcgcacctttgtcagatactcaacaaacgtcactcccgtctcctgtccgaatacagtgctgaaatggctcgaacttaaatttacctccgaagcgaccatatttaaggagatatcctcatgattatagttatcttctatgtaggcttttgcatgctggatcagattgtcatatctgcgttccatgccctgctcccgcagttcgatcactgccccgaacagatttttgatgtactccctcgcctgtcctgcagtgccaagaaaaatttccatcttctgcgcatctttgtactgttccaacagattttcactggtatatccgcttttttccaacacggagaccgcgctcacatacagatccatcagcacatactgacacagcagaaccgactgtaagctaccgtttgagattttccggaaataatcatccacaaacccggatacttcctcttttcttcctgtatacaaaaactgttccacctgtctgcggtcgatcccggacacattgagttccccaagatctaatgtctcttttgtttccatctcattttctatcttctttacctgttccgtgatcttatttttctctaaggaataccgctttgcaaaaagaagattcgcttcctcgtaacattttttgatctcgctgaaccgtgtgaccggtatcccgtataccgcggcataatcgatcttattttccccgcagagatatatttcaagttcctgttcaatggcatttttcagctgttcaagcgtcacaccattttcctctttcagtaccagatgatattccccacagcttagttttgcgcagatcacactcgaaccgtatgcaaaaaactgttccatatgatcttcaaatgcttcatctttttcataaaacgtctccgtcccatcctcgaaaaagagctgtaacataagaacattgtagcgctccgctgccagttcgatctcctgttctctagcctcttttaacacctccgaaaaggagtgctcaccggatacgatatgtcggaacagtcttctttttgtaagtgttttctgttctttttcgttttttgtctcttcctgtctgcctctcctgccgtaaattttttctgcgatccgcctgattgcttctaaaagctgtgcactggtcaccggtttcagcagatagtcttccacaccgatcgagatagcttcttttgcataatcaaactcaccatatccgctcagaatcaggatactcgtatccggaagttcctgttttacgatccggctaagttccagtccatccataaaaggcatcctgatgtccgtgatcaggatgtccggttttagtttctgaatcatcggatacgcgagttctccatcactcgcctcaccaacaaattcaaatccttcctcctgccatgcaatattatttcgtatcccctcccgcattacaatctcatcttctgccagaaaaattttcaacatcgtttctgtttcccccatcatatcttcttcccggactccccatccgccggaaaatctatatgatgaaaatagcacattccataaaatgtttcaataaacaacttttgaaaaagaccggagccgcatgatttcatatagtgtcccaaatcatgtcactccggtcttttattatattatttccatcaacaatttttatttttccctattgtaccgacaggtaagaatatcccatcaggctctcatccaccgcatgtgcgacctcacgtccctcacggattgcccacacgacaagagactgtcctctgtgcacatcacctgctgcaaatacatttttcacacttgttgcatatgcgccctctgcggttgaaatgttcgttcttgcatttaactcaacaccaaatgcatcagcgacatatttctctgttccaaggaatcctgctgcgattagaaccagatctgcatccagtttcgtctcggaacccggcacttctgacattaccatgcgtccggtcttttcatcctttttgctctctaattttacggtgataatgccgtttaagttgccatttttatcttttaagaactctttgactgtcgtctggtagatacgtggatcatgtccaaatacagcgatcgcttcctcctgaccgtagtctgtcttgcagactttcggccactccggccacggattattcgccgctctggtatccggtgctttcggcatcatctcgagctgtgtcacgctcgcgcagccatggcggatggatgttccgacacagtcgtttccggtatcaccgccaccgatgatgaccacttttttaccttttgcagaaatataattgttatctttcaggtcggaatctaaaagactctttgtggttgcctttaagaaatccactgcaaagtaaatgccctttgcatcacgtcccggtgccttgatgtctcgcggattttttgcaccgcaggctaagatgacgcggtcataatcctttaataacttcgctgcctttacatcttttccgacattgacgctggttacaaattccacgccttcttctttcatgatatccactttacggtcgatcacccatttttccagtttcatgttcgggataccatacatcaaaagtccgccgacacggtcgtcacgttcaaacaccgtcacctgatgcccacgcttatttaactgatctgctgcggcaagtcctgcaggaccggaaccgatgattgcaactttctttccggtacgcactctcggcggttttgctgctgcatatcccttttcataagcattttcaataatgccgtgctcgtttgccttacaggtgaccggatcttcccagtgaccgcaggtgcaggccgcctcacagagtgccgggcacacgcgcgatgtaaattccgggaagttgttggttttctttaaacggttatatgcctgttcccagtttccggtatagacaagatcattccactccggtaccagattgtgcagcggacatccgcttgtcattcccatgatggtcataccggactggcagaacggcacaccgcagttcatgcatcttgcgccctgaacctgctgtttttccatggaaagtggaatatgaaattccttaaaatttttgatgcgctccttcggctcgatcgctttcgcatcttctctctcataatctataaatccagttggttttcccattgctcatatcctccatcgtgatgccctgcggcacttgccgcaggaacatcttgcttatttaacctctcgtgtttgcataaaatgcttcgatctgcgcctgttctgaggataaacctttctcctccatctgaacgattgccatcagcatccggttataatcgtatggaatgacctttttgaatttcggcaggtattcgctgaaattatcaaggatctcttttcctttttcggaattggtcaatgccacatgctctttgatcatgtcttttaattccataacgtcatatttattggatatttcttcggaaaataccatttctttattcattcttgtatacagatcgttgtcttcgtcgagtacatatgcgataccgccgctcatacctgctgcaaagttctttccagtcttaccaaggactacaacacgtccgccggtcatatactcacatccatgatcgccgactccctcaacaactgcggatgcaccggagttgcggacacagaaacgctcgcctgcaacaccactgataaatgcttttccactggttgccccgtaaagagccacgttaccgatgatgatattctcatcttttttgtattttacgcctgccggtgcataaacaaccagttttccgccggaaagaccctttccaaagtaatcgttggaatccccgactaactctaaggtcagccctttcgggataaatgcaccaaaactctgtccgcctgcgccactgcattttacaataaatgtatcttccgggagtccctcgccgccgtatttcttggtgatctcagaaccaaagatcgtaccgaaggaacggtcggtgtttgtcacttccacatcaatacttctgcgctgctgtttttcaagtgctggtcctaactgttttaagagcaccgtgatatcttttgatttttccagttcgaaatcataaacctgtttcggatcaaagataactttctttttctggtctgcaaatgggttgtttaagatcttggaaagatcaatttctttctccctgccgcttaagtcctcacgaacctttaacagatcacttctgccgaccatctcatcaatcgtcttacagccgagttttgccatgtattctcttagctctgctgcaatgaaacgcatgaaattctcaacatattccggttttcctgcaaaacgtttgcggagttccgggttctgtgttgcaatacctgccggacaggtatctaagttacaaacacgcatcatgacacagcctaacgttacaagcggagcggttgcaaaaccatattcttccgcaccgagcagtgctgcgattgcaacgtcacggccactcattaacttaccatctgtctcaatgcggactttatttctaagtccgttcatgatcagagtctggtgtgtctcggaaagtccaagctcccaaggaagacctgcattgtggatagagcttgccggagctgcaccggtaccaccgtcataaccggagatcagtacaacctgtgcacctgcttttgcaacaccggctgcaacggtacccacacctgcctcagataccagttttactgtgattctcgcatcacggttcgagttctttaagtcgaagatcagctgctcaagatcctcgatggaataaatatcgtgatgtggcggcggagagatcagagccacgcccggagtggaaagtctggtctttgcgatccacggataaacttttttacccggaagatgtccgccttcaccaggttttgccccctgtgccatcttgatctggatctcctgtgcactgactaaatactggctggtgacaccgaaacgtccggatgcaacctgtttgatcgcagaacagcggttgacactgctgtttttacttgcgatacgctctgcatcctcaccaccttcaccggagttggattttccatgcaggcgattcattgcgattgcgagcgtctcatgtgcctcctgtgaaatggaaccataggacatcgcacctgttttaaatctctgtacaatggagtcaacactctctacttcctcaagcggtacaccttttttcgggtaattgaaatccatcagtccacgcagtgtgatctctctttcttccttattaaccagatccgtgtactgtttgaacagctcatagtcacctcgtctggttgcctcctgtaacagatggatcgttgcaggattgtaaagatgcgggtctgctccgcttctcatcttatggcgtccgcggctctctaaagtcagatcggattcaagtccaagcggatcgtaggctgcagaatgaagctcattgacatcattttcaatatcctttaatgtgataccaccaatacggctgaccgtgttggtaaaatatttgtcaatgacatttttatcaataccgatcgcctcgaagatcttagaaccctcgtaagactggatcgtggaaatacccatcttggatgcgatctttacgataccgtttaagattgcattgttgtaatcctgtacggctgcatagtaatctttgtcaagcatatgctcgtccacaagctgttttaccgtatcctgtaccagatatgggttgatcgcgcacgcaccatagccgagcagtgttgcaaaatgatgtacctctctcggttcgccggactctaagatcatcgcaaccgatgttctctttttcgttcttaccagatgctgctgtaaggctgagacagcaagcagtgaaggaatcggaacatggttctcatcgattccacggtcagaaaggatcaggatgtttgcgccatctctgtatgcacggtcggcttccacaaacagacggtcgattgccttttcaaggcttgtgtttttatagtaaatgatcgggatcacttctactttaaatcccggcaccttcatggctttgatcttcatcaggtctgtgtttgtcaggatcgggttattaacctttaatacctgacagttctctgccttttcctctaagaggttaccgtcctcaccgatataaactgttgtggatgttacaactttctcacggatcgaatcgatcggcgggtttgttacctgtgcgaacagttgtttgaaatagttaaataacggctgatggtcactcgcaagtgcagcaagcggtgtatcaatacccatggcagatgtaccctcgccgccgttctttgccatcggaaggattgcttcacgcagggactcgaaagtataaccgaatgctttttgcattctctggcgttcttccttggtatattccggcacacgctcgttcggaatctttaaatcttccagttttaagaggttgcggtcaagccattcaccatatggctgcttgtttgcataagtttctttcaattcatcatcgtcgatcacacggcctgcaacggtatcaactaaaagcattttaccaggacgcaggcgctcttttacgagaatctttgtcggatcgatatcaagtacaccaacctcggatgagaggatcagataatcatcatctgtaatgtaataacgggaaggacgcagaccgttgcggtcaagcactgctcccatcatatcaccgtcggagaacagaatagatgcaggtccgtcccacggctccatcatcgtcgcataatactgatagaaatcttttttcttctgtgacatgatgcggttgtttgcccatggctccgggatcatgatcataactgcaagtggaagttccatgccgctcataaccagaaattccaaggtattatcaagcattgcggagtcggaaccctcggaattgataaccggaagtaccttctgcagttctccttttaagtgctcagactccatcgtctcctcgcgggcaagcatcttgtccgcattacccttgatggtgttgatctcaccgttatgtacgataaaacggttcggatgcgctctctcccagcttggattcgtgttcgtggagaaacgggagtgcacggttgcgatcgctgattcgtaatctttatcctgtaagtcagcaaagaataagcgaagctgctctactaagaacatacctttgtatacgatggttctgctggataaagaaaccacataagtatcatcgttggactgttcaaaaacacgtcttgccacatacagtttgcggtcaaaatcaagtccctttgccacttctgccggacgtttgacaaagccctgcataatatacggcatacagtcaactgctttctgtccgagtttggtcggatcggttggaacttctctccatcctaagaactccattccttccttgttcacgatgacctcaaacattttcttcgcctggttgcgttttaattcatcctgcgggaagaaaaacatgccgacaccgtagtctctctcctctccaagctcgattccaagtggttttgtcactttggagaaaaacttgtgtgatacctgaagcagaataccaacaccgtcacctgtcttgccctctgcatctttacctgctctgtgtttcaagttttctacgatctttaatgcattctctaccgttgcatgtgtcttgatacctttgatattgacaacagcaccgataccgcagttatcatgttcaaatctcggatcatacattccggtttctgtcttacagctgcccgctacagaaaaacggtctaatttctgctctttcatcttcaacttcctttctccatccactcatctgtctttgcctgaaaaacagttgtcttttgtcggatttgttatgtattaatatacaactttcatattcgtttgtctaccagttttttcttaatattatctgataatatgataattgtatgaaatatatgtatattatctgtcttttttatttgttttctcttaaaataatatccatacaaacaattcaatagaaaaaagatgcaaaaaaatttcattaatttttctgcatcttcgcatttttattatttctattaaattgtgtttaaattgtatctgtgtctttccgctcttttacctgcagatctatgcttccatgcctgccagatcatccatttttttcttaaacccatggttaaaaattgcgattacacgtccgactccgatcactgccaccaccgttccaagcccgattccgatcagatgtccctgacagaccagtccgactgtgatcgtgatacagatgttgaagaggtcaaaacagtttttggtaaatcccacactcttatgtaccgtgtctgcgatcgcctgcatagcttccggcaagttgatttgggtatgcctccccaaataccagaatcactgccgaaaacagattcagaaaccttgtgaaaataagacttaacggcaactgcagcagatccataagcagtgtcagacggatgtccattttctgtgcgtgcatcaaagtttctccctctgccttctgataccggaaatgccggatcagatgcaggatcatctccacaagcacaaacagtgtgtagatcaccagtgtcatattcattgttctttccctgatttctttcgctcatctgttacaatgtgtttcaattccattgtcatggactaatagtttctttcccatatttggtcaaagaagtcatttccctccagtgttttcccatcacaactatacaaagcaccattatcaatgtcaagtgacagaagaagcgtggaatcatccaggtatggcgtcattttttcctttaaaagcgggacgacatcttccctgtgtatacattcgttccagtcctggtgttcatccttgtcaactgcaaattcaacgccataggtgtcttctatcacgattcccttttcatcatccacataaaaggctgcaaagtcatattgggcagttccctgcatttcgtaggtcatgcttataagcagatagtccagaccatctttttttgaaagacatattgttccattgcctgcatgtgacaggtgaaagtttcggctgataaaccgcggatgactctcatattctccgtcttttgttccacgatatactttcacataacatccatacgaactgttgcttataacatcgtctaccgcttcatccggctcactgccatatccaactacagaaacaagatccgcaatcccatcatgtgtgagatctgccgttgtttcaaatataggcacttcatatgcatccttccccggataatctgagttatagtagttaccctcttcccctaactgaccgatatcgccgtaggtggaatagacatattcctgattttccacgacatatttttgtgtctgtgcatcagaagtattttctgtagtttcagagatttctgtacctgattctttttctgtgtcttctgatatgttttctaacatttcttccgtatttcctgttttcagtttttccggcatctcttctgcattttctgttttcttcgcgttttctgcttctttctcattttcttccaatactgacgcgtttgaagcagcagaattttctattgtttttttactgcatccagcaaaacactcacttgcaagtacaacagtaatcatcgccatgactaatttatttttcattttccccacctcataacatactctttttcgtttgtatcttcatctgtttcttccgcctgaatcaagaaattctccctctgataaaagtaaattgcatgcacattcttttcgtatacacataaacacaattcggtttttctgctttttacataatccagcagacattttccaattcccatcgattgtgcagattctttcacaaacaatccctcgatatagcaatcatttattccgataaaaccatctatctgaccatttttttcctcttcatatacatatacttctgcttccggcagaatctgtttcaccatttcataattgccggtccaatattccttgtctataaaactatgtgccttaatgtttgtctcaagccatatctgcaaaacatcagatatatccttttcttccatttttcttatcatacatttaccccatctctattttcgtcttagtgcactgcaaagatatctttttacccactccttatcgctcataaaaaattcatttttccgtattgataaaagccggaaaatccgcaatttataagcatttccggctctctgcttacatatgctgtctatcattctttttgtttcataaactatagttcatgcagcttcaggctctctcgtcaaattccacattcttcttccacttccagaacccccatatcacagcgccagccaccacaagcatcactgccgtaaatccaattcctttcgcatccgtcgtatagccaaaggacagccatcccgtttcctcacgcacgaccgacacagtgtttgctgcgatgtgtcccagtaccggcacatagaaaaatcctgttttttcatacaaaaatgcaagcagacatcccaaaaccgccgcatacagaaactgcaccaggttcgcatgcaccagtccaaagatcaatgcggaacaaataattgcaggggcgacacccaacatcaattttagtctctgataaaccacgcccctgaataataattcttccgcgattgggatcagaaaacaggatccaaggaactcatagactgctgcgcctgcaaaaaatgcctgatttgcagtctggaacccttctgatgcctgaattaatgatgtcatcgcaatgatattgttgactgcaattccaagtgccgctacggacacaacagtcacggcaatattgattgcctgctcactgctaaagcgaaacttcttttttccgtaaacagtatcccggatgttttgatctgccatataaaattttaatatgaccggaatcgtaactgcatcacccacaagctggcgcagcatgtaagtctcatctgcactgccgagaagtatctccaatgcaaaataacagagacttgataccacatagtaaagtccgaccggataaataatctgccagatctggaagccctttgtctgtttcatcgtttggttcccttcgtatcacgtcccgcggtgcgcagacggtttaatgccacttctttgccttttacttcaatatttactacatcttccgcattcagaagatagatcgccgcaagcgcgtccccggcacctaatttcatgccgcgcacaccaactgctccctttttcttttccgggatactggaaatgtcgatccgtaggaaaaagtctttttcggactgcatcacgagcgtctcctcaagtgcaagtgcctgtacaaagatcagctcatcgccctcatttaattttgtcgcagccgtggttcgttttgcaacgtcaaactcacttccatccacgactttaagcatagcagattttgttccaaacaacacctgggaacggctgattgccgcaaggttcgtgatgtagacaaaattttcctcgctgctgttataattactcaggttatcgatcggcgttcccttgtctcggaatttaccgtaaggaagatctaacacctttaacagatgcatctgtcccttattggtaaaaatgcagatcttgtccgtatttttgcaggtcaggatatagcggttttctgtgtttgccgcctccttatttctctcatacgttgcgacatccacggtttttgcgtatccaaaacgatccattaagaatacaacatccatttcctcgatcttcttctcctcaacgaccgcttcctctaaattatcgatcaccgttttcctcggttttgcgtactctttcttaaaactctccaattctttgatgatgactttcgccatagccgcgcggcttcccaaaatatcctcatattttgcaatatttttcaaggtctcatcatgatcttttaagagtgcttcgagttcgagtccgattaatttctgcagacgcatctcaagaatcgccgtggtctgtctctccgtaaaacgaagttttgcagcgtctcgttttgactgttcggatttaaaattgatgttatctgtgataccgtcggttaagcaggctctcgcatccttcacatttttacttccgcgcaggatctcaatgatcaggtcaatgacatccgttgccttgatcagaccttcctgaatttcctttttgtcgcgctcttttgcaagaagtgtctgatatttgcgtgttgcaagctcatactggaaattcacatgatggcggatgatcggcacgattcccatagtttccggttttccgtccgctaccgctaacatgttaacgccaaaggtatcttccagttttgttttcttgtagagaagattttttaaattttcgacatctgcaccctttttcagctccagaacgatgcgtattccctcttttgaggactggtttgtgatatccacgatatcggaagttttctttgcctcaacaaggctgtagatatcgtttaagaattttccgatattggcaccgatcatggtgtacgggatctctgtgatcacaagacggtcttttccgccttttcccttttcaacttcaactttaccgcggatcttgatttttcccataccggttgaataaacggctaacagttcatccttatttgcaacgataccaccagtcggaaaatcaggtcccggaatatactgcatcatctgctcggtattgatgtccgggtctttcatatatgcgatcacaccgtcaatgacctcgccaaaattgtgcggcgggatactggtcgtcataccgacggcgattccctctgcaccgtttaaaagcaggtttggaactttgacagggagcacctccggctctttttccgtctcatcaaagttcgggacaaagtttacgacatctttatctaagtccgccaaataggcttcctgtgtaatcttctgtaaacgcgcctcagtataacgcattgctgcggcgccatctccctcgatggaaccaaaattaccgtgtccatccacaagcggcagtccttttttgaaatcctgcgccatcacgacgagcgcatcatagatggaactgtcaccgtgcggatgatatttacccatcgtatcaccgacaatacgcgcacacttacggtacggcttgtcatagcggatgccaagttcatacatatcataaagcgttcttcgctgcaccggttttaaaccgtccctcacgtccggaagtgcacgcgcgatgataacgctcatggcataatcaatataagatttctgcatcagttccgaatactcggtgcggataatctgttcttcctgattcatatcatactccatttctgtccgtttttcagggcatcacaagtcagctggcactgctcacttcccgcccacatgttactgtctgctccctgccagtcgttccagtaacacccacatctctatcagatatcaagtgctgcgtcttttgcatgttcataaataaacatcttgcgcggcggcacatcatttcccatcaaaagttccgtgatatcggacgccatacgtccatcttcgatctcaatacgttttaagatcctcgtttccggattcaatgtcgtctcccagagctgctccgcatccatctcaccgagacctttgtaacgctgcagagtaaaattgctcttatggttcctgcggtaacgttccaatgccgcatcgtcgtaaaggtattcttcttcccctttagacgggatcgctttgtacaatggcggcattgccacatagacatgtccctcatagatcaattccggcatgaaacgataaaacagtgtcagaagcagtgtggaaatatgtgctccatcgacgtcggcatctgccatgatgatgatcttgtcatagcgcagtttcgtgatgtcaaaatcattgccgtatccttcggaaaaaccacatccaaatgcattgatcatcgtcttgatctctgcatttgcaagcaccttgtcaatacttgctttctcaacatttaaaatcttaccacggatcggcaggattgcctgaaaattacggtcacgcgccgtctttgcagaacctcccgcggaatctccctcgacgataaatatctcacagatcgacgcgtccctgctctcacagtttgcaagctttccgttggaatcaaaagagaatttctgttttgtcagaagattcgtctttgcacgctcctcggtcttgcggatctttgccgctttctccgcgcaggagatcacggtctttaatacctctaaatttttgtcaaaataaagctgtatctcatccccggtcacttttgccgtgacacgcgctgcatcctgattgtccagtttcgtcttggtctgtccctcaaaacgtggatccgggtgtttgatggaaacgatcgccgtcataccattacggacatccgctcccgtaaaattagaatccttttcctttaaaatgccaagttctctcgcataggaattgatgactgtagtaaacaccgtcttaaatcccgtgatatgcgtaccaccctccgcattaaaaatattgttgcagaatcctaaaatattctcatggaactcattggtatactggaatgctgcctcaaccgtgattccgtcctgctcgcccttaaaatacaccacatcgtgaagcacctcgttctttttgttcagatccttgacaaaaccaatgatcccctcttcctcatgatatacaatatgttccacttccggtccacgtttatcctcataaataatcgtcagtgccgggttcaagtatgctgtctcatgcatacggctttttacttcgtcctctttgaatctggtcttttcaaaaatctcaggatccggaagaaaattgaccttcgtaccggtttttttcgtttttccaatggtcggaagaagcccgttttccagttccaccaccggaataccacgctcataaccatcgtgatgaatgtaaccatccctgctgatccatacatccatatgtgtcgacaatgcatttacaacagacgaacctactccatgcagtcctccactggtcttataagcggaatcatcaaactttcctcctgcatgcagcgtcgtataaacaatacgcgcagctgaaactccctttgcatgcatgccgaccggaacgcctcgtccgttatcctcaacggtacaggaaccatccgcttctaatgttacacggatcgtatcgcaggctcccgcaagatgttcatccactgcattgtccacaatctcgtagatcaggtgattcaatcctttgcgcgaaacacttccgatatacattcccggtctttttcttaccgcctcaagcccttcgagaacggaaatactgctctcgtcatagccgcctgtttttgccatttctttcttccctttcctgctaaatctattacttttatactgaattgctatctctgatccgtatcctgacgtctcgcataccgcatatgagaaataaccatcagtgcaagtttaaacgtcatcgcatcgtcaaatttacggatatcaagtccaatgattttctctaatcgctccagacggtacactaaagtatttctgtgcacataaagctgtctggctgtctctgaaatgttcagattgttttcaaaaaacttctgaatcgtcgtcgttgtctcttcattaaaaatatccgggatctcatccccaaacacctcatgaataaacatctcacagagactcatcggaagctggtagatcagacgcccgataccaagataacgatatgcgatcgtctctttttctgcatagaaaatctttccaacctcaagcgccatctttgcctcctgataggattttgcaatatccggcagattattcacctgattgccgtagccgaccctcacgcgcaccattgcctcggtatgcatattgtccacaatcatatcggccaatttctgtaattcatcttcattcttcacgtcgcgaacatccttgatcaggacgatgctctgctcgtccacttctgtcacataatcacgcatcttggttgcaaagagatttttcacaagctccactgcggtggaatctttcttatcttctaaatcgatcacataaaccacacgctccgcctgctcgatatgaagtttctgcgccttattgtacatatctacgaccaacatatttccaagcagaatattctgcatgaaattgttgcggtcgaactgctccatgtaggcagccgcaaggtttctgatctggcagactgcaaggcgtcccaccatataagcatcctctgcctgtgatttggtcagcagaatatattctatctctccatcagcgatcaccttaaaaaaatgatatcctgagagcatctggctctcagccatggaatctgcaaaagatgtgattgcaccttctaaatctccctccggctcaaatgttgctgcaaccggctttcctttttccgtgtaaagtgcaagatcaattctcgatatatcctttatctcatcaagtgctgtctgtattttatggtttgaaatcataatctatttcctttccgatatctccccttcgtctggttccacccatcatccgatctataatttcatccttactgacgaacaaaaactgggtacatcactgtacccagttttattttaaatgatgttctgtttaattttaccgaattagttggtaattgtcaattctgtttctttgtcgaaaacatgaatcttctcaggatcaatagcaagtttgatgtgatctcccatacgtgctgttgttctggaatcaacttttgcagtcatgcttgtgcctgctactttgaagtataataatacctcagaacctaataactcgtatcctgttacatcagcctcgaatgcgcaatcttggtgtgcttcgatctcaatctcggaatctccaatatcctctggtctgatacccataacaactgtctttccgttgcatcctgcatctgcaagtttctttgcttttgctggtggtaatacgattgttgtgttatcgaatgtaagagaaactttgtctccctcaactttacattttgtatcgatgaagttcatctgcggagaaccaatgaatcctgcaacgaataagttgttcggctcattgtataatttctgcggagaatcaacctgcatgataacaccatcttttaatacaacgattctggtaccaagtgtcatagcctcggtctgatcatgtgttacatagatgatagttgcttttaatctgttatgtaaagaagcgatctcagaacgcatctgtacacgaagttttgcatccaggttggataacggctcatccataaggaataccttaggattacgaacgatggcacgtcccatagcaacacgctgtctctgtccaccggataaagcctttggtttacggtctaataatttctcaaggtcaagaatcttagctgcttcttcaacttttctcttgatttcatccttaggaacttttcttaattttaatccgaatgccatgttatcgaaaacggtcatatgaggatacagagcgtagttctggaataccattgcgatatctctgtcttttggctcaacatcgttcatgagctttccgtcgatatagaactcaccagaggaaatctcctcaagtccggcgatcatacgaagtgtagtagatttaccacatccggatggtcctacgaaaatgatgaactcctgatcttctacttcaaggttgaaatccttaacagcctcaaaaccgtttggataaactttgcaaatgttttttaatgataaacttgccattggtctaaatacctcctgatatttgtgtttcgttatttgataactatactatacaaaaaagatgcaaaaagcaccatatgcctcctacacaaagaattttgttttttcttgtaggatgtcacagtgctctgtgcatcttttccatcttttcgtcaaactgacggcttttccatcaaaaactgtacagattgacggatacagacgttcctctttttttataaaaggtttattttatgttccgctgaaatcatttctttttacggatccggtgaaactgcggtcttaataccagttccgggattacaataccttcacgctgcgtcagcacatattccactgcttctgctacttcttccggggtaagataagattctttttcttctcccaccgtaaagtccgcgttccggtacagatttgtctccgtcatatccgggtaaaccgccgtcactttgacgccgtattttcttgcctcatcaaacaggcttgacgaaaacgatgcaagtcctgctttggttgccgcataagcacagccgtgcggactcggctgttttgccgtaacagatgaaatattgataatgtaaccgccgttttttttcagcgtccgtaataattgctgggttaagatcaacggtgcttctaagttcacacggaccatttcctgtatctttttgggattcagttcctcgtgcagaccatagtaagctgcaccggcattattgacaaggacttttaccgtgtgctccgatgtgacctgtttcacgatagcgcacagtttatccgtatcggtgaggtcacagatgattggatgaaatatggcatttttcaaatcattttcacactgaagtactccggcaatgtctctatcctcttccgtatcaaatctgcgcccgatcccaaatacttcatatccgagcacacctaatttttcactgatagcgcgtccgataccagacgaggcacccgttacgatggctgtatatttctgtgtcatagctgttttcctctcacgactcccaccggaagatcttctcttccggcacatactctaaaagctgtctgatcagaaatctctccatctgttctgtcagctcttttccataatgataaaccccgccgtcattctgaaatgggaactgcactactgcagaatacggctcgtttttccgcatttttttcagataatcctgcgatacacgaaaagagccgacactgacatcaaagatctgatccattggaacttcttttgtgacaagttctaacatttcatggtactctttttcccagtccgggcagtaaatcatcggatcaaaacacagtcgcaccgggaatcctttttttaccgcatctgccacacagcggacacgctgcaaaagtgatggcgtattgtgctcatactgttttgtgatctgctgcggcgaaagtgtaaacgcatagattatatttttatcgggtatcagatcgtcaaagagcttcacattcgccgactttgtacggatttcgatcttaagcggatatgtagatcttttattttcttccagaacaaaatgctcccactccctgacataaccggtcattgtctcaaatgcaagcagatctgtatcataggacacacacagataaaccgggtgttctgaaagcatccggtgaagttcttcaaaaatatcttcgatatttacaaaaattacgatattcgcggagggatacattccttttaaatagcagtattcacagtcatagatgcagttcatcatacaggatgtataataaaaataagtatttccaaaattctggcacaccggtgccccctgatagatcagactgcctgtcttttttgccaggatcaggttctgcgcatgatgttgttcttcatagtcctgtctgcgtctgcagaatacatctttgtaatgtctgatatacacaatctctgctttcataaaacgcgctaagatttgctttacccgcggatgttctgctatttcttcttccacataaatatgaaaaaaaaacggattataataattttcgtccaaactcttcaaagcagcgtttcccctctcttttatccttacagggcagctcccccgcctgatacatttcttctatgattccctgataatcaattccggcaagtactgcatatttcagatgctgcattactgcggcctgcatcacagccgaacagtgcatatcctcatttaacttctgtgcaagctccgatacttcccccatcgcttttttgttctgcagcttttttatcccgtcgatcttcctcagttcatccaggtaactccggattccgggaactgcacccgcaatgccctgtttcagcatttctgcagacaattcctgcacatttccctcgtctgtcacaacttttaaaaaagacatctgatgcggaccgaaaaaatatgctcctgcctgatatatggaagatgcctccatatcataaagaaaaccgtctgccacactattttttatggccgtttcgtattttgggattaactctgttttgttttctgtatgataaagcattgcacctgtcacaatttcagcttcctcaaaaggatgtctgtataaaatatccggataaaatgtacgccctgtcacatgctccatgatctttttgcacagatacacttctcctgcctttactgactgttcctgtactgtttttctcttgtcggaagaatgtagaccatctccggctgcggtttctttttccgatacatttctacaagtttgaccggatccttttgagtaagaaacttttgcgcaagtaccgatattgaccagaaaatccgccggctgtggagttcttttcgtacagattctcgccacggccgccgtcgctgcgttcattccgcatcccgttaccgtaagaagaatattttcttcctcagaaaaaaagacaggaaaacaagtttcatctgtctttttcttcaatccatattcacgaatcagtggttctgcctcatggtataaggcacaaaatatatatatcatagtttacgctcttccggtgcttccgataccgccgcggttttcgttgccaagtgtatctgtctcctcaaaacggatgaccggctgatgtttctggatgcggaactggcagatgcggtcattgacattgatctccgtgtcacgcattgcaagtgccggcatcatccacacatcatcatctccgcagtagctttcatctacaacacccatgtggtttgtctgaatgatcccaaaattcttgtaggtagaacttctcggtacaataactgcctcatatcctgccggaagctgcatggacacgccaagtttaatcaatttaaattcgcctttttttaatacaacgtgttctgctgagcgaagatcgatccagtcactctttccgtcaatataggtaagtttttctatttcatttgaatgatatttaattctgatcgtctgctgttccatttttactcctgtctattcttcccactctaagctgctgtgttcttctctgcggtcacgcagcatcagctcgcgcactgcgtcttttgccggtttatcatcaaacagaacgtgattgatctcctcgatgatcggcatagccacttcatactttcttgcaagcgcgattgctgcttttgcagagtaaacaccctcaacgaccatctttacctcatccatcgcctgcttcatcgtatatccctgtcccatcagcatgccggctttgcggtttctggaatgtttgctctcgcaggttacgatcagatcaccaataccagtcagaccgctcaatgtttctgcatttgcacccatcttaattgcaagtctgctgatttcagatataccgcgtgtgatcaacgctgccttggtattatctccgtatccaagtccgtccgccatacctgctgcaagtgcgatcacattttttaaagatccgccaagttccattccaaggacgtccggacttgtgtatacacggaatacttcattcatgaaaatatcctgcacaccctcagccacagacttctttcttgcacccgcaacgactgtggtcgggagtccgattccaacttcctctgcatggctcggtccgcacatcactgccacgtcagcagcaggaatttcctgctctacgatatcagaaagtgtcatcagggtattttcctcaataccttttgccacacagacgattacctgtcccttttttacaaaaggtgccatagattttgccgtgcttctcgtaaaaacagacggcaccgcaaggatcagataatcttttccctcgatcgcctcttttaaatctgtggtaaatgtaatatcttccggtaatttcactcccggaagtttatccacatgctcgtgtttttcacggagcatctgtacttcctgctccacgatcgaccagactgtcacatcgtttccatttgtatgtaataccagagaaagtgccgtaccccagcttcctgcaccaataacggctgtctttgccattctgtcattcctcctgattctttttcattccaaatttgttttctgttccagtaagcagacgcttaatattggctttgtgtctccataatgccatcgctgtaaaacatgcactgacaatgtaaaattccggcagatatgccgtatccacatgaagatatcccatgtggccaaatatcagtacctggatcagataacttgtcacaacaaggatagaacctaacgatacatatcttgtaatcgcgattgatccaataaacagtatcaggcagattggcgctgcaagcggacacactgcaaggatcataccggacgtacatgcaatcccttttccacccttaaatttcagataaaatgggaagttgtgtcccaaaactgctccgaaccctgcgtaaagttctaagatcttgaccgcatccggatattttccgataaaaatgaaacggatcagaagcaccgcaaaaatcgctttaaacagatcacccagaaaagtgattaatccagccttccagcctaacacgcgcagcgtatttgtcgttcccgcattgccgctgccctgtgttctgatatccacgccgtgcttttctccataaatatatcctgtctggaataacccaaaacaataccccactgccactgctatgactcttgccccaagcattactgttcttccttcctctcacgaatgataaattttaacgccgttccacggaatccaaatgtatcacggatacggttttccagataacgggtataagaaaaatgcatcaattctttgtcgttgacaaaaataacaaacgttggcggctttaccgcaacctgtgtggtatagtagattttcagacgttttcctttgtctgaaggcggctgctgcattgctactgcctccgcaacgatctcatttaagacaccggttgcaacacgcatgctgttattctcaatgacaaggtcgatcatgtcaaacagtttgtttaaacgctgtcctgattttgcagagataaataaaatttctgcatatggcataaagcttaaaatctgacggattttctccgtatggcggtagattgtcttatcgtctttttcaatggcatcccatttattgactgcaataatgataccctttccacgctcatgagcgattcctgcgatttttgcatcctgttcggtcacaccctcggtcgcatcgatcacaatgatacacacatcggcgcgctccactgccgtcacggcacggatgatactgtaacgctcgatttcttccttgatcttattcttacggcgcagtcctgctgtatcgataaacacatattcctttccgttgtaccggatatccgtatcgattgcatcacgggtcgtacctgcaatatcggacacgatcacgcggtcctcctgtgccagtttattgatcagggatgactttccaacatttggttttccgatgatcgcaaccttcggtctctcatcttccgcctcatctttgttgtattccgggaaattctttaccacctcgtcaagcatatctccaagtcctaacatggaggatgcagaaatcggatacggatccccgatacccagattataaaactcatacacatccggcataaatttttcaaaactgtccactttgttgacaactaaaacaaccggctttccggaacggcgcagcatatctgccaccttagaatccgaatcctgcagtccctgtctcacgtctgtcaaaaaaatgatcacatccgcagttgcgatcgcaatctccgcctgctcacgcatctgggataaaatgatatctttactgtccggttcaataccaccggtatcgatcatggtaaaatgataatccagccaggtcacatccgcatagatcctgtctctggtcacgcccggcgtatcctttacgatggaaatccgctcgcctgcaagcacattaaacaacgtcgattttccaacattcggacgacccacgatcgccactacgggtttactcataatttcctgtactccttttattctcaaatctcattcacttcatgagcggctgatactacgctctgaacattattttgattttacaatatcctgtggttcttgtaaagatattttccattgcgggcttttacagaacatttctcgaatttttgatttattctgtcacacctgtctttttctggatctcatcaagctcatcataattatacagatgccaggtgtcactgagcacacccatcttttccaatgcctttaccgtattttcacacttcggtccaaactggatataactgtttccggatgcatcgccaggcgcaacattatcatttcgcgcattccggtaatcataataattataatagtaatcccaggtctggtaatcatttccttttccataataagaaatcgaaaatgaattggtatacatctcgtcctgtccatccttataaaccgccggaagctggtaataatcaaaattgccctctctcacatcctgttcaacagcgtcccgcagaacagcgctttcctgtctggaaaacgtatatacatccgattcaccatcttccttatagacggttaaatatccggaataataatcattctctttatatccgtttccaagaacctgtttcatcatgttatccggatctgtctccagggcagtcagtttaaatgcaactgaatttttgtcttttaatgccttctccgtaacggaaaccggatatctccgctcaaacacagagccatccttcatgtaataccggaacgatgtataataataattttttccctttttatagacagataaatattcatctttgctgtcaatacactgtttctgtaattccagtacttccgggatctgctcttttgaaacacagaccggataatccatattcacaaatgcagcttcaatctcagatgcatccgggatcttgcgctcaatgccaaagacatccacgcggaaacaggtcagtaatatcagcacaaccgccacaaaaccagcccactctgcaattctttttttgcacagtacacggaaattcttctgcaaaaccatttctgccgcaaaaaaacagatgcttccaaaaatgaccataaaaatcataaggctgataaattcattcactttgatatattcaagtaccagcgcagatacggcaagtgcgatcagtccgccgccacagataccggatatccagcggaataccggtcttaaagctgcaatactgactacgtctccggttgtttcgattttacgatttttatataaaaagtacgcaaaaaccgtgatcacaactgctgccacagcataaactgcaactgtttttccgccactgatcgtaactccaactgcctgcacatagtccttatcgtattttactcccataaccagattacggatcagataatcaagcggtgacaatctactggtctgactcgaagtccatgtatctgatacaccgtaacagatcaggcttgatatattctgcaccatcttcatacagccgatccatagataattgactgccagataataaaacggcatggcaaaaatatttcccgtcagcatagccacgaatacagcgagcgcatatgcgaaaaaagatacgcctgccatgtataaaaaccagtaaaacagatactggatacaggtaatctggtttgccaggcagaccagtacaccggcaataaatgcaatcaattccgggacaaacagaaaaacaaaaccggaaacataattggtgatataaagttcccgcctgtctaacggcagggagtgtatcatattggcattccgcggattatataagtaagaaaacactgcaagtgctgccgctgccgctgcaataaaaaccggtattaccgatcccgcacctgctaacgctgatccgatcacataatattgtttctgtgtaagcggaacgtttccgatataattactctcattatttgcataaagccagatactgagcggcactaccacgatcagatagcacaggtatacgatccagatcggccagtgatgtgtaagattctttttaaatatcgttgtattaaaagaggatgtctttgacttcataatcagcacctcccatttcatagataaatatttcttccaatgtcagtggaaggacatccacgattgccggatttgctgccgctaaagcttttttggcatcttccggatctccttttacgatcagcgtgtatacacgtcccgtattagacatatgaaggacttcaaattcttccggcagcttcggcacaccattctggcatgcaacctggatttttgatacgctgccctgcagatcgcttaaagaccgctcgatcatgatcgttccctgatgcataatgccgacatgatcacagacatcctccaactctcttaaattatgggaggataccagaactgtcatctgattttccgcaacttccgacatgatgatgctccagatctgtctgcgcataaccggatcaagaccgtctaccggctcatctaagatcatcagttccggctttgcacaaattgcaagccagaaagcaacctgtttctgcataccttttgacagacggcgaatacttctttttacgtcaatattcggaaagaactcctgaagacggtaaaaaagtttttcatcaaatgtgggataaatcccctgataaaaacgcttcatttccatcgtgtctgcctgcataaaataaaatatttcatccgggatataagaaaatttcgcttttacttttttattctcatacaccggttcccctgcaatgaggacttctcctgcatccggtttatacacccctgtaatatggcggatcagtgtcgattttcctgctccgttcggtccgaccagtccatagatcgcacctttttccacatgcatgtccacgcctttcaatgcataaaatccctcaaaagacttttccagatgatttacctgtatcattggtccaccttcccttctgccagattatccatacgttcgaccaattccttttcctttacagacaaaaagaataattcttccacgatctcatcaaattctgtcagtaactctttcgccctcgcatcataaacttcttttcgctctgcaacaaaagttccttttccagtgaccgtataaatatagccttcactttccaaatcccggtatgctttctggatcgtgttcgggttgattgcaagcttcgccgcaagttcccggaccgatggcagtttttcatccgcagaaagagaatttgatattacaagttttctgagtccatccttgatctgttcgtagatcggtttggaatcacgataatttaactgtatcaatcagataccccctgtctgtactaaccgtactattttctatcatacggtcactataacatggggtatctgctgatacaataaagataatcctatgatattatgaagattttatgaagcctgctcaaagttcctgtaaaaatgtacgcccgattctttaacccaagtaagcgcgcagtaacccaaatgtatttttcacgccgtccttatggcttctctcgtatccgtgggaggcatacactcctgcgccaatcagaccgtggcgcacatcataacctgccgtcagtgccacatccgcatctgaaccgtagtatggataaacgtccacggcaaaatcaagatcgttgtcttttgcagctttgatcagacctgtgactacatcataattgtaaggtcccctgctgtcttttgcgcagatggaaacctgtgtttctttgcaggaaagtccgtctcccacgcatcccatatccacggagatcacctctgtcactccctccgggatagatgccgcaccgccgtgtccgacttcctcgtaaactgtgatatgctggtataccatacgctccgttgtgatattttcttcttttaaatattttgcatatccaagtaaaatgccgacacttaatttatcatctaagaaacggctcttgatataaccggtctttgtcactgtggtgcgcggatcaaaacatacaaaatcccctgccataatgccaagtttttctgtttcttccctggaatctgctttttcatcaagcacgatctccatctcatcccagcttcgcttggtatcactgtaatccccgttcacatggacggaagcgtttgaaagctggcaggttccctcaaatgtaccggaaaatctggttgccacacggcagttttccgcctctgcattattggcattcataccaccgatcggagatacctttaatcttccgtttgacttgatctccgttacgatcgcacctaaggtgtcaatatgtgcctctaacatcacggcatcctctttatttttgccgcccaatgcgacaaggacgccgccctttacggtaagttttggctcatatcccaatgcacggtattcgcctaagacatactctgccacctctttggtgtagccggacggactgtcgatcgcaaggatcttttttgtctcttccacgatataatcaatataatttttcttttccattttttcttttcctcttttttattttatattccaatgactgtttgcgttcattgtatttatgcgtttctcagataaataaacgcgccaagatttccgcgttttccatggcttgcacggtgggaaaacagaagatccgggttacagcaggtgcagatgttcgtgactgcgatgttttcttttaaaactcctgcttctgtcaggacgatctcgttcgtcctccagagatcaagctggtacttgccatttttcttatcgagcaagatctcatctgcatgccccgggaacgcctctttaaaagcatctgcgacatcctcactgacctcatagcagtcctggcagatggacggaccgatggcacagactaaatctttcgcctccgtgccaaattcacgtttcatcgctgtgatcgtggccgctcccatttttccgaccgttcccttccagccggaatggctcatgccaatcgcacggtgcaccggatccacaaagtataacggcacgcagtctgcataaaacgtcgagagtacaagtcccggttcgtttgtgatcagtccgtcaatatccgtataatccctctcttttacaatcccttttccggcatcctccgccgtcaccctgcgcacatttgtcgtgtgtgtctgatcggtaaacacaaactttgaaacatctgtttccattgcgccggcgagccgcctgaaattttctcttacggctgcatcctcatccccgcgcgtaaaacttaaattcagggattcataaatccctttactcacaccaccaatccgtgtggtaaaacaatgttctacgatgcccgtctgctcaagcagtggatatttaaggagcggtaatgtgctgcccgctccattttcacaccatacttcttctaacacaatgtcattatttttcttttttagattcacactgttgcccttcctgttttttttctaaagatacccctgatactcaaacgcattctttatgagttccacctcgtcaccggacaccgccgcaacatcaaaacggcacggcgtatccatcccgcatccatgggtcagcagataatacgatgcaactttgctgatcgtacgctgctttcttggtgtcactgcctccgccggatgtccgcagcttttgtctctgcggtattttacctctataaatacaagatatccgtgatcttttgcaatgatgtcgatctcgcccatacggcagcggaaattatattgcaggatctcatatccttgtgtttttaaatattcacctgccatcttttcatatgcagtccccactgcacgcctgtttactttctccgtactttctcccccgtttttatactattttattttacatttccagtgcatcaaaaacaagatctgatcaaagtaaccctgccctgcttaatttagctttcattttatccatatcatccacaaacaccagaatctctgccacaacatcatagagctccggcggtatcgtatccccgatctgcagttttgagagtgtttcggctaacttattatcctgataaaacggtacatcattttcttttgccttttcaatgatacgctctgcgacctcgccttttcccgctgctaaaatctttggtgccgcatcccccggctcatatgccaccgctactgcagttttttgttttttctcctgttctttgttttttccatcaaaccacatatctgcctcctgcgctgtctatgcacgcacatcaaacgaatatctgtgaagcgttcctgcctgtggcatgtcccgctgcaggaaatcttccacaaattcaacctttttttcttcttttgacatcgtaatgctgcatcggtaccccttctgtgccagccgtttttccaacaccggaagatgtttttcgatcaggtcataggacgcgtcatccgcaatgtaaaaattcgtctttacatttttatctttcatgcgtatggaaacatccgtggaacctaagttttcaagatccaaatgtaaaaatgcagtcagttccgcttccggatcattcagattctttttgtttgtgtatacatacagatctcccgatgcattctgccctgacaatttgagcggaagctgtacatatgtgtagacctggttaatctgattcataaattctatattactgcggatatctgctgccgtctgtacaaaggaattctgtgtgactccggcagctttcatcacattttccatctgtttcatctggtgatccagccgctcataaaggtcgcttacttttgatgcttctctcagctgttccggttcaagcagccactgtttttcggcacggttctttaagattgcagcaaattccttacttccaaacagctttgtcattccggcaaatccatactcctgattctgttttaacgcatcacgaagcgtattcaggaaatcttccgccgtcatggactgctttaatgtcacttccggttctgcctgtgcaagttcaaatgccttcttacctgcatcgtcccccgacattgtgtccacaaatacatcttcctcttcctgcacttcaaaaagatctgtatttccggtgagcgtcggtatattctgcaataaacgttttaaatgatccagaccgttctggtctaagatctgctctaaggtgtccgtctgtccctgcacatttttgaaatctgcggccgtatccgcctgtgtatttttcaaaacgtccgctgcatctatgcctgtctgcatactctgcgctgcatttcccgctgtctgctcccccacaatattttctgtgttttctgccacaccggcactctgttcctgcccggctgctcccattgaaatcaggtctttcgtattctgctgctgtacctgtttctgcacaccttctgcagcagcaccatctttgctctgctgcactgccgcttccatctctatattctcaccggcatttaccatcgttcctgtatcgttctgctgcaatccgtccgtcgtctgtgccggcgtttctccctctccgtttaaaatgtctaaaacctttccatataattcaaaggactgttcttctcctgaatctgcatctcctaaaagacgtccaagctggttcattgcaagatccatctcatccacaatcgcatgctggtccaccatataattttcaaactgtgatgccatttccgcactgaccggcaatccgatctttgtcataaggacggctgtatttacattgacattcggattgcttccaacgactctgcccatgtcaaggatgctctgtctgctgatcgacatctgctctttcatcatggaatccaccattgtgatattccgctctgttgccggaactccagccgcagtcagcgcatttaataaaatcggattattgatattgcccgcctggacatagggacggagtgcgatcgtcgtcccgtcattcgaacgaacctgaaaaaacatggattcacccggctgaatggacacttttccatccagcctcgccgtgatcgtctgcccgtttccaagtgctaaaacaaccttaccgtttttgacactgttaaccgttccctcaaacgtgcttcccggttctaattcctgcatggacgacacaagtttctgcgttccctgcgcactcataagctcctctgttccatttttgacattctggctgtactgccccaacatatctctgatctgcataacaaaccctcattccaaaaagtctgacactttattcctctataaaattatggataaaacttctgcggtggatcggggaaggaccatatttcttcaatgccgcaatatgctctgccgaaccataccctttatttgacgcaaacccgtattccggcaggatctgatcatattctaccatcagcctgtcccttgtcacctttgcgataatgctcgctgcaccaattgaaatactttttgcatcacctttgatgatcggtacctgtggaatggtaacttccggtatcgtcaccgcatcatttaataatatatcgggtgccggttctaatttgcttatagcctcgcgcatcgcttcata

SEQ ID NO: 5134 - DNA, 8663 bp, Unknown
  gut microbiota DNA sequence
cctgccccgctcacagccacacgcagttttttatcatcccagacaaccttctgtccgttttgatccacaagtgtgagcgcgatctgatagagatatccgtttttctgtgtctcttggaaaggaatctcctccggctgatagacctctgctttgatgccagcagcgttctgcgtggtaagcagtctctcctgttctatgatatttccgttttcatcataaccgcttgcctcaaggatccctgccttccagagtacctcaaaacgatatgcaccgtcgtcgttgtagccgatctgtctgccagcctcttttccattgataaaaacagctgtctccggcagatttgagtaacacattacgatgactttttctccggctttataattccagttttcctgacacggaatccactcggcagactcctcactccacagtcttgtggcaaggtaaagctgaggttcttcacaccacaacgattttctgcggtaatatcttgccttttcaaatccggcgcagtccaaaattccggctcccgatccatgaattggccagccatgtgcctcccctaaataatcgatccctgtccacaaaaactgtccgctgatatagtcgtttgattttaccgcatcccacgcctcatagctgtgtccgttttcactccctaaaaacgggatctgtgggaaatctctgtggtcggcttcgtaatactgctccttatagttgtagcctgccacatccagatgctctaatataccaagttttgcagacagctccgggtaggcaagcgccatggtgaccggacagctcttatcttcactctttacaatactggaaagttcttcggcgatcggaagcagtcttcgcatgtccggttttgccggatcatactgccgttctgccgccggtttattcgcgtcgttatttccggtcatctccagaaaactcggatgacagtacggatcgttcggatagtcgatctcatttccgatgctccacaaaatgatggacggatgattgcggtcacgccttaccatggcacgcagatccttttcgtgccattccgggaaatcttcaaaatagccctgatgttttggcggatagacattgtgtcccgtagaccatttatttttcgcattttcccactcgtcaaacgcctcatccatcacaagaaatcccatcgtatcgcacagctcatacagttccggcatatgcgggttgtggctgcaccggatcgcattacagccacattcctttaattttgcaagccgtctgtgccagatctcctttgtcaccgcagcaccgagacagccggcatcatgatgcacacagacgcctttgatcttcatcggcacaccgtttaggaaaaatccccggtccgcgtcaaattctgccacacggatcccgaccttctgtgtgtctgcaagataagatattttctttccatcctcatccgttgtctcataccaggtttccatcccatagagatccgggtgctccggcgaccagcacttcggatcacggatggtgccatgcatgctgcaggataccgtatttcctgccgggatctgtacctgttctttccactctgccacaggtgttccctgcggatcagacagttttgtgcagaccacacatgttttctgctccttcgtctggttgcatatctcatgacggatactgactgccgcctgcacttccggaaactctttcccatcagccacaagtttctctgtcacaaacgtcacgccatattctgccggatgcacctgttcttccaccacaagagtgactttccgcgtgatcccgcttcccgtgtaccatctcgaatccgcaatgtccgtgtgcgtcactttcacactgaccacattttcctgctccccaaaatgtgcgatcccagagatatcataggaaaatccggtgtaaccatacgggtgttttccctgataataactgttgacccacacctggctgtttttatacacactgtcaaataccagacggatcgatttcccctgatattcctctggcagataaaaatgcagccggtaccagccgatcccgcccgtgagatatccggtgccgctggaatattgttttgaaaaaggataagccactgcccagtcatgcggcagcatgacacgctcaaatgcacgatcgtcatatccctgataccatgcctcctcacattctccaaaatgaaacttccatccctcacttaataacagttctgttttattcataatcataaaaaatacctccatttttactacggtctatgttttcttttaaacacatcatagtaaaaaacagaggtatgatacaatggagaatagtgacactttttgtcttttagcgacttttcatgatttattttttgacagagaatctgcgtaggcgcgcggtgacatcccgacattgcgcttaaacactttgctgaaataatattcatccgggtagccgacctcctggccgatcaccccggtatgcatcgtcgtctgcgcgatcagacgcttggcatgttccatgcggactgccgtcagatactggaaaatggtctgtcctgtcacgcgcttaaagatgcggttcatgtaatcaaaattgccgtcaaactcctcctctaaccgctcccccgaaatgtctgccgcataagacgcattcagccattcctgtattttctggactttataatagctttccgggaacccgcctgcagtcctttcgcgttccgctgtcgcaaaacagcgcgcgatctcgatcaacgcctcctgtatccggcaggcacagaggatcttatgattctcaaacgtgctgtaatcctccgcgatcgcctgcttgatcagctcatcaatgtggatctggtcggtgacttttttgatatgccagtatttcggcagccagatcttgctctcatcataacttccataaggctcacacggctcctttgccatcgcctttctccggcgttcaaactgctgctttgcgacttcctcttcttttgcatcgaccagttccatctccccatgcatgaaatgtacataataataattgcaggtcgtcgcctttgttccctcatgcgtgcgatccttatccagcagacagacatcccccggctttaagatcagaggctttccgtcctcaagcagatgcatctccccgtgccggataaaatataagatctgttctcccgccctgcgtttcctgtggacataaggcggtcttatctctgtctcatccacaaaatttaccttcgggagcatctgcgcatttatcctgtaaaattccatctcttcccctttaccagtagatctgccagtctttctgcagcctcgtcagcgcctccatgtaaaaataatcgccccagctattgcactcatccacaccgcacggattgcaggtattatacggcgaacggttcgaatatgtgctgtgcagtacgatcccgttggatttttcaaaatcttttaccgcatagttccggtatacagaaccaataaatttttccgcaagatcccggtaaaatgccgcctcctcatcatataagtattttgccatctcaagcattccgcacgctgcaatggaggcggaggaagaatccctcggctgtgcatcaccatccgaaaactccagatcccagtacggtacgagatctttcggcagatgctctatataatatttactgacaccacggaaaatatatttgtattcctctctttttgtatagcggtatgcgagtgccgttccgtaaattccccacgcctggcctctcgcccaggcagaaccgtcccggtagccctgacaggttgccccgtgatccggatttccagttaccggatcaaagaaaaatgtatgccaggtcgaaaagtccgggcggatcacattttcaagtgtggtatgtacatgccggtcagcgatctgacggtaactctcatctcccgtttcctgtgacgcccagtaaagcagcggtacgttgagcagacagtctatgatcagcctgtaattttccggctctcccatagcgccccacgcctggataaattctcccttttcctgaaaacggctctttaactggtctgccgcaaggagcgccgctctttttcccgtcccggaaccggtcagcttataacctgcgacacaggatggtgtatacaaaaatcccatatcatgatgatccacacagatcttctgctcgatccggtgcaggaaatcctgcatctggatctctgccgcctttaacagaacgtcccccccgccatattcataggcaagccagatctcccccgtccagaatcccgtcgtccactccacgttgtcgattggacggtaaaatccattttcactgtatgcattctgaaattttgtcgtaaattccggcagaacacgctttacctgcatgcaggcagatgccagcgcatcctcgcgctcctcttttgtaatcggcataacgccttttaaattattctttgtcttctctgataactgcatattcttcccccattttcttttcaacaatgatttttttccctttcaccggtacacagagccgaaactccctgattttctctgggatgtgcggtgtccagtaatatccatccttctctgccgcatcgatatgtacccccgcgatctcctcgatcaaaatcgggaccggtgcagatgcccaggggtggcacaggctggtattccatttctggtctttcccccatgcctcaaaacaggtcgttgcaccctcgcgcagcatgttgacccatccgtgttccccctcattaaccagcagctcatacaccgtatcgtactgtccgcgttctgcaaacacacgcagtacaaaataactcagcatcacgccgcaggaaaatcccttctgttccataaatgtcagtattttctgttcatccgctttgggaagtaaatgaaagtacatcgcataaacattcgaatgcagtgccgcgtggctgctcgtctcgctgtccgctaaaagtcctgtcttttccctgtaaaaagcgttccggtatgcttttttaatttctttcgcctgatacggcatttccctgccacagatctctgccagcgtattctgcgtctccatcgccccaatgtagagtgcattgatcacattatggcagcctggcgccaccacaggtctcgtcagtggaaaatcatatccatcccgcagactttccggccagtccacaagattccatttgtcagcgacctgctctaacagaccatcctccctcgcatactgcgaaaaatgttttaaaatcccatctgcgattccataataacggtccacagtctctttctccccggtaaaacgataatacagcaaaaggagctgcgaatacaacagtgaaaaatctgcgatctcctgcatcaggccgcccggcgcaaccgcaagcagtcccggacagaccctcgctgtctgtgcaaactgatcgatgcattttaacagcatatccgtctttccggtcaaaagtacctgcgcgtgcgccgtcacgaccgcatcccctaagtactgacctttttccctcgtcgggcagtccacataattctcctgtgttccaagacgcactgcatttttgcagatttgaaaaatattttctaatgttttctcctctgtctttaactcacaaagtgattcatccatcggataatgccttaccagaaaacggatatccgacagtttaacgcccccgtccggcacgatcttaacataccggaatcccttgtaatcatacggatcaaactcacatctgccatccgccagcgtccagatttctctgtaacagcagttgcaccgcatgtcatagcgcacactgcccttcccgtccagttcctccccgtaaaacaacttcacctgatcgccgtctttcccctccgcagtgagcaggatcatgcctgtgatctcctcgcccgcatccagaagcatcgaaccatcgggatcttgtcttatcacggacggtgtgatctgatgtatgtgaccgttatgatctgcacacttgtgctctagctttgccggttccaatggctgtacggcatcagagtgcagctttgtcggttctagtggatgctcattaccagcgtgcagctttatagtccccaactgatattccatgtaagagagcatctccgttggctgcttcgttagcgtataatctgcccacaccgccggaacgggtttctcccagccgtccgcatcaaacccggtatttttccacccatacgggtatttccggctgtcaaaattttccaaaaactgtgtctcgtatccgactgtctctccctcataacaatccgttttcaaaaagcaaaaagaaaccggtatctcctttcccttttcatcccacagctccgccgcaaaggcaaaacgcagatccccgctattccacacacggttcacaagtccctgataatacagatggagtgccagcacatgctccccggcagcaaatgtccccagttccagaacattgtaataatactttgtatgatatgccgcggcaggtccttcccccataaacgctccatccagatatgccttataatggtcatcggctgtgatcttacagaaaatcttctgtgcacgctctaaagtaaaatacccgcgcacaaacacatggacattttgtaattctgccgttttgatgtcttcaacagacggctgtacctgttccttatgaaacagattaagaggcacagcatcagcaaactccggtatggtgagccatctggcatcccatgactcatttttcttaacttcctctcccatattttcccccataatatattttccaataagtaagcaaaaacaggacgtcctacgacgccctgtcatttttatttattcttctgatacttcctcaacttcaagtcccagttcttccaactgttttttatccacgataccaggtgcctgtgtcatcagacaggatgcatcttttactttcgggaatgcaatgacatcacggatggaatctgcgtgtaccatatgcataaccagacggtccagtccataagctaatcctgcgtgtggcggaacaccgtatttgaatgcatctaacaggaatccgaactgctcatgtgcgcgttctttggtaaatccaagcacctcaaacatcttctcctgaatgtcatcctgatggatacggacggaaccaccgccaagctctgtaccgtttaatacgatgtcatatgcctttgcacgcacactgcccggatcagaatcgatcttgtcccagtcctcttccatcggcatggtaaacggatggtgcattgccataaaacggttttcctcgtcagaccactctaacagcgggaactctgttacccataaaaagttgtactggtttggatcaagcagatctaattctttcgcaagttcaagacgaagcgctccaagcacgttccatacaatcttatttttgtctgctgcaaataataataagtctcccggctctccctgcattgcagaaacaagtgcctttaactcatcctctgtcatgaattttgcaaaggaagatttgtaagtgccatcctcattcactgcaaggtaagcaagtccttttgcaccgtagccttttgcaaactcaaccagcttatcgatctttttacgcggcatgccggcctgtccttttgcattgataccacggacagaaccaccattttcgagtgctcctgtgaatacggagaatccgcagccctctacaactttggatacgtcacagagttccatgccaaaacgtgtatccggcttatcggaaccgaaacggtccattgcttcctgccatggcattctcggcagcggcagtgtcacatccacaccgattgcttccttgaaaatatatttaagcagtctctcgttgacatctaatacatcttccacatccacaaatgcaagttccatatctgcctgtgtaaattccggctgacggtctgcacgaagatcctcatcacggaaacatcttgcgatctgaaaataacggtcgtaaccggaacacattaaaagctgtttgtaaagctgcggtgactgcggcagtgcataaaaatgtcccggatggacacggctcggtaccaggtaatcccttgcaccttccggtgttgatttacataacatcggagtctcaatctcaaggaatccctcttttgccataaagtcacgcatcagatatgcaactttgctgcggagcatcaggttcttctggatatccggtctgcgcaggtctaaataacggtattttaaacggacttcgtctttcgtctggctgttctcctcgatctggaatggaggtgtctctgcctcggataagatgcggatatcggttgcgatcacttcgatatcaccagtctttaaagactcattcactgctgcggaacgtttttcaacttttccggttaccgcgatcacatactcacttcttaaacgctctgccttctcatatccctctttgccgacgctctcttcgttaaatacgagctgtaagatacccgaacggtctcttaagtcgataaagatcagacttcctaaatttcttctcttctgtacccatcccatgacggttacggtctcaccgatattctgatttgaaacctcggtacatctatggcttctgtgtaagcctttcattgattctgccattactgcaatcctctttcctttttacttattaaaa

SEQ ID NO: 5135 - DNA, 655 bp, Unknown
  gut microbiota DNA sequence
acgtcttaaatgtgccatccgggcacattaagacttgtgctgccgtccgtggcagcacaacactgtgttacggacaggcagactaagattgactaattttctcccaaagtcacaaaacaaatcccggcttgatgcgatttgccagccactaagttgtgaaccacccttcgccggggaactcattttacaaccttgggggtgcgtaaatttttagtgttttgtgtctgaatcagattaaaaaatatttccaaataactatgtttaatagattattattggtttgataatacttgaaaacctcaatatatcccattatgcctatgtttattgccatacacatttgaaaaaatattctgtgttatttggtctgacaatttacgaaataattcatgtaatacaatgtagtagatggaaattctgggaagtcatcaggctgaatatcagtgatacagcacattaggattttaagcatattctcattcgtgcgaatatcaaaaattcacacccgcgccccctgttttgagatgaaccgcccacccaaatggtgttcacaacctgaaggctggcatcttgcgcaaagccggagctgattttgtgactttgggagaaaattagaaaatcttagtgtgtctgtaggtacacagtgatgttctgc

SEQ ID NO: 5136 - DNA, 655 bp, Unknown; identical to SEQ ID NO: 5135
  gut microbiota DNA sequence

SEQ ID NO: 5137 - DNA, 25681 bp, Unknown
  gut microbiota DNA sequence
cagcctaaattagagtttcgccccatctagagcaagaaaagaggacatacactatgtcggaacagcagaaagaacaacaacttctcgaaaccgtagaccgcatcatcgcagaaggcccgtaccagccagcctggtcatccctgatgcagacgaaaacccctgactggtttaaacagaaaagatttggcatcttcatccactggggcgtctacagtgttcccgccaactccaacgaatggtacccaagaaacatgtacatcgagggaatgcccgcatacgaacaccatataaaaacctacggcagccagaaagactttggatataaagacttcatcccgatgttccacgccgaaaaatttgacccggcagaatgggtgcgtttattcaaagaagccggtgccggttatgtgtttccggttgcagaacaccatgatggatttcagatgtacaaaagtgaactgtcccactggaattcggcagagatggggccgaaacgggacgtacttggtgaactgaaagcggagattgagaaacagggacttacgttctgcacatcatcccaccgtgcagaacattggtttttcttaggacacggaaaagaatttgacagtgatatcaaagaaccattgcaaaaaggagatctgtactggccgtccatgccggaaccggatgcagaagatctctacggagagccgtatccgacagaagaatttttaaatgactggttagcacgcacagcggaaattatattaaattataaaccatccctgctgtattttgactggtgggtgcagcatcaggcgttcaaaccatatttaaagaaactcgctgcattttattacaactgcggcgtgaaatggggcaaagatgttaaaatctgttataaacatgatgcgatgatgtttggcagtggaattgtggaagtggagcgcggtgggtttgcggaagcaaagccctatgattggcagaccgatacggcagttgcaagaaattcctggtgctatactgacacattggattataaaagcagcaatgagatcatttgtacactcgtggatgtggtcagcaaaaatggtaatcttctgttaaatatcggtccgaaggcggatggaacgatcccggatggtgaccgtgctattttggaagatcttgcaaaatggatgaaagtaaacagtgaggccgttatcggtgcaaatgtctggcgaaaatccatggaaggtccgacggcagcggcagaaggacagtttcaggatcagaaagaactgaaatttacaaacaaagattaccgttttacgattaatcatggaaatatttacgcaattgcgttacaatgtcctaaagatggtgttttctgtatccgttcactggcagacagcagtgatcagaatgtgccggagtttcatggtatcattgagtcggtggatattttaggatatgatggcaggctgcaatggtctgtggacggggaaggacttcatgtaaccgcacctggaatagacagtgagtttccggttgttgtgcgtgtgcgtccggaataaacaccgctctgagtgaaaaatgaacgaaaggcgtaaaaaacatgagtctgtttgcccggataaaaacattcataggcaatttaagactgcgggagagaatgctctttatatacattgccggaggaattctgccgattctgctgttggatatttatacttatcagaatacgagatcggtgttgatccagaaagcgaaggaaagcgagatggatgggttaaatatgatcgcggattcaatgagcgagagtatgtccgtcatctccgacatttccaaacagatgtactttgatgaaaagattgagcatatcgcatttcatcagtatgaaaactattcggagattcttgcagattacagagactatgataccatttctgattatctgaaatattattatcatgaaatttcaagtatcacgttgtatctgaataatgatacaatttccaataatgaatattttgtacatgtagatcaggagattgcagagaagccatggtatcagaatacgctcgaactgaatggaaaaccgtactggtcttattcgtatgattcgttaaaacgcaaggattcactccggatgtcgagacttttatatacgaaggatatgcagccggtcggtgtacttgcaattaacatgcagtataagaggacggagctgcctgtgcaggaacggacgcaggatacttatttagtgtataatgacacggtggttctgcaccgcaatgaatatgaacgggacacggatgaaatgattctgctgttaaagcagatcaaagatgatacttattccggcaaagtgcgttttcagggggaagatacctgtctgttatcgacggtgcgggtaaaaccggactattcggatgattattataccttagtcagtgtatgtccgtatgaagagatcgcaggatcggcagcccgcagtgcgttgggaagtcttgtgccacagcttgtctgtgtggtgtctggtcttggaattattctggtattttccaatcagttcagtacgagggtaaatacattccgtctgcagatgcataaggctgcaactggtgattttgatatcacggaggatatcggcggggaggatgagatctcggatctctaccgggatctgaaggtaatgatcgattccatacaggaactgatgaataacgtgatcaaagaacgtgtgcagaaagaacaggtcaatgcaaggcagaaagaagtggaatttaaaatgcttgcaagccagatcaatccacattttctgtataacacgttagagacgatccgtatgcaggcaagaattcataatcagccggatatcgaggaactggcaaagatgcttgcaaagatcatgcggagaaatatccaggtaagtaataccttgcagccgttaaaatcagaactgaaactggttgagtattacctgaaaatacaggattaccgtttccatgacagaatccattaccgtattgaaacggagggggacattgagccgttaaaggtcatgccgcttttgatccagccttttgtggagaatgcttttgtgcatggacttgaagcaaaggagagcggcggtgagatcgtgatccgggttgaagtgagatcacatctctggatcaccgtgacggataatggatgcggaatgtccatggaaaaattagatgaagtacggagaggtttgaacgattttgaaaatctggaccggacacatattggaatctgcaatgtcaatcagagaatcaagctccagtatggggaggattatggagtggaatttgagagtaagacaggagcgggaacaaaagtatgtattaaacttccggtgctgacatcggaaatcatgtgataaaaaatgaacacaaatgagttcatattagaagatttggatataaaataatgaggaaataatttaaaggggcaggatacatatgggaaggagttttttttacaggtatgcatgtagtttacttgcgtacaattcgcatgcaggcaggcggattgcatgtggtattatgacaggaagtctgttgatgggtttatatggctgcagtgctgcggaaaatacggtggctgtggatacacagcagcaggaaaccacacaggaatcattagaaccggtcacatttacattttacagtgcggatggattggaggatacctggacggatccggttgcgcagatgattacagaaaagacaggggtcacattgaaaatggattatcctgcagacagtaatgacaacaggatagaacttatggtggcaaccggggaatacccggattttgtgtttgccaagggttcggtatcaacgctgatccgcaacgatgcattgatcgatatgtcggatctgatagatgagtatggtccgaatattaaaaagctgtatggagatgaatatgaaaatctgcgttattccagtgaggatccgtccatttatcagctgtgcagtgacaaagtgcaggaagaaaccttagaaacatccggaactgcccagctgcagtgggcagtattgcaggaaaaccagtatcgtgtaccatatacgttggaagaatacacgcagatgatccgtgattatatggaaaagtatccaatgatcaacggaaagccggccattggtatttcgattgtctgttccgactggcactggtataccatgttatcgaacccatccgggtatatgaatggttccgcagacaacgggcagtggatcgtggatgatgaaaaacaggaagtttattataaacatgcagcggacgggcagaaagaatattataaatggctgaatgaaatgtacaatgagggcattttagatcctgaatttgcgacgcagacgcatgaggattttgttttaaaagttgcagagggaagagtgcttggacttttggatgaggaatgggattatacaggcgctgagatatccctgcgggcagatggacaggaggagcacacctatgcggggcttccggtcacaattgatcgatccgtgaaatgcccttctttaaaacagcagaatcttgcggtaggctgggggattggtattacaaaaagctgtaaagatccggttcgggctgtcaggtttttggactggctctgcagtgatgaggcacagatcctgttaaactgggggattgagggtgtcgattattattatgatgaaaacggaaaacggtgcattacggaggaggatcttgaagcgtcccggaaagacaccaattattctgagcgcacaggtgtgggatttcgtgtttatccatatccaagttatggaaatcagtcggttgattccacgggcaattcctatagtaagagttcaagggaaatggtaaaagaaggctatgatgagatggaaaaagaagcactgaaagcatggaatgtcgacatgctgaccgatattttcccacagaaagaagaattttcaaaagatgcatattccccattgtgggcgctgacactgccagatgaactggaaaaaatgttagttgcgttagataatgtatcgtggaagggactcattgagtgtgttgtcagtccagccgatgattttgatgcgaaatgggatgaattacagcagaatttaaaggatgccggattagaaaaagcagatcgggaaatgaccgcattgctgcgggatgagatcagccgcagagagtaagagcataggaaagagaaataagtttatggcaaaaaaaatcatgattcagggaacaatgtcaaatgcagggaaaagcctgatcgtggcaggtctgtgccgcatttttaaacaggatggctaccgtgtggcaccgtttaaatcacaaaatatggcactgaattcttatattaccggggaaggacttgagatggggcgcgcacaggtcatgcaggcggaagcggcaggtatcagaccgcaggtctgtatgaatccgatccttttaaagccgaccaacgataccggttctcaggtcattgtaaacggtgaagtgcttgaaaatatgaaagcgagggattattttgcgtataaaaagaaactgatcccggatattttaaaggcttatcatacattagaacaacaggcggatatcatcgtgatcgagggcgccgggagtccggcagagatcaacctcaaagaaaatgatattgtcaatatgggacttgcggaacttttagatgcgccggtactgcttgttggtgatatcgaccgcggtggtgtgtttgcacagctgatcggcacgttagtcttactggaagaaaaagaacgggagcgcatcaaagggcttatcatcaataagtttcgcggcgatgtatcaatcttagacccgggcataaagatgttagaagaaaaaggtgggattccggttaccggggtcgtgccttatatgcatttagtccttgaggatgaggacagcctgtcagaccggtttgcagaacacgaggagaaagcggtggatattgcggtcatccgtttcccacgcatttccaattttacggattttatggtatttgaatcgatcgagggcgtttctgtccgctatgtggacacgctggaaaaactgcatcacccggatatgatcatcctgcccggcagtaaaaatacgatgggcgacttaaaatggatgcgccagaacgggctggaggctgccatcaaaaagcatgcgcaaaatcgggatgccgtgatctttggcatctgcggcggatatcagatgttgggagagtgcatcacagatccttatggtgttgaggagggcggtatgctgcgcggtatggagcttttgccgatggagacagagatggaacaggaaaagacgaggacacaggtggaggggcaatttgaaaggctccctgatgtgttgtctgtgttgtctggtatgaagctgacagggtatgagatccatatgggagcgagccgcaggacggatcatggcgagaatgatatggatacggttatgatggatttaggtcggagtgagaagcccgaaatgcttcaggaaaaaagatatgaatatctgtgccatatcacagatcaggctgaaaatcaaaaagcagatggaatctgtgcaggtaatgtttatggtacttacgttcatggagtatttgatgcagatggcattgctgcaaagatcgttgaggcacttgccacaaagaaaggaatttccatggaggcagtgactcagcagaattatcaggaatttaaagagacacagtatgataaattggcggagacgctgcgggagtatctggatatggatgcggtgtataggatgatggggatgtaatgctgcttgttaccgcacaacaggcgagaacagcagcgactggacggaccgatttgacggagtaaatttgtttattgctgaacacaggaaactgccctataataaatgataacggaaataaaaaagaagtatgcaggaggcagcgggatgggaagatacctgaatcagggaaatgaaagctttgaaaagagtgtaaattctgaaatttatatcgataaaacaggtgtgattaagtataccaaccgtgttctgaatacgctgcaggggtatgtctgtatcagaagaccggatgagaaaatccgaaaaaaggtacaggaaaactgggattccttagcgaaaccattagatgggctgggaatctttgaaaagatatttacacagatcggtgcagtgacaggggacgagagggtgccgttacaaaagaaggcagtgatcgtgatgtgtgcggataacgggatcgttgaggagggcatcagccagtccgggcaggaagtcacatatcaggttgcagaatccatgggaaaacgaaaaagctctgtatgccttatggctgcacaggcgaatgctaaagtcattccaatcgacgtcgggatcgcagcggaagaaacaccggaaggcgtctggaataaaaaggtgagcaggggtacaaaaaactttttaaaacagccggcgatgacggaggaggaagcattggctgcgatcgaagctggcatcgacagtgtaaaaaagtgcaaagaggatggtgtgacactgcttgcaaccggggagatgggaattggaaacacgacgacaagcagcgcagtggcggcggcattgttaaactgtgagacggcagcgattaccggaaaaggtgcaggactcagtgacgcgggattattacataagattgcggtgatcgatgaggcgcggaaaaaatatcagtttgactccaaagatgtatttcgtattctgtgttcggtcggcggactggatattgcaggactgtgcggtgtctgcatcgggggcgcagtttacggtgtcccggttgtgctggacggtgtgatcagtgcagttgcagcacttgtggcagaacgtcttgttccgggcgtaaaggattttctgatcgcttcccacaaaagcagggaaccggcagcggcactgatcttacaggaacttggtgtacatccggtcattgatggcagtctggcgctcggtgagggaaccggtgccgttctgatgtttggactgctcgatacggtacatgcagtctatggtaaccggacaacattttcagatattagggtggaagcatacaagaggtttacagacgtatgatggttgtagtgacaggcgcaagcggcagtggtaagtcggaatatgcagaaggtgtggcggtaaagctggcgggaaaaggagacttatattatcttgcgacgatgcgtgtctatggagaagagggagtacgccgtgtggaacggcacagaaaacttcgcgccgggaaaggatttcaaacggctgagtgtcctgtcaaggtggatgaagcgtttgcacaggtatgcatgtcagagtctttggaacagacatgtgacacatcacatggaagagtatgtacgtcagaatttttagaacagggatgtgccaggctgcatggaaaaatacggatgcccgtggctttattggagtgcatgtcaaaccttgtggcgaatgagatgttcccggagactgtcggtgatgagataaatgcaaactgtgtagaaaatatcgtccgccagatcaggtacttgaaagaccagaccggacatctggtgatcgtgacaaaccagatctttgaggacggaattatctatgaaccggaaacgatggaatatattagaaatctgggtcagatcaaccaacagttagcagaaatggcggattcggtgattgaggttgtggcaggaatcccgatttttataaagggggagaaattatgatgacaacattaagagcactggtcattgcattttccatgtattcacagataccgatgccgcagtttacctggcaggataaagaaatgaagtatgcattctgctttttcccgtgggttggagcggccatcggcggtatcacgatgttctggtggtggttctgcggaaaattttcggttggaaatgtggcatttgccatgattggcacagccattccacttgcagttaccggaggatttcatgtggatggatttatggatacgatggatgcgttccattcttaccagccgagagagaaaaaacttgagatattgaaggactcacatataggtgctttttctgtaatctgtctggtgctgtatgaactgatttatatcggagcatattcagagatagatgcagtacggcaggcggggatcgtggcagccggatttttcttatcacgctgtctttccggtattgctgcgatgacttttccgggtgcaaagaaagaaggacttttgtatatgttcacgagcaaagcgcatgagcgggccgtaaagaccgcactgtttttgcagacagcagcggtggcagtgctgatgctgtatttagacggagtgacgggagtggcagtgttagtgggcgcaggtcttacttttctgtattattataagaaatgtaaaaaggaacttggaggtattaccggggataccgaaggatattttgtgacagtgtgtgagtgtgtgatcgttgtggcagctgcggtatgtggaattatacgatgataaaggaataacaaaaaaagagggtgtaaaatgagactggttttaggtggagtggcacagggaaaacgcaattatgtaaaaacagcgtatcatatatcagagaacgacattttttcgggcgaaaacgcagaacttgagcagttatgcggcgcaaaagcagtagataagttccatctgtgggtaagaagaaaagtgaaagagcaggcagatgtgccaaaactcacagaaacatttataaagaaaaacccggattgtatcgtgatctgcaatgaagtcggatgcggtgtggtgccgatgttaaaagaagaaagagagtaccgggagcaggtcggaaggatgcaggtcattctggcaaaatcttcggagagtgtggagcgtgtgatatgcgggatagcacagaaaataaaataacaatggcatttatccggcatggagagacagcgtcgaaccgcagaaaaagttatcttggctggacagatgaaccgctttctgaggacggatgtgaaatgctgttgcgcaacaggaaaaattatcctgcagcagaccttatttttacgagtcccatgctaaggtgcagacagacaaaagagattttatataaagatcagccttatcagatcatagaaaaatggaaagaaatgaactttggcagttttgagggaaagacttactttgatttaaatggaaatgaagattatcagagatggatcgacagtggcggcacactgccgtttccggacggagagagccgggcagaatttatcacaaggtgtaaagcgggattgttggattgcctgatggaattagaaaaacaggtaactgtacaggaaaaggttgtctgcattgtacatggcggaacgattatggcactttttgacagttatggacagggttcctattttgactatcagtgcaggtgcggacagggatatgaatgtacgctgtcctatgcagtagacgcaaatggggtggtgaaagagacatcaatttccatgcgtgatgaaaaaataatttttggagagtaaagacatgtattatcatatgatagcatttctggcgggatttctgctggatctactgatcggggatccgcactggctgtatcatccggtgcgcctgatcggaaatctgatcgcagcgttggatcatagactgcttgatgtgacaggcataagaaatgaaaaaaaagaacggcgcgcaggtattttgctagtgaccgttgtactgcttgcgactggagcggtgagcggtcttttgctgtggggagcttatgcgattgcgccgatggcaggctgtattttagaaagtatcatgacctatcagatccttgcgacgaaatgcctgaaagttgagagcatgaaagtgtatgaacgtctgcgggcagatgatcttgcgggcgcaagaaatgcagtggcaatgatcgtcggacgcgatacgcaaaatctggatgcggcaggggtcgcgaaagcggctgtggagacagtagcagaaaatacgtcggacggtgtgattgctccgatgatctgtttggcgatcggaggtccggtgttagggtttttatataaggcagtcaacacgatggactcgatggtgggctacaagaatgaacgttacctgaattttggaaggacggcagcaaaactcgatgatgtggtgaattatatcccggcgcggatcagtgcggcgctgatgattgcagccgcctatgggccgggaaaacagttttccgggaaagatgccctgcgcatttttaagcgtgaccgttacaatcatgcaagtccgaactctgcccagaccgaggcagcctgtgcgggtgccctgcatcttcgcctggcgggggatgcaagctattttggaaaaatcgtaaaaaagccatttatcggggatgatttaagaccggtggaagcggaggatatcgtgcgggtaaatgtgcttttgtaccggagtgcggtgatcggagaaatcctgtgtctgctggcacttttggtggtaacattattctgacagtgaggatgccattcaaaatgaaaaaatggtttatatgattaaatgaaagaaagagagtctatatcaatgtttcgtaaaatgagaagatttaaacaggaattgagcaaggaagaatgtatggagattttgaaaaatgaaccgagaggcgtgctttctgtattaggtgacgatggttatccgtatggtatgcctgtcactcattggtacaatgaaaaaaacgggaaaatttattttcacggtgcaaaatcgggacataaaatagatgcgataaaaaattgtgacaaggtttctttctgcgtctatgataaaggctatcggaaagaaaatgactgggcgctgaatataaagagcgttattgtgttcggacgtgtccgctttgtagaagatcaggacacaataaatcagatatgcacgaatatgtgtgataaatttactgacgataaggaatatgcgaaagtggaactttcaaaatgcgggtcgagtgtgttgtgtctggaattaaatccggaacatataacggggaaactggtaaatgagtcatagaatacggtaaagtgaaaactacttgttctttttgttataaattgatataatgaccaaagacagcatgtcataggaaaatggaattatttatccggatgacattatagcagaaagaggagagggattaaggtatgagtgaacctgaaaattatgtaaaaaaagaggagccgcgcgtatccataaaacagcgcaggaaaaaaagtataggaggcacactgggaacactgtttgcggagaatcagagtatgctgatgctgtttgcagctattgttgcagcacttgcggtgattctgacaggaatcattgcactgcatatgccggtcgttccagtctgcctgatcgtattattagagactggaattgcctgctgcctgcatgatgtgccgatctggctgcatgcgatcgctgtgatcgttcagatcatagccggggttctcaccggagccactgtttttatggtgctgtgtgtggtagaatatttggtcgggattttatgcctgcgttatgtgagagattaagggatgagtatggaaacggacttttgctatggggagatttttagcaggagtccgtttgtatttacaggaggaaaaagatgaatttaaatcagttattttgtgaaatgatacagtattacaggaatgatcccaaaagaatccagcattttacaaaggtacacagctatgcaaagctgatcggggaactttccggcatgcagggggaagaactgctgacactcgaggtggctgcttatgtacatgatatcgggatcaaagtggcggaggaaaagtatggaagcagtaacggcaggcttcaggagcaggaagggccggcagtggcagaggatatgcttggcagaatgcattttgacgaaaaaatcatccggagagtgtcctatctggtcggacatcaccacacttatgaccagattgacggtctggattaccagatactggtggaggcagattttctggtcaatctctatgaggatggcgtgacaaaagaggctgtgatgcatgcatacaacaaaattttccgcacggaacatggaaaacgcatctgtgcagaaatgtttggaatcgaggaatgaccgatggaatcgcaggaaaagattttagtattctgttccagagagatctgctatttgtccggaaatttttttgcacatcagcttgcggcggcatttgatgatctgggatatgagactactgtttgtgaatttacatcccaggatgatcttgatgccgtgctttctccgttttttgggaaaaaatatcgtgcagtatttgattttaattccttgctgccacggcttgcgatggatgacggaacaccggtgatcgacctgttcgacgggccgttttatgattatatcgtggatcatccgttgtttcattataattgtctgatgacgcgggcaaaaaactttcatgcgattgttcttgacgaggggcaggcagattatgtgaaaaaatatcatccgcaggtaaagagcgtacatatgcttccgcttggcgcaaccatcgctttatttgacggcgaaaaaaatcccgcagaccatatcctttttatggggacttatgatgcgccggaaaaagtatatgatatcgtaaaggcggcaccggagccattttgcgggatgatgaagcggatcatagaaatgcggattgcggtgccggaacttccaatggaagaagcatttgcggcatgtttaaaagaagatgacatggagcttgacgaagcgcagtttgcactttttatgaatacgatgtatgcgtcggatgcttatatcagggattatttccggaaagcggcactcgatgaactcttgaaaaagaaaataccggttcagttagtcggcgagggatgggaaaaataccagacaccgtatgagagataccggacgatcgagaagccggtcacctttgatctttcctttgaaaagattgcaagagaacagatcatgcttgatgtttcgccgatctttaaccggggcgtccatgaccgggcaatcgcagggatggcgaaccgtaccgtggtgctgacagattcgaatccgtaccggtgtgcgcattttaaaaaccgcaaggatatgatgttttattcgctggcaaaaatagattcgctttccgaggctgccggggaactgatggaaaatgaaaaactccgttcagaaatccgggaaaatgcatatcagaccttttgtgccggacatacctggagggcgcgtgcaaaagaaatattgtcatgggaggcagaagattgaagcagaattatcagaaaatgttagaggaaaccattgcaaaaaatcagcgcgaagagcgagtgccttccctgctgctgcatagctgctgtgcgccgtgcagctcttattgtctggagtatctgtcccagtattttaaaattacggttttttattataatccgaatatttatccggaggaagaatatacaaagcgtgtggcggaacagcagcattttattgagcggcttccggcaaaatatccgatttcttttgtggagggaacctatgacaaagagtgcttttatgagatggcgcgcggtttagaggatgtgaaagagggcggggaacgctgcttccgctgttatgagctgcgccttagggaatcggcagagcttgcaaaggaacttcacatggattattttacgacgacattatctatcagcccgctcaaaaatgcggaaaaattaaatgagatcggggaccgtctgtcggaagaatacgggatcgcatatttgaattctgattttaaaaagaagaatggctataagcgttccgtggaactatcggaggagtatggcatgtaccgccagtattactgtggctgtgttttctcaaagcgggagcgggatgcacagatcgcggcaaaagcggcagctgggaatgcataaattcctgtataaaaatacaacagggacttgcggcgaaaagacacttcatgtagaatggaagataatttatgtaaggaaagtgaggatttagatatggcacagttatggggaggacgctttacaaaggcaacagatcagcttgtatataatttcaatgcgtctatcacatttgaccagaagttttataaacaggacattgagggcagcattgcacatgtcaaaatgcttggaaaacagggcattttaacggagcaggagatgaacgacatcatcacaacactgcaggagatcaaggaggatgtggagagcggaaaattagagatcacatcggaatatgaggatattcacagttttgtggaggcaaatctgatcgaccgtcttggagatactggtaaaaaactgcataccggacgcagccgtaacgaccaggtggcactcgatatgcgtctttacaccagggacgaggtgctcgcggtggacggactgttaaaagaacttctgactacaatcttacatattatggaagaaaatacagagacgatcatgccgggctttacccatctgcagaaagcacagccgatcacattggcacatcatatgggtgcttactttgagatgtttaagcgtgaccgtctgcgtctgcatgatatttatgagcgcatgaattactgtccgctcggttctggtgcacttgctggcacgacctatccgttggatcgtgaatatactgcagagctgctcggtttttacggaccgaccttaaacagtatggacggtgtgtcggaccgtgattacctgatcgagttcttatctgcatgtgcgacgatcatgatgcacctttcccgtttttccgaggaagtcattatctggaactccaatgaataccagtttgtggaaatcgatgatgcatacagcacaggaagcagtatcatgccgcagaagaaaaacccggatatcgcagagttagtgcgcggtaaaacaggacgtgtctacggtgcattgatgtcactgctcacaaccatgaagggaatcccgcttgcatacaataaagatatgcaggaggacaaagagctttcttttgatgcaatggatacggtaaaaggctgtgtcgctttgttcaacggcatgcttgccaccatgcgctttaacaaagacagaatgcgccagtccgcaaatcatggatttacgaatgccacagatgcggctgattacctggtaaaccacggtgttccattccgtgatgcacatggcattgtcggacgtatcgtgctttactgcctcgataaaaagatcccgatcgatgatatgagtttagaggaattaaaagcgatcagtccggtattcgaggaggatatttatgatgcgatctctatggaaacatgcgtcaataaacgtctgacagtcggtgctccgggcaaagaggcaatggagaaagtcattgaaaaagagcgtgaatatctgagtaaggaatggatgtaatacttttacacactgacgtgatattgtgacaaatgcacaagttttcgccaaaaatacaggaaactttgacaaaataagcattgcttttttccgggaaatagcataatatatttactatgaaagacacatgtttgcgacagacggacaaacagagaataagggacgaggagattagagcaaaatgagcgaaaagttaaaagttggtattcttggcggaacaggtatggtaggacagagatttatctctcttttagagaatcacccatggtttgaggtgacaaccattgcagcaagtcctagaagtgccggaaagacctatgagcaggcggttggtgaccgttggaaaatggatactccaatgccggaggcagtgaaaaacatcgttgtcatgaatgtcaatgaggtagagaaagtagcagcagaagtcgatttcgtattctccgcagtagatatgaccaaagaagagatcaaaaagatcgaggaagattatgctaagacagagacacctgttgtttccaataacagcgcacaccgctggacaccggatgttcctatggtagtgccggaagtaaacccggaacatatggaagttatcaaataccagaaagagcgtcttggcaccaaacgcggtttcgttgccgtaaaaccaaactgctccatccagagctatgcaccggtacttactgcatggaaagagtttgaaccgtatgaagtagttgccacaacctatcaggcaatttccggagctggtaagacatttaaagactggcctgagatggtaggaaacatcattccttatatcggtggagaggaagaaaaatctgagaaagagccgcttcgtatctggggtcatgtggatgcagagaaaaaagcgatcgttcctgcagaatcaccggtgatcacctgccagtgtatccgtgttccggtattaaacggacatacagcagcagtatttgtaaaatttaagaaaaacccgacaaaagagcagctgatcgaggctttgaagaacttcagcggtgttccgcaggagttaggtcttccgagcgcaccaaagcagtttatccagtacttagaggaagacaacagaccgcaggtctccttagatgttaattacgagaacggaatgggtatctcagtcggcagattaagagaggataccgtatacgactggaaatttgtcggactttcccataacacagtccgcggtgcagcaggcggtgcagtactttgcgcagagctgttgaaagcacagggatatatcacaaagaaataataaaaataggaaataactaaaagcgccatcggatcaggacgtccggtggcgttttatattgcctaaaaagttaaaaaatgatataatttctcctatgtgaaatacaaacgggagggcgaaaacatggttgtaaaaacggctgttttaaaggaattagaaacactgtatgcaaagtccggcaatcagttatgcgttttatatggcaggccggatctggaaaaagaattgttattgaagactttcctgcagaacaaaaaagccttttattatcgtgcacggtatgcgtcaccggagtctcaaaaacagatgatggcggaagcgttagaggaaaaactgcaggtcaggctgcaaaaatatgattatgaggaatattttaaccggatcaaaagcggtggaccggaaaagcttatcttagtgatcgatgagttttcttatattgccaaaaaagatacggattttattaatgctgttttaaaattaaaggcaaaaaaattgtatccggggccggtcatgatcctgctgtgcagctctgttgtatcgtgggttgagaaggaaatggaaaattgtatcggcacagatgcagtgaaaaagatcgatcagacgatcaagctttccaatctgaattttctggaagttgtgcgtgtacttccggattatccggtcagcgaatgtatccgggtttacggcgtgatcggcggggttaccggttatatcaatcactggaacccgaaggtagatttaaagaccaacatctgcaggcagattttatcaagaaacggctatatgtataataaggcagaaaatattatcggtgcaagcctgcgggaattgtccgtgtatgatacaatcttagcttgtattgcgggcgggtgtgacaaattaaacgacctgtacttaaagacaggattttcgcgtgcaaagatcagcgtctatatgaaaaatcttgccgcttccgacattatcgaaaaggcagtatcgtttgagaccggcggatgggagaatgccaaaaagggagtttaccggatccgggataactatgtcaatttctggttccgctttatttatccgcatttgtcagctctctacatgatgtctgcggaagagttttatgatacttacatcgaaccggggttaaatacctacttaaaccgttactttgtgggtgtctgcatggaatatctgtggcttttaaatcttacaggaaaattgccgcttcatattaaaaaaatgggaacatggatcggcaagacaggaaatattgatatcattgcccagaatgaagtgcgggaaaatctggtcggtttgtgcaactgggaaaaaccgcaggtcacaatggagatgtgtgaagaattgtttgcaaatatgaaaaaagcaaagatcagtgcgaattattatttcctgttttctgcgagcacatttgaacaggcagttgttgaaatggcagaacaggataagcgttttgttctgatcgatatgagtgaattataaaacagaaacggagaaatactttagtggcaaagtctttgataataacggagaaaccaagtgtagcgcaggaatttgcaaggattctcggcgtgagcggacgaaatgacggatatattgaaaatgacaaatatgtcattacatggtgtgtcggccatttggtggagatggtctatccggaagaatacgatgaaaaatacaaaagatggaggttggaagatttaccgtttctgccggaagaatataaatacaatgtaataccaaatgtcagcaaacagtatgatacggtgcatcggatgcttttcagagaggacatagaaactgtctactgggcaggcgatgccggaaaagaaggacagacgattgaggaaaatatcagacgctttggcggggtcagaccggggatgaaagagctccgcgtctggatcgattcacagacggaagaggagattctgcgcggaatccgtgaggcaaagccaatggcagagtatgataatctggcaaaatccggtattatgcgcacaattgaagattatgcaatgggaatcaatttctccagggcgatgtcggtaaagtacgggaagctattgaatgatgctgcggcgactaaaagttatacggcgatcgcggtgggacgagtcatgacctgtgtacttggaatggtcgtgatccgtgagcgggagatccgcaactttgcggagacgccgttttaccgtgtggtgggaggattcctgccggaaggcgcggaaacggaggagacagtaaccgcagagtggaaggcggtaaatggttctaaatattttgaatcgccccttttgtataaggaaaatggttttaaaaagcgcgaaagtgcggaaaatctgatcggtgaacttgacggaaaacaggcggtcgtaaaatccttagagcgcggcacatccagaaagaaagcaccgttattatttaaccttgcagagttacaggcagagtgttcgaaacgatataagatcagcccggatgagacgttacaggtggcacaggacttatatgagaaaaaactgacgacttatccgagaacggatgcgagagtgctctcgacggcagttgcaaaggagatcgggaagaacttaaatcgtttaaaaacctatgagccgacgaaaacttatacggagcgtattttaaaagagggtacttaccggaacattgcacgtacacagtataccgacgattcaaagatcacagatcactatgcgatcattccgaccggacagctcacggaacttggttcgttaagcgatttacagagaagagtgtatgacctgatcgtgcgccgcttcttaagtatcttttatccggcggctgagtatgaaacgatcaaactggtggtacaggtgggggcagaacagctttttgcatctgcaaaggtgttaaaaaatccgggatttcttgaaatcatgggaagaccgggaaatgatgaaaataaggaagaagaaagtgcgggactcttaaaactggcagggcagttaaagaccggtgatcccctgaaggtggacggttatgagatcaaagagggaaagaccgcaccgccgaaacgctatacctccggttcgatggtgcttgcgatggaaaatgccggacagcttattgaggaggaagaattaagggaacagatcaaaggctccggaatcggaacttctgcgacgagagctgagatcatccgcaaactggtgcgtatcgggtatctgaatctgaacaaaaagacgcaggtgctaagcccggaagcgatcggagagatggtgtttgaggtggtaagcatgaccgtgccggcactcttaaatccgaagatgacggcttcctgggaaaagggactcgacggtatcacgcgtggaacagtcatcatggaagattatcgcagtaaactggaagattttatccgcaaagaaacggtttccatgatcgaacatgacctgaccggcaatcttgcggcgaggattcatccgtttgtcggaaaaggcggaagagggcttgccgcaaagaaaaaaatagaggcagtctgtccggtctgcggcggggagatggagacgacaccgttcggctatggatgcagcaattataaaaaggacggaagcggatgcaagtttgccatcggaaccatagcaggaagagacttagaggaagacgaagtggtggagcttctgaccaaaggacacacagaggtattgtccggctttatctcaaagtccagaaaacgcttttctgctgcactggtacttgaaaaagatgagaatggaaaagcatcagtcaattttgacttttccaaaaatgaacctgaaatattagaaggggtgaaatgtccagtctgcggttctgatatggaaatcacttcttttggttacagttgtgtgaaacaccgtgaagatccggaaagctgttatttctccattggaaaaatcgcgggaaaatcccttagtgtggatgacctgactgatctgctgcaaaaaggagagacggaggtcttaaaagggtttaccgcaaaaaataaaaagaaattttcggcagcattgtgcttaaagacaggtgaggacagcagaaaaacagtcgaatttgatttctcaaagaatgaggcggaaatattagaggatgtggtctgtccgatgtgcggtggacagatacagaagacatcgtttggctatggctgtatgaactatgaccagcaaaatccacagagctgcaggtttgccatcggcacacttgccggacgtgatctgacagagtcacaggtgaaatcacttttaaccgacggcagaacggagacgatccgcggttttaagtcaaagacgggcaaaaaatttgatgcctgcgtggcattagaaaccgatgaaaccggtcggaaatatttaaagtttgactttgatcatgtggaggcaaaaaagataaaagatgtttcctgtccgctctgcggcggtgatattgtgcagacaccgttcgggtatggctgtgcaaattataaaaaagatgatccggaaagctgccgtttttccattggaaagatgggagaaaaaacgttaaatgaggcacaggtgaaacagcttctgacagaaggccggacagcgacgattcgcggttttaagtcaaagacaggaaagaagtttgatgcaaggattgctttaaaaaaagacgaatccggcaaggtaatcggactaaaatacgatttctcggatgtggaagcccccaaattaaaagatgtgaaatgcccggtctgcggcggtgatatggtgaaaacgccgttcggctatggctgcgcaaattataaaaaagatgatccggaaagctgtcgtttttcggttggacagatcgcaggagtaaaattaaaagaagcacaggtcaaagaacttttaaccaatggaaagaccggtgtgatcgaaggatttatcgcaaagaccggaatgaaatttgatgcgccgttaaaactgacgaaagaaggtcagatcacatttgatttcccggagaaaccaaaacctgtcgagacaacagtaaaatgtccgaggtgtggggaactcttaaagaaaagccaatggtactatgagtgtgactgcggttttaaggtagggcatacggttgcgaaagtgccgctttcggaagcaatcataaaagaactgttggaaaccggaaagacaaaggaaaaagtgactggatttaactcgaaagcagggaatgtgtttgattcctgcctaaaatatgaggatgagcggatcagttttgattttgataatccggaaagcctgtctctgcaaaaacaggagtcagagaaacaatcagaagtgcagatggctgtgcaggaaaatgagactgaaaaacagcagccacagcaggcagaacagacaccggatggtgcggatgatttctatgccactatggcggatgaggctgcagcatttcaggaacaggaagaagcagaatggatcgctggaagtaattttttagatgaatttatgccataagaaatctccggcagacagaaattcttgtctgtccggagatttttttgcagtgttcgaatattattttgacagatctgtgaaaacgttttacaatagaaccagtatacaaacagaaatgccaggatcacactggattcatatccatgtgacagagacattctgggatggaggaaaagatggaaaacgcaaaaatcagcaatttatatgatttagatgaaacaatcgcaaaagaatatttagaacagtttacatatccatgggaggctttaaaagggatcagtgagttcataaaaaaacttggaccaacattagatccggaaaagtttgaaaaaagaggcgaggatatctgggttgcaaagagtgcaaaagtggcaccgacagcatgtttaaacggtccgctgatcattgatgaggatgcagaaatccgtcactgcgcatttgtccgcggcagtgcgatcgtaggaaagggttctgttgtcggcaattccacagaactgaaaaatgatattattttcaattccgttcaggtgccgcattataattatgttggcgattccattcttggctataaatcgcatatgggtgcaggttcgatcacgtcaaatgtgaaatccgacaagacactggttgtggtaaaagacggtgatgagaagatcgagactggattgaaaaaattcggtgccatgcttggggattttgtggagattggatgtaactctgtattaaatcctggaacggtgatcggcagacatacaaatgtatatccgctttcaagtgtcaggggagtgatcccggcaaactcaatttttaagaaaccgggcgaggttgtacagaaaaaagaagcatgatattcttaaacttaagatccggacaggtcggataagttatggcagaaaatattgattatattttaagtacagggagataaaatatatggaagaagaaaagaaatatatttataatgataaagcggaacggatcaaaaagatgaaccggttctatataggtgcaaccatatttcttggaatattgtttttactgtatctgtggctccgcatggcaaatcagaatctggtaaatgcaacagtatatgggaatactgtattaataataggcgcatcagttttgaacacgattatttatcataaagatcatgcaacagcaaaattaaaagtgattgctacgcttgagatgggattagagtatctgttagtcggagtacagacagatgcacattttattacgtatgtactgatcgttttagttgcgttacagattccgtactatgatgaaggtggattaaaaagaacctgtgtgggagtgagtattctctacgtgatcgttacgattgttcagggaataaagggtattactgtattgaacgtggatacaatatgttctgtggtcggcgtgcttggcgttttatttatggtttcaagaattggaaagatcacattattgtttaacgcagatgcacttggatccatagatgaggaacacaaaaagcagaatgaaattttacagggagtgcttgagatttccaaaactgttcaggaagaatcagttaagagcagcagcctgatcggaaaactggtcgagacgaccaattctgtaactggcagtatgcaggagattacaacggcttccggaatgaatgcaaacagcatcgaagaacagaataccatgactgcaacgatccaggatgcgatcgaggaaacaagtgagcgatcaaaacagatggtggatatcgcaatgaattcaaatgacagcattcaggaaaatatgcgtgtgatggatgagttgaaagatcaggcagagcagatcacaaatacaaatcatgatgttactgaggcaatgaccaaacttcaggataagacaaaagaagtagaagagattgcaggtatgatcttaaatatttcaagccagacaaacctgctggcgttaaatgcatctattgagagtgcacgtgccggagaagccggaagaggttttgcggttgtagcagagcagatcagacagcttgcggaacagacaaaaaattcgacggaagagatcacgagaattacaaacgaactgaatgcaaatgcaaatgatgtggttgtatcagtagaaggttctgtacaggcaacggaagatcagaaagaaaagattcttgctgcgtcagaaacatttaatctgcttaataaaaatataggtgagctggttgcccatattgaagaggtcaataaaaaggtaagcggactttcagattccaacaataagattgtggtaaactgctcgcagctttcggcagcgactgaggaagttacggcgagtgcagaacaggtacatacactcagtgaagaaaaccttgatgttgcaaaacaggttcagaatgcggtagagaaaattcacagtacggcagatgatataaaaaagtttttgcactgacagaaaggagtgcataattatatgaaaaataaagtgtggttgtttacagccgcacttttgctttttacagcagggtgt

SEQ ID NO: 5138 - DNA, 13294 bp, Unknown
  gut microbiota DNA sequence
aaattttttactaatttatggttgacttttcatagctggtctccagagtccactaataaaacatcatctatatcgtcataccaaatcttctcagatttttcaaacatatcagaataatatacttttgtgtcagtaaacaaatatccttttttcccacttcccactatagtgatatcataaaagccaattattgattttctatccaatccagatgcaaatttctttattgcattatcaattttttttgatgcaatattttctgcaatttcaaatccatctgatgtctgaatttgagaatagtatttttttaataatgcaacttttttttcatgttgatccatatcggttcctcttcttatgttaaaatcatagatttacccgcttattttctttttaaaaatccaaataaccccttatttcttggctttgaattttctattcttgtattctgctctttacttacttcatctgcataatgccccaatatatcattaagatttattctttcttcttctatcatccatctataatgtgctctttcctcttcgctttgagcctcagtgcttttttccatccattcttgaattcttttttgattttctgcaattatttttcctacatctgccccctgctgcattcttatccgataatatcctgcaatttcctctgactcattctgtttatttttttcaatttctgcaatagtgatctcagcctgtgccctatatttttccgcattagcccttgatacttcttgggataatcccactatcattttcattgcctgtattgcattctcgtctaattctccttgttttttttcctgtagttttccattttctactggcattatttcattaaattcttcatctctcatagtgatttctccttaacttattaatttttttatgcattttccaaaaatcttttacattttcgctgtttgtcttcgctatgttaatttccttttcatattcgttctgaaatttttccacaatagttggattgatcatcaatatctgtgaactcaccgccgccacattatcacctgtttgccttataatttctaactgttcttctatgttttttattttacctccatatacttccatctcctgtttcatccattttctgtcatcttccatattttgaataaatctttttacattccaataatacaaacgagttgtacttgcaccatattttaatcctttaattccactataatcgcctaacacatgtggaatatatctttgataattattggctcttgatatatcaatttctttccttaaattttttaaagggtcactaaaaaatttctttggataaaactcttctaatacctttaataccctatcttttcttttattaatccgtttcattttgtctttatatttctctacataatcttcatgttcccgtaaagcttgtattaaccattcctcaatacctcttatttctctaatacactttgtagtatttacatctatcaaaaaccatattgcgcaaacaatatatgaaataacttctacccagaaatatccctttcgcatatattcctgatattgataccactcataaactccacctgctacaaacatacaaaaaaacagataatacaaaaatgtatgtacatataaaatccgtttgaaaataatcgaaataaacctataaactatactcatcaactttataaccgctaatggaatcccgaccgaaaataacgctttgaaaagtactgttatccatgctgcatctagatatcgatttttttcatttatgaaaaaaggtaacgtcattataattcctatcaacatttcacaaataatacgtgatgttttcttctcttccatttttctctccatgtacaatttattatatttttcttctattttactctataaaagtgttcttttcaacccttttcccgcgttgtatatatttccacacaactgataaaataaaagtattattcaggagattttaaatcatgaatcgattaaaagatttaagacgtgagatggggttaagccagcaggctcttgctgataaattgaacgtcagccagcagaccatctgtaagtacgaaaataataccaatgaaccaaatatcgacatgttagaagccatggcagatatttttgacgtatctgttgattatctgattggctattcttcgtatgcccataaagtagaggaagtgtccgaaacagccctcaatgaagatgagctttcctttttaaaaaaatatcgttcgatcaatccttcctctcgtgctttagtacaacagtttatggacgaatttctgcgtttatccggtgaatgatttttcttttattataacgcacaccctagacaccatctgtccatctcaaaaacttttttaattttttacaacttcaacataatctccctgacttcgcagccacatatcaattcctttgccaaatgtttcagctgaaattaaaaactttccgtcttcctctttcagaatctttgccgtcggcagacgatctaatattgcttccacactggttcccttataccagaactccgtacgctgtaattttccgccatacatgaactgtattcgtttgcgatactccccttcctcgaaccggtctttatacggaatattaaagtgttcatcaagcacctgaagttcctggatccggtcgatccggtaaatggttggaaacgcatcatttgccacatcaaatgccttttctttatcgattccttcaatatttgcagccagataaaaataaaattcggaaaaaaggattgcctgtggttctactttacgcttcacaacttttttatcttttgtacgctcatagccgatctcaatgcattttttctcatgaattgcctgtccgatctgccacatcttatcaatgaataccctgtgatgctgcggttcaatgtaatggtaacgctcattggcaatcagttcactgacaaggctctggttctgcggcggcacacagcactcgatcagcttatctaacatctgcatcatttcgtctttggtaaatgcacggctgtctaacaatattttggtaatagcaagcacttcctcgttggaaaaacgcattccttcttcctgctcaagccgataaccattcttccttctgtcatagatcagctcattctggataccaaaatcattgacacgttcgttcagataacagcggatgtcatctaaatctctttgaatcgttttttcatccacaccgaacttttgtccagcatcagttttattgattactttaccgcgcatcaaaaggtcgtacatccgcagaacacgatctgcttttgatcttttatctatcggctcctttttctccataatcgtatctccatttgcaacatattgcacatacttttaagattaattttatttttttttatgcatttttaacatattgttattgtaacacatctgtattttaatttccacaaattcagttattttcttagggaaatttttgaaaaaacttcttctgactatccgcagactgccagaagaagttctcctaaaaccttattccagccagtgatcttttacaatatttgcatcttccaagccagtccttttttaatttttttccacaaaatggacagattcttggttttaccacacaatacattttcccacttccttttattcatccagcagactcagatcactaccctgcgcatactctataggattgtcattctcataatattcgccatccccaatctctcttgaccacaaaagttcttcctctgcctgatttccctgcagagtaagacggcgtacttcttccacacccatatatccataaacttcgtacagaccatttccatcctctgctacataaaaactatatatcccatagaacggacttgtggatgaaatcgcaccattttcatcaatcgtataaataatgttttcataatctgcattacaggttccataactgagcagaagatcttttcttccatctccattaatatcatacaatgaataggtacagtttcccggatactcattttccatttcaacaacaaaggaagaatacatttccctgtaatccagattattaacatctacatcatcaaattcgtactgattttcatcctgtgccaaggaatcttcctgcattgtctgatctgtaaaatcatccgatacattttcatctgaatgatcagcattcaatatggtatcatccacacccagatctacattttgttcggcatcatcagatgatatcattccatgtgactcttcataactgctgaaaatagaatctaacgcaattcccatagtcagcatattctgtgattctccatcaatatctaaatattctacggaaaaagtttcattatcatcagcaataataaattgaaaacaaagtttcgcttccttatctccatacatgcattttccatgaaactcgactacttttctatcgctggatgatttaaaatactgccagtccggatctgaaaaatagtcatcaaacgcttcgccataagtaatctgcggataactgctcggtgccccgccttttaccatttcaatgtattcatttcctgacggaataaggtacagcaccacaagtaaaaagattcctccaaatgttccaatcagcgaagccgtatgtaattttgtcagtctcattgcctttttatattttgtaaagggattcatcggcaatgtatgattctcttcttttgcaatataatcaagaatagcattttcttctacaacataattataatttcttcttgaatcttccttgctgcgtatcacatgaattataccatcctcaaggttcagtctgtgttttccgtattttccctgcacctcaacatttccctgttcattgtaataaacctgttttaccagaaaacagttcatgtttctgataatctgcatcagttcctctgaagttggaatattggttttcaaaccatccgcatactctttgaatcttttattgacaaagatccatcggaagagttcccatccacaaccataaaaaaatgatactccaaaaatccataaaacaatttcccttaaagtttccatctcattttcctcccttgttttttgatatcctcattctagcagaccacacggacacataatgtccatgtacatttttaagtaaaaaaatagacagaaatgtttttcttacatctctgcctaaaaagtatctttattttctactctttcctttttctctcagctctaacaccagctcatacacctccggtctgcgctctttcaaatggtcatctaacagatgtctgcgctctttaaagcgctccgccaactccggatgctcctttgcgatacggtcatgcacttctttccggtgtgcctcaagtctgcctgcaagcgttacctcatccttgccggaaatattgacgatttcctttaagtgctcctctaaatgttccagccattcatcctcatcaagtgcctccatgtgtgcccagcggccatgaaacagattttcgacatccccagtcttttttaactgctcaatctgcagcacaatctgtctttcgatttcttcttccgtttccgaaccaaatgcccagacaaattcctgcacacggttatccgcacgttttctcgatgcgctgcgctcctcattatccacgccgccctcaagaggatacggtctgttgattcccatatcttttaacgcgatatgtatggttctccgcacacagccttcctcgatgagatagccaagacctaattttcgaagctgctcattcacgtctgcgatgtgctctgtcatatagaaacggattcctttttccttcaaaaatttgtacaggatctccagacggtctgccgctgtgatatccagacttccgattcctccggcatccagaatgactgctttcgtgtcatctttgatatgctcctcgatatccttttgcagcaccccgatattggcaaaaaacaaattgctgctgaaacggtaaatcaaaactccctccaccgcatggatctggctgccttcccgcagatctctgaaatgctgatggccgggctggattcccaagaaacatcttgccggttttgaagtacggatgatcatttctgtaaaagaaaggataattccgatcaaaacgccgttaatcgtgccaagcatcaatacaccaaaaaaggctcctataaaaatgaaacactccgtccggctgaccttccacaatctgaccgcaagttcaaactccgttgccccaagcagtgccgagatcacgatcgccgtcagcaccgggatcggcagatacccgataaaaccggttccacagaggagaagaatgatcattgataacccagccacaataccggtaagctgtgtctttgcctgatactgttcgcccattgcactgcgcgatactgaaccgttgatcggacagcagccggtaaatgccgccacaaagttgcccatggaaaatgcaaaaatttcctgattatcatcgatcttgtaaccatttttctgtgcaaaactattctcagccagcaaagtttccgccataatgacaacagcgactgacagactggtgatgatcgcatcctttggtgcgattgcagaaaaatccggtatgctccattctggcatgccaggttctactgctgcaagtgtctgcaccccccactccctgaccggcagaaagcgtgtcataagtgcgcctgctgccatcagtgcaactgccattggaaactttggcatcactttttttgataccagaagaatcacaagtgcaaaaagtccgatcacaagcgacggcagattgatctgacctgccgtccctgcaatatgctctgccagttcaaaaagttctccgactcctgccgttccacccatcagctttggcacctgcatcagtatgatcgtggtacagattccggtgataaatcctcccatgaccggtgcagaaataaaattgaccagttttcctgccttcataaaataaaacgccagcagccacaatgctacaaaaaaagtcagcaccggaactgccgccatggcttcttttgtgccactttcgattccaagtccgacgatggcagatccgaccagcgcagccggagctgcatccacaccaaaaataaactgcggcgacgtggaaaacaatccgaatagaatgatcgggaacaccgagccatacagtccgtaaactgccggaagccctgcgatctgcgcatatcccatggaaatcggaatggaaactgccatgataataattcccgctaaaatatctttcggaagatttttcttattataatgttttaatgtctggaatggctgcactctcatgtttcaatcacacttctctctttttattcaaacctgacatgttccagtttttttcttccttactgtatcacaaattttttaaaatcaaaagatattcccttgtaaaatcttcctatgaatgatacgatatttttatgcgctttttcttactaatgtgatgaatcgcgaaggaatttttaatgcagctgtttttataaaacaatgcagaaacggaggattagattactatgagtgaatacagaatggggacaaaatgtgtgcaggcaggttacacacctggcaatggagaaccgagacaggtgccgatcatccagtcgaccacttttaaatacagtaccagcgaggatatgggaaaactttttgacctggaagccgacggttatttttacagccgccttcagaatcctaccaacgatatcgtcgctgcaaagattgcagctatggagggcggttcggctgcaatgctgacttcttccggacaggcagccaattttcttgccatgttcaacatctgcgaatgcggcgatcacatcgttgcttcctcctctatctatggcggaaccttcaacctgcttgccgttaccatggcaaagatggggatcacgaccacatttgtttccccggatgcttccgaagaagagttaaatgccgcatttaagccaaatacaaagctgatgttcggcgaaacgattgccaaccctgcactcactgttttagatatcgaactgtttgcaaaagtggctcatgcacacggcgttccgcttgtgatggacaatacgttccctaccccagtcaactgccgtccgtttgaatggggtgctgacatcgtaacccactccacgaccaaatatatggatggtcacggagctgccttaggcggagcgattgtggacagcggtaaatttgactggatggctcacgctgataaatatccgggactgtgtactccggatgaaagctatcatggaatcacctacgcagaaaaattcggtaaagaaggtgccttcattacaaaatgtactgcacagctgatgcgtgactttggctgcatgcagtccccacagagtgcctttattttaaatctcggtctggagtccctgcatgtccgtatgccaaaacatgtagaaaacggtcaggctgttgctgaatttttagagcagcacccaaagattgcctatgtcaactatccgggacttccttccaataaatattatgaacgtgcaaaaaaatatctgccaaacggcggctgtggcgttgtttccttcggtttaaaaggcggacgtgccgctgcatccacatttatgcagaatctgaaacttggagcaatcgagacacatgtggctgacgcaagaacctgctgtctgaatccggcaacctccacacatcgccagatgactgacgagcagttgaaagaagccggcgttccggctgaacttgtccgtatcagccttggactcgaggataaagaggatctgatcgcagatatttcccaggcactcgatgcaattgcagaataagttaaagtttactgctttttattgaaatacataagaatcgtatactgacaaaaaggatgcatcctttaaactaggaagcatcctttttgttgtacatctcttcaagtaatagtttctttaactgttcttcaccaaccggtttggaataataatatccctgaaaccaggttgccccgaaacttctcagataatcctgcagggatttatcttccacgccctcgatacagcttttcatgtttgttgatctcgcaaaattgactatattctttaccagcatctgctgtttttcattattcagaattcctttgataaagctcatatcgatcttgatctcattcatcggcacacctaagacgatacttgaagacgcatttcccgttccgtaatcatccatcgcaaaatggatcccatactgctggagaaaacatacttcttcattgatcacatcaatcggaagctgcctgcagcgttctgtgatttctaaacaaagatggtttggcggataatcattttcttttaacagcgaaagtacaacatcccgaaatgatttttgttctaactgttttgcagacacatttacattgataaaaaaatccggattaatttttataaactctgcactgtttttcaatgcctctgccagcacataatttccaagatcatacatgcacggattatcctcaatccagtcgataaacagccccggaggaactgccccgtaaggttcctttttccatcttaccagtgcctccgcccctgcgatttttccaccttccgatgtcacgattggctgatattccacataaaagccgtcacaaccacccagcaccgactgatggatgattttcataaaatccagatttacaccaccatttgtctttacgatatcattaaagaacacaagtttatgatttctggcggaacgcgctttctctaatgtgtattctaatttactctgcactgtcatggtctctccgctataattttctaacatcagacctgcagcatagagcttcaactcaaaatgacgtccgtttaacgtgatatttttctcaagatttttccttacttcctccaggaaaattcctgcgtccacccgatccgcatcccttaaaataaatgcacaattggagttattcatatgataaaccgctttattttcatccatcatatagataaaatggtgtgcgatctcccgctgcagacggtctgtataattcgccccatataaaatattgatgtctgccatgtgatcgatctcaacctccaaaacagccacctttctgccggttctgatatatccttccacatctttctcaaacttcttctgtccatacagatctgtcagcgcatcaatctcagggatcacattctgattgaccagaatatgcaacagatattcgtttccatcttcttttaccacactcatgaaaaatccaaacatatcataatgatctttattttcaaacggatataaagctcatccgaaagtttctgtcccagaaagcgtttctccattgcctgtaaatattccggcctgtcatccggatgcacatgatccagtaatatctgataaaaatcttttacatatcccgcctgcatctcaaaaaaagccgccgtcttttccggaatcatagtaacatgactgttcctattcgtaattaacagatatgcatctgacaaaagatcattcacccgatttatgatgtctgaaaagaaacgttcttttccattccaaaactcctgttctcccatagtactccccatttctgatcacatctgcatcagctgatctgttgcttctttcacatataataaggcattgtcacggtttgaggcaatctcctcttccgtaagttttctttttatcttcgccggatttccaaatgcaaggctgccatccgggatctccatattctgtgtcacaagcgccccggccccaatgatacagttattgccgatcaccgctccatttaaaataattgctcccattccaatcaatgtattatttccaaccgtacatccgtgcacgattgcactgtgcccaatcgtcacatcatccccaatggtaagcgcatgcccggctccaacatgaagaactgcattatcctgtatattagttcggcttccgatcgtgatcttttccgtatcgccccggaccgtcgcatgataccatattcctgaatcttcgccgatcgtgacatcaccttttacgatcgcaccttctgctaaataatatgccatgatataccaacactttctgcctgattttacatcaggcctgcattcttttatcagtctttcccgtttatctggccaatatatgcggaaacaactgctgccacgccgtcaatgccaagtttacactcatctaaacacagatcataattgtccgccaatccccaggtttccccggaataataattatgatactgctttctccggcggtctgtgtcatccacgatcattttggcttttaattcggatacctgatgtttctttgcaattttggagattcttgttttcttgtccccacacaggaagatgcgtacagcatccggatgttctttatatgcataatccgatgcacggccgattacgatacacggctgatcctcaaacagtgctgacaatgcttttttcggtgtctcacgcacctttaaattcatatcgtccgcaaccatactcatcatatcatccacctggcgttccccaaaataaaatggatatttgtcatacacttttttctcttttgcaagctctatcagttcttttttggaataacacgggatgccataaatctctgacaattttcttcctacttcgtccccttcacatccacattgtctggcaattgttataatcataataatcctccattcctgcacgtccctttataaaaacaacattcttatttttataaaaagtgctctgaccattccttttctttaaagccggtaattaccgtacttccatctacgatcaatggacgttttaccagcattccgtttgtcgcaagcagctttaactgctcgtccccgctcatttcaggaagcctgtccttaagcttcatttctttatataaaagtccactggtgttaaaaaatttctttaatggcagaccgctcttttcatgccattctttcaattcctcgtaggacggattctgctctacgatgtgacgatccgtatatgtaatctcatgttcatccagccattttttcgctttctgacaggtggaacatttgggatattctataaaaagcattggatgtcctccttttggtatggtacgttgttgttaattgatattgtagcacaaattggatgggagtgggtacacaaatcctttttcagatggtggcattttttatcgtaacggggaaccgtgacagcttgctttctctcgcctctattgtgataaaatcaaagtcggatttttcaacaatgtggcaataaccggggtatatttagatactccatagtcttcaacaatactggttattctagcccctgcatcctttgatgaagccccgcataagaaaatcctttcattagcagttccataatccaatacgataaaacgatcatggaatataccacctgtctttttcattgatatttttacagatggatattccttgcaaaaatccgtaaattctatattatgaagtttattattcccaacattatcgctgaataaagtaatatttactcctgtaggagaatttttaagatgtaccagcgttcttaatccaatataattgtctacgacatatattgacgactttgcctgcttataaatggactcatatacctcatctgcactactaaattttgcattaaacataagccacttttcatcatcatctgaaacaaagctgttcatcatatcagccaactcagattttgtcacaacatccttcaagccttctgcaacatctgaaatctgcttttcaagagatatcatatctgagttgattttgttaatttctattctgttgttggcagtctccatgcttaactgaagtatttcccgctgacctattaaatcacgattttctaatatgtaatctttcattttcttaaaggttcttattaatgccttgctctgcttaactgccaacggtcctttcaagacaatcatcaacatatataatccttgctctgtaaatacatgaggattatatctactcttactgttaagatttgcggtcaaaaaatttgaccgcaaatcttctacctcatcatccgttaattcgaacataaaatcttcatcaaatttctcaatattattttttacctgttggttgaatgcttttgtggtataaccatatatttcagaaagatctgagtctaagattactctttgtcctctgatttcataaattctttctttcatatactctttcataacacatagaggatgcaacagca
